United States Patent Application Publication US 2005/0208558 A1 - sequence listing, part 13

SEQ ID NO: 12269 - DNA, 6605 bp, DROSOPHILA
ccgagcgtgtgtgcgctgccctgtccgtgtacactttattttcaattggtgaaaattgttataaaactagcgaggaaatatgtgaaaataagaaaaggcccaatttcgacactcgaactgtgcgtgcacaatcgaattggcgaccatccgaccgcgaaaacctgataaaaggcataaaaataacaaaggcgttagcaaacgaacgacgggcgaacgaaggcatatagacgcttataccgatcgttcccatacagttgtgtatatttagtcattgcaactgattaacttgacgcaagtaaatgcaagtataaactcaaaaacggccaacgcagagcaaaagtacagtgaaaattggtcgattgtcggcgcacgaagacgaatacgaacaaaaggaagaagaagcgaacgaaacaaacgagaaagagaaaccaaacgaacggcgattttgcattcgtgtgtgtgtttgtatgtgctcgagtgcgcgcgcgtgtgtatgtgtgagggtggaatataaacaaaaaataattaacaatacgaatatcaagaacgattgctctacttggcgaaaagtaaaatgtcacatttgccactagatgcacgggccattctccagtatctaaatgatttgggctataggaacatatcagccgagcaactccgtgaatttctaaaagagctaatttgcgccagaaggtatgcaaccgcagtcggacaaacaaagcgccagcagactcgcaacaacaactagccactcaacagcagcagcttccgcaacagcagcaactcctcctaaagtaaaggtcataaagagcaaacgccccctgtgccactttaagttctacctggacatttgcgatcatcagttagcaaagcgcattgagtccgacatcaaagcattgggtggacatctcgagttctttctcagtgacgatataacacattttgtcactgataagccagaggtcataggcggaacctccggaacaccaggtacacctagcacacccggcacccccacgagtcactaccagcaaaatgatggttcggcaagaaaaccgaatcagaggcaatcaagagcggatgcaatactgagtcgcgtgcggcggagcacggttggagtcgtaaacagtggcaatagcacacccacgacatccctaaaacggagctataccatctggcagacggattatgcccaacgctttataaagcgcattcagaccgagcttaagcaataccttgagggtaagaaggaaggtggaggaggatcaacatcagctagcccccatcatatacagctaaaaaagcagtatgtgaagatcgaatccgtcaagcgtaattatagaccttactaccatcttatcaaacagccagacgactggccaaagatagatttaagcagcgaagacggcgcctttcgactactaacaaagtcgaagaccaaggataaggagcatagcatgacccgcaagcctttgggttcacgcacatcacagaaagacaaacaagctgctggggaagcaaagccactccagcatccttctctgcaggaacttaaaaaacagtctgcgattccgaatagtccgcgttccaattgtcgcgaaccaatagattcgagtgaaaaacaaggtggagtgtgtgagatctgtaaattggaatacgatatcctgaatatccatttgcagagcaaagatcacgagctgtttgcaaagaattcggataattttctggctctagacactctaattcaaagttcggcggatgtgaataggttcctggaggaggagcccgtagagagtgaacttgacatggatgtcgatgaatcgttgagtaatgaggagttgcagagtccccgtcagaggccatcgccagcgttgcgggagaagtccaaaaggataaccaagggaaagcattcgtcagaaaagtttcaaggagttgcagtggcatcacctcaaacgccattccctggtgccaagaaggttcaaggaaattcacctggtagtctttctgaacttcagcgtcaggaacatccaacaacagccgcagcaacgccaacaacgaattcaggacgaaggaaaacacagaactccggtctgtcaccccctaagagagccatgttgccgccttcttctatttataaagtagtagaaactagggaggaatgtgctacgcctcccagagggcgaggaagacctcccaaccaagtggattcgccctcgctgattgtaaagttccaaaagatccgacaaacagagttacaacgactcaatggagaggcagagaactttatgtttcccagaacagcggtgccaactacaaggagcagcagtgagctgcccacggatgtcgatcgacaaaccacctcggatgtaagaggcagatacagtatctcctccgccagcctagacactagcaccagcgaagcagaaactaaggaatcttcaggattacctactagcatacgcaagcgagctcaagcagtgggaaggcgaagaaaagtaggaggagcagcggcgcaggatgttttccaacgccaattatcaacggggagtagtagcagcaatagtaaccagcagcgctttccaagcgcccccatccagccagaagaagggcctcaaccgcagccaaaaccgcagctaaagatcaagataaagcaggagcaattggtggccaccaggaaaagcagtcgcacagctacggctattgtgacagcagccaccgccagcagtcatcagcagcagcagctaaggcagacaacttgccggaaaatggccaataaactggaggataggatgggggaattagtaaagcccaaaataaaaataaagaaggaagtgatcgaagagcagaaagtgaaggagttggaagatctggaagagatattagataaagaattagatgaggaggtggacagtagttgcagtagtggtagcgatgaagactacattgctggtagccaacgaagaatcacggcagctcctcgtaaatcaacagatactcgtgaacaaagagcagctaggcggctttccagattaaccataaatcgtagtgccggagagctggagttaacggaggtcaaaacgtctccttcgaaaagccgcactaagatccagaaaccgtcaagtcccacgaaaaataaagttaaacaaacgaaggcagtgccaccagcgatagatttattctttgattgcagtaaaagcgaaagacttcgggaaatgcagtataccttcgaatcgttgccaagtggggagctttggaatagagtttttctgcgacaggatgcgggtgaagagaactattacacgtattatggtagcactaattataggaaactgccctatgaaatgggtcccatacccatggccaaaacattgccagcacacagttgtgcattatgccgcgaggcaagcgaagtaaagcaggataagggagagcagatcaagctggaagatcagaagcccgcgcccaagaaagaagttaagaaggaggaggaagtccagtcctcttcctcatccgcgacctacaagaacaaaaagctccatctgctccaacgttatcagcaggaacaggagcaactgcagcagttggagggaaattccttggccactgccggagccaaatgtgatagcaaggcgagcacaccagaattactggaaagggagtttgcctcgggttctatgggggatagagtgcagctgatagagagagtgaggagcacatccagttcaagctgcagtaacagtcaacggagcggcataacctgcaggaataagcagctggcccggattgccgaattaccaccaagaaaatcccctagagaacatgcttctactctggctttggtcagttgcattatacggcagcgtcaggactcacaaagtaaaacgaactcagaagcagaagagccacctcctcctgtagccgcaccaaagcttaaaactccgataaaacaggaaccagtagcaccttcatcgccccgaacgactcgttctcaagctgcgactcctgttgaggaactacgatttgccaccgagattagcgagacagtaaagagaatgaggcgggggcaaaacaaatatgatcattccccgccagcgccagttcctacccccgcaacttcttcacccgttagaagtcgccgcctgacaccagcggctcgtaatcagagtcagatttattcgcgccgattggaattcgcaaccagtcaaagggaatcctcagcaagtgcgcttctgggtaagcgtaaaagaagagttaatccttccgttgcaggcacagtgcgaccgactacccaaaatcttcccggaacgggtgcgtatcgtggagtccgcaaattgcccagcaagaagggattgctcgaatacgaaatggaaacgtgtgcccttaaagctttggatcaagcccgtcagtattgcaatcctggcttcgttgcctggcagttagataaatatctggagctagctggcaaggagtacgatatagaatttgaccagatatcaccggaggtggagtctgaaggacgagaagaaagacttgttaacacaccacaaactccaccacctactgattgctttacaagcgagtttgacttgtgcgatctaattatgggtagtgcagggagtggagatgatgatgaagatgtatccagaggaaacccacctggttccggtcgacgaatgagtaatctcaatctatacgccagctattataggaaaaggaagagcctgaagtccaatcgcacgggttggcctaaagctcagagaagacggaacgcaggcggattaggtggcagtcgagctttgccagatgagcgaattaatttccagaaaatgggtcttgctgagctacaccctataaagcaggagccaatggaaacggaagaggaacagaccacaaccactaccacaactactacgacttctgcgacgagaggaaatctcctgagcaaagacgatgaagatgatgaaggaggcggaaactcgccctctggtggatcacctgctgatgataaacagaattcccgcgaagatgccgtgatgactccgccagcgaccgatgttgacgagcaggctgaaccgcaggcggatgaaatggaaagtctgcccgacgaagatgaaacaatggcggattctgtggatcagcagcaggatgttgaggcggaaatcgaagcaactgatgcggatgtcgaggaagaagaagaggaggaggacgaggacgaagatgtttttgaagatgcctacgaagagcaggacatgggcattcagaaaactgagcctcatgaaaaaagagctcgaataccttccatatcggtaaccacgccgcctgaagactcttcacagggcaaaaaactcttgcttactctgcataatggccagcgactacaggccacctccacaccaagtaccgggcaagttcaacagcatcagagaagaactccccagctgaacggaagtctaggcagctgtatttcgccaagtgagaaactgggtgacaattccgacatattcacggtatcatctgacggcttggataccgatttggatttaagcaacacccaggcaggcgattcgcatgagcattgcccacaccagacgacgccgaagcggaagtttgacatctccaagtatgcgccaccgaatagtggaaaggcggcgagcagttgtgccgccgaagcggcgacggctgccgtgaagtcattggccatctcgcagttcctgaagaaggagacttgcgcaagctcatcaagcatgaggaacgcctggcggagaacgcaaaggagagcgatttcagcggcctgcataagcgcggcaccgtcagctcgcgtgccaaactaagtttggataaggataaggagaatgcggctccatcatgtccgtgtccatctgccaaggagaaggagtgcaagactgacaaggatgacgatcttaaggagcgctccgatggtggggccagttttgctgacttagctcgcctttttaaggaacaactcttgatggatgcttctgtgcctccaatgtcggctaacaatgcagttccccaaaaatctcaggtgaacggaaggcgtcgcagccgcagcaagacccgccgggaaaaggcaccatctatttctagcagcgaatcggaggctaatgaagaccgcctcaggatgcaacgccgccgccggagcaagtcgcatccgcgtagcgcctccaatcggagatctggttcgggtaagtaatttttaacacattgatattttttaaaataacttaatagtcattcccatctttccccatttagttcaccaacgtcgaaaatccatgcactgcgatccggtggcattatttcagtactatcagaaggagtgggctcattttcgcagccagatccccggcgagaatacccgcatcggagtacgcagcaagccaatgggcctgaaaaagtgaagatcgatttccgattcaactataaatattaaaattccatacttcattcgattccgctgaactgcagtgattactcacacttatttatacttgtatccattcttaactcatcattctaagcacttcttaaacaaaaaacaaactttcaaagacgaataaaaaaattctttgcgcttaactaaa

SEQ ID NO: 12270 - protein, 1711 aa, DROSOPHILA
MQPQSDKQSASRLATTTSHSTAAASATAATPPKVKVIKSKRPLCHFKFYLDICDHQLAKRIESDIKALGGHLEFFLSDDITHFVTDKPEVIGGTSGTPGTPSTPGTPTSHYQQNDGSARKPNQRQSRADAILSRVRRSTVGVVNSGNSTPTTSLKRSYTIWQTDYAQRFIKRIQTELKQYLEGKKEGGGGSTSASPHHIQLKKQYVKIESVKRNYRPYYHLIKQPDDWPKIDLSSEDGAFRLLTKSKTKDKEHSMTRKPLGSRTSQKDKQAAGEAKPLQHPSLQELKKQSAIPNSPRSNCREPIDSSEKQGGVCEICKLEYDILNIHLQSKDHELFAKNSDNFLALDTLIQSSADVNRFLEEEPVESELDMDVDESLSNEELQSPRQRPSPALREKSKRITKGKHSSEKFQGVAVASPQTPFPGAKKVQGNSPGSLSELQRQEHPTTAAATPTTNSGRRKTQNSGLSPPKRAMLPPSSIYKVVETREECATPPRGRGRPPNQVDSPSLIVKFQKIRQTELQRLNGEAENFMFPRTAVPTTRSSSELPTDVDRQTTSDVRGRYSISSASLDTSTSEAETKESSGLPTSIRKRAQAVGRRRKVGGAAAQDVFQRQLSTGSSSSNSNQQRFPSAPIQPEEGPQPQPKPQLKIKIKQEQLVATRKSSRTATAIVTAATASSHQQQQLRQTTCRKMANKLEDRMGELVKPKIKIKKEVIEEQKVKELEDLEEILDKELDEEVDSSCSSGSDEDYIAGSQRRITAAPRKSTDTREQRAARRLSRLTINRSAGELELTEVKTSPSKSRTKIQKPSSPTKNKVKQTKAVPPAIDLFFDCSKSERLREMQYTFESLPSGELWNRVFLRQDAGEENYYTYYGSTNYRKLPYEMGPIPMAKTLPAHSCALCREASEVKQDKGEQIKLEDQKPAPKKEVKKEEEVQSSSSSATYKNKKLHLLQRYQQEQEQLQQLEGNSLATAGAKCDSKASTPELLEREFASGSMGDRVQLIERVRSTSSSSCSNSQRSGITCRNKQLARIAELPPRKSPREHASTLALVSCIIRQRQDSQSKTNSEAEEPPPPVAAPKLKTPIKQEPVAPSSPRTTRSQAATPVEELRFATEISETVKRMRRGQNKYDHSPPAPVPTPATSSPVRSRRLTPAARNQSQIYSRRLEFATSQRESSASALLGKRKRRVNPSVAGTVRPTTQNLPGTGAYRGVRKLPSKKGLLEYEMETCALKALDQARQYCNPGFVAWQLDKYLELAGKEYDIEFDQISPEVESEGREERLVNTPQTPPPTDCFTSEFDLCDLIMGSAGSGDDDEDVSRGNPPGSGRRMSNLNLYASYYRKRKSLKSNRTGWPKAQRRRNAGGLGGSRALPDERINFQKMGLAELHPIKQEPMETEEEQTTTTTTTTTTSATRGNLLSKDDEDDEGGGNSPSGGSPADDKQNSREDAVMTPPATDVDEQAEPQADEMESLPDEDETMADSVDQQQDVEAEIEATDADVEEEEEEEDEDEDVFEDAYEEQDMGIQKTEPHEKRARIPSISVTTPPEDSSQGKKLLLTLHNGQRLQATSTPSTGQVQQHQRRTPQLNGSLGSCISPSEKLGDNSDIFTVSSDGLDTDLDLSNTQAGDSHEHCPHQTTPKRKFDISKYAPPNSGKAASSCAAEAATAAVKSLAISQFLKKETCASSSSMRNAWRRTQRRAISAACISAAPSARVPN

SEQ ID NO: 12271 - DNA, 4451 bp, DROSOPHILA
tcgcgacactgagctttctcggcaggattagccgctggttgggcaatgctggagggaggattgccggagctgggggtcagcaggaccatttcgctggacggcgactgcagttcatcggcggcgggcatggcggctatatatgtacgtattatgtcctagggctatggtattattatcccgctgctctgtgacacaatcttcgcacgcgacgtctgaaagcgaactgtaactgtttctttggccgttgtcccgttaattgattaaacgaggcaagtgtgttcgtgggtgtgactccgtgtacatatgtgcgtgtgtgtatatttcttaatgtgtttttcaattgtattgtatttggcttatctactcctgctcttcctcttcttccttttccgccggctagcgttagtttgttttggtcggctcttcgctagctgccgtctcgctcgcaccagcaacacaccctgcagttgagtctatcgcacataaaactcgcgatttaaaagaacaattcacactctgtctcgcggaattcggttaatgggtctggtaaataagggcagacatcgaggtgtaaccgccaaattgtgcaaactctgcggtttaattgtggaattggcacaacgttgctcaaaggtttttcaaccccacgttttctcgagcatcgcagcagtgtgaccagcgcccggctgactgtagaatatcaattgatgctggggtgtttttcttgcgagctacagggtgcaattttttattcaaaaataatatatatacaatatggccccgccgactttcccgctgtcggtcccgtacataagggtaaaatgaaattgaaaactgaattttatacattccatatattgaaatattaacgagaattaatatacaattactgcgtgagcgtacgtgctctcacgtgctctcctctgatttcttatcgaaacgaaaagtagaccacgtctatcgcctatcgccaatcgatatcagtatccaaatagatgagctaaaagcaaatcgacagagaaatacagatcacaaaatggattttggggacctgctgcgctacgcgaaaaaaaatagtgatgcggtcaccaaggaggtggtgggtatcatgcagatgtccagttcgtccatcgcgtgagattttatgcttggaaaacgcggttgcgcctgcattccctttgtgacccaaaataatttatattcgatctgatcattgtaatttttctcctctatcgccaggggcaggggaaatactacagcaccaagtattcgccccccaagaagcagtccaaggagtccaagcagctgtccagcaacatccagaagtttctccaaaagaaggaggccgaggaggcggaaaagaaacggctggagcgccagaaactcaacgatctgctcgccaaaagagacgaaaagtccaagaacaagatacgtaaaatgctaaaggtaaccaaatcggccaacaaatcagtgctggaggatgccaaagactacgagggggccatcgacggccacgaggcgggcgagggtcagggcgatgactacggctacgtgtccactgaagcgaatgccttttacgataagtacattgaaaaggtacgcgatgtacaggaagacaagggattcacgcccagcaggccacagtcgctaaaagatctctctgggaccaaggagcgcgtgaaggcggccattaccagggaacgagaggaggccaagggtaacacacgtcagaaaagcagcacaagcacactcccatccagcgctaccaagtcgaaggagtcctccgtggcccgttcttacagtacctccaagactctttatgatccgaacgcagagaagctcgaggaggagcgcaaaaagcggcaggaggaggagcagcgccgggcgaagataaaacgacctgctcagccgccgcccatggacttccaagccttgcttcgcttagctgaaaagaaacagcacgagcccgtggtttttgaggtggagaaaaaaaaggaaccagagcgtttgttgtcggcccgtgagaaacgcgagttggaagagcgccagcggcaacaggagcagcgcgcccagcgtctcaagatgcgcgaaagtgaaggcaaggagactccgaaatccatccccaatcgcatggagcctaacggacgcatccccaagcttaatcaagccaagccagccaatgcaccaagtgatagttttaaaaaaccaactgccccacagccaacgaaaagcagcgcgagctccaccagtttatccagttccaattcccattcctccgccagtcgcagttctgtctcgagctcaaggcccgctactaaatcagctcaattgactgccagacctggcgcaactgcatcggcggttggaaaaccgagctccagctctagcagggatgtcccatccaagaacccctatgcagctacttccctaaagggaactgtaagggagtttccacctagggatcagtcaagcatctcaaccttggatcgccgaaaaattccggcagctgcaaagacgcgacagactccttcatcggatgttcagagatcacagggcgggcggcaattcccgcccgcagatgtcaagagacgaaaacctaacgagccgccagtcaccaaaagtaaataccaagtttgatattaaaaatgattttagatttcatattttgttctatttttaaaggacgcatttacgacgacgatgatgaggatgaatacgattctgagctggatgacttcatagatgatggcgactgtgaggaggatatatcttctcacatccgcgacattttcgggtatgataagcgtcgttatcaaggaatagacgacgacgatcgtggcatggaatccagttttgcacaagtgcagcgcgaggagttcatcagcaagaagctgggttcgtagcaaaccgcatgaccaataaaaacccataataatgattatatattcgcaggaatgcaagaggatctcgaggacatgcgcatggaggcggcgcacaagaaacaaaagaagctcgtggcgaaaatcagctcacgctcctaggacggtatttcatctcgacgtgggctaatccgtcgccatgtaaagtgtacacctgatttatctcttgggcttagcaacgaaaatttaagcccactcattagtttttgttgtattacgatgcaataagatgaaatgcagagtagattgacggaaaggagaacaggaaaaccagagaagtgcacaggaagaagcgaattctgatgaagattggtttgctgaaaatagcttatttttatatcatattttagtcgaatatccatggttaatgccacaatgattatagcgggctcatatttggtatatgtacaagtacatatgtaaacaatatataattttgtgtgcggacgactacatcgtgtagctgccataggaacatttggaaaattattataaataatggaaaatgaaaactttcttgcgtttattaaagttattaagttactctaagaagctctttaacttacaattgtcgtttattttttttatacaaatacaaaaattaaaacaatcatgaagtttcgacattcgttgaattgaaatcctgatgtgcgtttgccatttatggtaaatccattttgaagacaatatcctttaggatttacttcttgtccttggcctgcagctttgagtggatcatgtccttaaactgcgacagaatcttgttttcgcgcttctgtcgctcctccttgctgaacatggccagtgctcgcttctcgtcggcggagtacagctggttctccttgcggatacggacggcctccatgcgacgatgcctgctgccgctcatcacatagcccacggactcgaaattggcgatttcatcggatgttaggccgatttcaccacggcgaggaattctcttgccctcggcaatgtaggcagccatggcggcaccttctcctggcagcaaggccttgccgaagtccttttgattaagactaccgccgggtcgcagcgaaggtccaacgtcctcgtcgttgtgcgaggcactttccttgttcttcgacttgctggcactggaggaggagctcttcttggacttttccgcctctgacttacgcttcttcttcttctttttagactttttgtcctttttgctagtggaggacttcttctttttaggcttcttgataccgtcggctgtcttttccagccaaacatcttcctcctcggactcatcttcgctgtcagaactggaactggaacttgagctgctggactcgtcgctactgtcttcgctgcttgaagaactggaggaggaactcgactcttgtttgctctttttctttttggatttctttgactttttcttcgacttcttttcagatttcttgtgctttctcttgccctttttctttttcttcttgggtcctatgtaagaacccttcaccagctccacatcgtcggttt

SEQ ID NO: 12272 - DNA, 2249 bp, DROSOPHILA
ctaaaagcaaatcgacagagaaatacagatcacaaaatggattttggggacctgctgcgctacgcgaaaaaaaatagtgatgcggtcaccaaggaggtggggcaggggaaatactacagcaccaagtattcgccccccaagaagcagtccaaggagtccaagcagctgtccagcaacatccagaagtttctccaaaagaaggaggccgaggaggcggaaaagaaacggctggagcgccagaaactcaacgatctgctcgccaaaagagacgaaaagtccaagaacaagatacgtaaaatgctaaaggtaaccaaatcggccaacaaatcagtgctggaggatgccaaagactacgagggggccatcgacggccacgaggcgggcgagggtcagggcgatgactacggctacgtgtccactgaagcgaatgccttttacgataagtacattgaaaaggtacgcgatgtacaggaagacaagggattcacgcccagcaggccacagtcgctaaaagatctctctgggaccaaggagcgcgtgaaggcggccattaccagggaacgagaggaggccaagggtaacacacgtcagaaaagcagcacaagcacactcccatccagcgctaccaagtcgaaggagtcctccgtggcccgttcttacagtacctccaagactctttatgatccgaacgcagagaagctcgaggaggagcgcaaaaagcggcaggaggaggagcagcgccgggcgaagataaaacgacctgctcagccgccgcccatggacttccaagccttgcttcgcttagctgaaaagaaacagcacgagcccgtggtttttgaggtggagaaaaaaaaggaaccagagcgtttgttgtcggcccgtgagaaacgcgagttggaagagcgccagcggcaacaggagcagcgcgcccagcgtctcaagatgcgcgaaagtgaaggcaaggagactccgaaatccatccccaatcgcatggagcctaacggacgcatccccaagcttaatcaagccaagccagccaatgcaccaagtgatagttttaaaaaaccaactgccccacagccaacgaaaagcagcgcgagctccaccagtttatccagttccaattcccattcctccgccagtcgcagttctgtctcgagctcaaggcccgctactaaatcagctcaattgactgccagacctggcgcaactgcatcggcggttggaaaaccgagctccagctctagcagggatgtcccatccaagaacccctatgcagctacttccctaaagggaactgtaagggagtttccacctagggatcagtcaagcatctcaaccttggatcgccgaaaaattccggcagctgcaaagacgcgacagactccttcatcggatgttcagagatcacagggcgggcggcaattcccgcccgcagatgtcaagagacgaaaacctaacgagccgccagtcaccaaaagacgcatttacgacgacgatgatgaggatgaatacgattctgagctggatgacttcatagatgatggcgactgtgaggaggatatatcttctcacatccgcgacattttcgggtatgataagcgtcgttatcaaggaatagacgacgacgatcgtggcatggaatccagttttgcacaagtgcagcgcgaggagttcatcagcaagaagctgggttcgtagcaaaccgcatgaccaataaaaacccataataatgattatatattcgcaggaatgcaagaggatctcgaggacatgcgcatggaggcggcgcacaagaaacaaaagaagctcgtggcgaaaatcagctcacgctcctaggacggtatttcatctcgacgtgggctaatccgtcgccatgtaaagtgtacacctgatttatctcttgggcttagcaacgaaaatttaagcccactcattagtttttgttgtattacgatgcaataagatgaaatgcagagtagattgacggaaaggagaacaggaaaaccagagaagtgcacaggaagaagcgaattctgatgaagattggtttgctgaaaatagcttatttttatatcatattttagtcgaatatccatggttaatgccacaatgattatagcgggctcatatttggtatatgtacaagtacatatgtaaacaatatataattttgtgtgcggacgactacatcgtgtagctgccataggaacatttggaaaattattataaataatggaaaatgaaaa

SEQ ID NO: 12273 - protein, 554 aa, DROSOPHILA
MDFGDLLRYAKKNSDAVTKEVGQGKYYSTKYSPPKKQSKESKQLSSNIQKFLQKKEAEEAEKKRLERQKLNDLLAKRDEKSKNKIRKMLKVTKSANKSVLEDAKDYEGAIDGHEAGEGQGDDYGYVSTEANAFYDKYIEKVRDVQEDKGFTPSRPQSLKDLSGTKERVKAAITREREEAKGNTRQKSSTSTLPSSATKSKESSVARSYSTSKTLYDPNAEKLEEERKKRQEEEQRRAKIKRPAQPPPMDFQALLRLAEKKQHEPVVFEVEKKKEPERLLSAREKRELEERQRQQEQRAQRLKMRESEGKETPKSIPNRMEPNGRIPKLNQAKPANAPSDSFKKPTAPQPTKSSASSTSLSSSNSHSSASRSSVSSSRPATKSAQLTARPGATASAVGKPSSSSSRDVPSKNPYAATSLKGTVREFPPRDQSSISTLDRRKIPAAAKTRQTPSSDVQRSQGGRQFPPADVKRRKPNEPPVTKRRIYDDDDEDEYDSELDDFIDDGDCEEDISSHIRDIFGYDKRRYQGIDDDDRGMESSFAQVQREEFISKKLGS

SEQ ID NO: 12274 - DNA, 2967 bp, DROSOPHILA
cagaaatattttgcaaaggacgtcaaggaatgctgagaaggatgaacacttttagtggtcaaaagctggcggctgtggtcaaggagctggagaactttgctccgacttcttgggcagagaagtgggacaatgtgggactcctgatcgaaccgcaccgcgaaaaacaaatcaagaaaatactattaactaacgatttaaccgagcccgtagtgaaagaagcgctagagaaggaggcggagctcataatcagctatcatccgccaattttcaagcccctgaccaggattacgcagtcacattggaaggagcgcgtggtggcagcatgcttggccaacgatatagccttgtactcgccccacacggcgtgggataagaagagtggtggcgtcaacgactggctatctaaggcagtgaatatcatcagcatccgccctctggaaccggagttgggtgctcctccgggtaccggatccggtagatatatagaaaccaaaatggagctttcccaggtggtggagtctctgcaaaagcgcattagaaacagcgtgcacgttgctctagctgtgggccacacccccaagacactcatccaatccgtcggcatttgtgccggctctggagcatctctgctgaagggtatccaagcggatcttatcattaccggcgaaatgtcccatcacgaagttctggagtttactcacaacaataccaccgttcttctctgcaatcatagtaattcagaaaggggttttctccatgagttttgccctatattggccaaatctttaaatgaagaatgcctggtatttgtatctgaagtggacaaggatcctctggtcaccgtggctagcgatataaacaaagaactaagcgcatttgttgacgtctacaagagcacatcaaaataactttgatcttataagcattttttgtttaacaatgcattttctggcgcatccataaaggttacaaataaactaaaggatttaactttcttaacttctagacttgatccagcttaaacttgccgcccttgctggcggcgtcgtttcgattaagttggtagagcaggcgctgctccagatgtttcactgcagccactgtcagcaccaaagtatcgtgcttcagcatagaatagacgttcaagccaaaggttggcatcaggttgacatagcccagatcatcgctagcctggcaaatattggcggggaacatatggtctctgagaaaaacagaatcagtatcaatttacatattatatgttcacctacaagcagaactcactcgtctacaatcaaaacagaaggtccccaattccgttcggcgattaaatccttaaggaactctgcatctccggtgggtatgtccacattatcgatgatgtgcagatcatcctgggccagcttaacactcagcgtggaggtcaatcctaaaaccctcttatagaagggcagcatgtaaaaatgggtcgtaggcgacctgggtccgtgcactacgccgccgcccttcagcatgggcgaacggagggaaccgtggcgggcacgaccacctcccttttggggccacggcttccgaccaccaccgcgcacctccgctcgagttttggtgtgcgccatgcttacataacgatacttgctctgccactccacattctcctgtatgatgtccacgcgcggctgggcggcaaagacatccggatgcagttcaatcaggccaacctttcgctccgccacagcatccgtgttctcaatccatgcctggcgcgccgtgttcctgctcaccggcaagcaatctgtgtaatcttgcggcagaataaggggtgatcttgtggccggaggtgcgcccactgtcgcagcggcttcggtcaccacattgccgtggttgccgctgcggctgaaagtccttgctacgggataaagcacctgcctggatgtttttaaaatattgttcaacattttactttgcaggcggtaaggtctatcgataggctagattaaacatgggcacctcaacgccgtatatcgattacttggtgaatactgaggctacaccgtgacacgaaaaatgtatgtgcacccatttctcactgtgcggcagttcacatagtgacgaaacgcaccgacaatatgtgcgactactttatgtatccacagaattaaaaattttatattttggggtcttaagggatcattttaaaataaacctttataatagtgaaagcttagctagaaaatagtgaagaaataagtaaagatatatttgaaaaatgaacaggtagaagggagagttttgacgctgtaaacaggattaggattgacttcttggcatagttttgatttaacaaattttagtttagtcaagcaacaatctgctgagataagaaaaggggagaaataaataaatcaaagcaatttaattcggccatatcagcaaggcttgtgaaaatgttttaaatgttggttcttatatagactttttaatcagtttttctcctaaattaatagactttgcaattccgcaataaatttgagattataaacaatatatcatatgcaatagctgtactatttattaacttggtggtaaccaaaaatattcagggacagttttctgattcttcttttaaagaggcttaaagatcagctgcagtacctgtgtttctgaggtacgagaatcgtgtaaatcctatttaatgagtatcccggcttctcggaaaaaatatacgcaggtaatccgcttctaaaattcgtaggtagccgaacctgttctataaataccaagactggctaaatatgcgttcagttgcagttttatcctcaaagacgattcatcatatactcttactccagtatcgctaaagaagctaaaagtgttttcaaaatgaaattcttggtgagtgtttttaaagttaatgcaagacaacagattctttaatatttttgggtctttagattttctgtctgattg

SEQ ID NO: 12275 - DNA, 905 bp, DROSOPHILA
ctgcaaagtaaaatgttgaacaatattttaaaaacatccaggcaggtgctttatcccgtagcaaggactttcagccgcagcggcaaccacggcaatgtggtgaccgaagccgctgcgacagtgggcgcacctccggccacaagatcaccccttattctgccgcaagattacacagattgcttgccggtgagcaggaacacggcgcgccaggcatggattgagaacacggatgctgtggcggagcgaaaggttggcctgattgaactgcatccggatgtctttgccgcccagccgcgcgtggacatcatacaggagaatgtggagtggcagagcaagtatcgttatgtaagcatggcgcacaccaaaactcgagcggaggtgcgcggtggtggtcggaagccgtggccccaaaagggaggtggtcgtgcccgccacggttccctccgttcgcccatgctgaagggcggcggcgtagtgcacggacccaggtcgcctacgacccatttttacatgctgcccttctataagagggttttaggattgacctccacgctgagtgttaagctggcccaggatgatctgcacatcatcgataatgtggacatacccaccggagatgcagagttccttaaggatttaatcgccgaacggaattggggaccttctgttttgattgtagacgaagaccatatgttccccgccaatatttgccaggctagcgatgatctgggctatgtcaacctgatgccaacctttggcttgaacgtctattctatgctgaagcacgatactttggtgctgacagtggctgcagtgaaacatctggagcagcgcctgctctaccaacttaatcgaaacgacgccgccagcaagggcggcaagtttaagctggatcaagtctagaa

SEQ ID NO: 12276 - protein, 296 aa, DROSOPHILA
MLNNILKTSRQVLYPVARTFSRSGNHGNVVTEAAATVGAPPATRSPLILPQDYTDCLPVSRNTARQAWIENTDAVAERKVGLIELHPDVFAAQPRVDIIQENVEWQSKYRYVSMAHTKTRAEVRGGGRKPWPQKGGGRARHGSLRSPMLKGGGVVHGPRSPTTHFYMLPFYKRVLGLTSTLSVKLAQDDLHIIDNVDIPTGDAEFLKDLIAERNWGPSVLIVDEDHMFPANICQASDDLGYVNLMPTFGLNVYSMLKHDTLVLTVAAVKHLEQRLLYQLNRNDAASKGGKFKLDQV

SEQ ID NO: 12277 - DNA, 3596 bp, DROSOPHILA
ataaatatggatcaactggtgcagttgaacaatcaggctggcggacgggacaaaatcgcccgacttattcagtatgcctcgcgtgcaatgtgggactcgctggagtccgccaattccaatccagcgcttgtggacaacttcaagacggttgaatacatcctgagcacattccgaaaatgtaggtattctaaggtattccacgagcacgtagctaatctcatttcaactcagtactccgctttggtaagtgcgttgatgtattctacggcgctctgaagaccattcaccatccggatcttaacatccgtgtgacgctcaccttaagcaagctgtcacaatcgctgttcctcttcgccgatcacttcctctggctggccaggacgggactgacggcggtgaacgccaagcgctggtccaacatcgccaataagtactggctcttctcgatcataatgaacttgtgccgggacttctacgagatcctgagagtactggacctgcatcgatccggtagcaagagcggcatttcgcgctgccgcatccccgcgagcatcaactcgccggaggactttaagcgccttgccctgcagtcctacgtgctgatgcagggacacaaagacatagttgtggacacggtgaagaatgcgtgcgacttcttcattccgctgacggctctgggttacacaagtctcacgccccggacaattggactcctgggggcaatttcatcgctggctggactctgggctctgctggaaccgagggccaagctaacgcctgcataacacctgatattggaaactttgtagataagggcctgtatttccttgtatctattttaagtgttgtatgtattgtatttgtatttgtgctcggattaagctgaatgataaacaaacgattttattaaaccgtcaccttggttatcctcaccctgtcagcgcccttgggcgaatggcaaacagctgacgccatatccgcggacgcgaatggcacattgctagttgtgttttcttgctttgcgtttgctgtttatcaaacgccttttggctaatggtccgcagtccggtggcgttatcacggaattgacgaggccgatgcgtcacatgtgcgtgggctgcatccggacaccatgaactactcgtactccgcgctgtcgcccggcggtagcggaggattcggtggcgttgaccagcacaaccgatgttgcggaaacaaggcctggtgcgtcaaggacatctgcggcattgtgtgcgtaatcatgacctggctgcttatcctgttcgccgaattcgtggtcatgcggctgatccttctgcccagcaactataccgtcttcagtaccatcaacatgatcatattccaggcactcgccttcctggccttcgcctcgcacatacgcacaatgctctcggatccggtgagttgctgatggccatgcactttatactaccttatctatgtatgtaggcggcaaaaatgcctaataagcatgagcttcgaacaatatttttcctatattttcggtatatgtgtgcaaataagatttatatatttatttataaattattatatctaaattatcatctgctccattaactatagggcgctgtaccgcgcggaaatgccaccaaggagatgatcgagcagatgggctaccgcgagggtcagatgttctacaagtgccccaagtgctgcagtatcaagccggaacgagctcatcactgttccgtctgccagcgctgcatccgcaagatggatcaccactgtccgtgggtaaataattgcgtgggcgagaacaatcaaaagtactttgtgctcttcaccgtaagtacatctcttttatctctttcaaccgcccagttaatgcctcttcctttggctgtcgacttgcagttctatatcgcttcgatctccgtgcacacgctcttcctggtgctcacccagttcgcggagtgcgtgaaaaacgactggcgcacctgctcgccgtactctccgccggccactatattcctgctgctttttctcacctttgagggccttatgttcggcatattcaccatcatcatgctggccactcagctgacggctatcctaaacgatcagacggtgggtgctttgcttgctctctctgcacgggattgtatggctaacatactcgcattcctctctccaacagggcatcgaacagctgaagaaggaggaggcccgctgggcgaagaaatcgcgcctcaagagcatccagtcggtgttcggacgcttctcgttggcctggttttcaccattcacggagccctcgtgccgcacaagattcaactcgcacttctattcagtctgagggatgtgattggaatgcgtattagcttaatcgaacaatactaaccaactaacaaacgtacaaggcaacaagttgtcgctacttgttgcgccgctgagtgcaattttgtatattgcaattgctatttttcgatcaattgtcaactatatatttactacaaatcgtgcatatgtatgtgtgtgtttaggcctaagcgaaggaattaaatatccatttccgtggccgggtgaagatgtgtacttacctgacagccctactaaatgccttgtgtacattttgtatttattatcaagtgagagtcgccgtgtcagaagacatgcgccgcatctctgatcatcatcaaaagagcttgctctttctcggggcagccaaaattatccgacatggacaggcgaggctactgctgctgctgctgatctgtctgctcagttcagttcggttcagtctgagaaaaacgatcggagatccaggaggtgtctgctggacgtggtgtgcgccattcgaaccgaacgccgatgctgtgttgtacatattgtttatatatagaaagatagaacatcactgtgttcccaaagtgtgagtgcgagtgtgtgtgtgcgagtgtctggtggatttcaaattggaattggaagaggaatacgtgtatatgcgctgcaccatcagcaacagtttgaaataatgccacaggctgaaaatgtgaatatatcctaattacacattttccgattcattgtgcccgacggaatacgcgtaattaccagcggaaaatttcatttcagtgaatcggaaacggaaaaattcaaatttttaccgtcgtttgtgtgcggcgtttgttctaaatataaataataaaaaaaaaaaaatatattaaatcgctttcggttaatgccgcctcgaaaatacccatccgacaatactgcgccctaatcctacacagaaagtcctgccagtcccatgccaaagtggcccggtttcggctaatcggctaattatatagtgagacctgagacccgagcatggagagatcgccagcagccaatgccgcgggtaagcatcatccgtccaagttcccagttcttggtggcccggcgccgggaaagtgagagaatctcctttttattcttgcacccggttcccggtcccgaacagagtacttaatggctatttgtggggccatgtatttttatggccagccacgggctccgtctccgtttttccccccatcttcttcatgggcttttgtacggccacagtgcgg

SEQ ID NO: 12278 - DNA, 1272 bp, DROSOPHILA
ctagttgtgttttcttgctttgcgtttgctgtttatcaaacgccttttggctaatggtccgcagtccggtggcgttatcacggaattgacgaggccgatgcgtcacatgtgcgtgggctgcatccggacaccatgaactactcgtactccgcgctgtcgcccggcggtagcggaggattcggtggcgttgaccagcacaaccgatgttgcggaaacaaggcctggtgcgtcaaggacatctgcggcattgtgtgcgtaatcatgacctggctgcttatcctgttcgccgaattcgtggtcatgcggctgatccttctgcccagcaactataccgtcttcagtaccatcaacatgatcatattccaggcactcgccttcctggccttcgcctcgcacatacgcacaatgctctcggatccgggcgctgtaccgcgcggaaatgccaccaaggagatgatcgagcagatgggctaccgcgagggtcagatgttctacaagtgccccaagtgctgcagtatcaagccggaacgagctcatcactgttccgtctgccagcgctgcatccgcaagatggatcaccactgtccgtgggtaaataattgcgtgggcgagaacaatcaaaagtactttgtgctcttcaccttctatatcgcttcgatctccgtgcacacgctcttcctggtgctcacccagttcgcggagtgcgtgaaaaacgactggcgcacctgctcgccgtactctccgccggccactatattcctgctgctttttctcacctttgagggccttatgttcggcatattcaccatcatcatgctggccactcagctgacggctatcctaaacgatcagacgggcatcgaacagctgaagaaggaggaggcccgctgggcgaagaaatcgcgcctcaagagcatccagtcggtgttcggacgcttctcgttggcctggttttcaccattcacggagccctcgtgccgcacaagattcaactcgcacttctattcagtctgagggatgtgattggaatgcgtattagcttaatcgaacaatactaaccaactaacaaacgtacaaggcaacaagttgtcgctacttgttgcgccgctgagtgcaattttgtatattgcaattgctatttttcgatcaattgtcaactatatatttactacaaatcgtgcatatgtatgtgtgtgtttaggcctaagcgaaggaattaaatatccatttccgtggccgggtgaagatgtgtacttacctgacagccctact

SEQ ID NO: 12279 - protein, 293 aa, DROSOPHILA
MNYSYSALSPGGSGGFGGVDQHNRCCGNKAWCVKDICGIVCVIMTWLLILFAEFVVMRLILLPSNYTVFSTINMIIFQALAFLAFASHIRTMLSDPGAVPRGNATKEMIEQMGYREGQMFYKCPKCCSIKPERAHHCSVCQRCIRKMDHHCPWVNNCVGENNQKYFVLFTFYIASISVHTLFLVLTQFAECVKNDWRTCSPYSPPATIFLLLFLTFEGLMFGIFTIIMLATQLTAILNDQTGIEQLKKEEARWAKKSRLKSIQSVFGRFSLAWFSPFTEPSCRTRFNSHFYSV

SEQ ID NO: 12280 - DNA, 2779 bp, DROSOPHILA
ccaaaagcagcaccaaccagaagtagtttgagatgagggccagcagcagggtgccggaagtaaggatgatcaaatccttaacgtttctagagggagaatcatgtgtaggcagagtacttcaaagcttctgtgggtgcacttactccgcgatgccgccttccatatttaagtcgttgccggagtccaaaagagcaccgctctcagagtatttggcctgcgacatgaacgccataaactggtaggagctccccaggatcagcaacgaaagaatgtgcataaactaataaagaacgagaggctgatgattgagttcattgagggggattttcggcggcctaccactgaggttttggtgacttcgaagaccaggaaactgaggagcagagcgggtgcagcacatccaatggccatgttccggtagaaagtcagtgtagtcttgttttcctccacgatttgcttggcgcccttcgtgccttgtttacccttttgctggggctgaaagtggacaagcggttttatgtaatccttgagagcgttatccctgtgctagttacacttacagccatggtgggattgcaagttgtgtgtcagctatttcaaaatctaaaatcggaccactatttacgtggcgacgtcttcaactgaacaaaacggtgttgaaacgacagtgctgtgaaacgtgcgcattacttatgttaagcatggccgtagagggaaagtgatattaagggtaaatatagcatttaaaactgtaatggaaaggtacttaagcaatttacttattttaatttgctcttaatatattatttacaaattgttgcacccacaatatattcaatctacgcccacggtgctggtttattaaaaaaaaaacttgccattcacagtgaagcggcagaacagctgctgggccctcagcctaataatcgaactttggattttggatttggcataattttgattttagctgtccaacgagctgtgcggtcacaacataaatatggatcaactggtgcagttgaacaatcaggctggcggacgggacaaaatcgcccgacttattcagtatgcctcgcgtgcaatgtgggactcgctggagtccgccaattccaatccagcgcttgtggacaacttcaagacggttgaatacatcctgagcacattccgaaaatgtaggtattctaaggtattccacgagcacgtagctaatctcatttcaactcagtactccgctttggtaagtgcgttgatgtattctacggcgctctgaagaccattcaccatccggatcttaacatccgtgtgacgctcaccttaagcaagctgtcacaatcgctgttcctcttcgccgatcacttcctctggctggccaggacgggactgacggcggtgaacgccaagcgctggtccaacatcgccaataagtactggctcttctcgatcataatgaacttgtgccgggacttctacgagatcctgagagtactggacctgcatcgatccggtagcaagagcggcatttcgcgctgccgcatccccgcgagcatcaactcgccggaggactttaagcgccttgccctgcagtcctacgtgctgatgcagggacacaaagacatagttgtggacacggtgaagaatgcgtgcgacttcttcattccgctgacggctctgggttacacaagtctcacgccccggacaattggactcctgggggcaatttcatcgctggctggactctgggctctgctggaaccgagggccaagctaacgcctgcataacacctgatattggaaactttgtagataagggcctgtatttccttgtatctattttaagtgttgtatgtattgtatttgtatttgtgctcggattaagctgaatgataaacaaacgattttattaaaccgtcaccttggttatcctcaccctgtcagcgcccttgggcgaatggcaaacagctgacgccatatccgcggacgcgaatggcacattgctagttgtgttttcttgctttgcgtttgctgtttatcaaacgccttttggctaatggtccgcagtccggtggcgttatcacggaattgacgaggccgatgcgtcacatgtgcgtgggctgcatccggacaccatgaactactcgtactccgcgctgtcgcccggcggtagcggaggattcggtggcgttgaccagcacaaccgatgttgcggaaacaaggcctggtgcgtcaaggacatctgcggcattgtgtgcgtaatcatgacctggctgcttatcctgttcgccgaattcgtggtcatgcggctgatccttctgcccagcaactataccgtcttcagtaccatcaacatgatcatattccaggcactcgccttcctggccttcgcctcgcacatacgcacaatgctctcggatccggtgagttgctgatggccatgcactttatactaccttatctatgtatgtaggcggcaaaaatgcctaataagcatgagcttcgaacaatatttttcctatattttcggtatatgtgtgcaaataagatttatatatttatttataaattattatatctaaattatcatctgctccattaactatagggcgctgtaccgcgcggaaatgccaccaaggagatgatcgagcagatgggctaccgcgagggtcagatgttctacaagtgccccaagtgctgcagtatcaagccggaacgagctcatcactgttccgtctgccagcgctgcatccgcaagatggatcaccactgtccgtgggtaaataat

SEQ ID NO: 12281 - DNA, 726 bp, DROSOPHILA
atggatcaactggtgcagttgaacaatcaggctggcggacgggacaaaatcgcccgacttattcagtatgcctcgcgtgcaatgtgggactcgctggagtccgccaattccaatccagcgcttgtggacaacttcaagacggttgaatacatcctgagcacattccgaaaattactccgctttggtaagtgcgttgatgtattctacggcgctctgaagaccattcaccatccggatcttaacatccgtgtgacgctcaccttaagcaagctgtcacaatcgctgttcctcttcgccgatcacttcctctggctggccaggacgggactgacggcggtgaacgccaagcgctggtccaacatcgccaataagtactggctcttctcgatcataatgaacttgtgccgggacttctacgagatcctgagagtactggacctgcatcgatccggtagcaagagcggcatttcgcgctgccgcatccccgcgagcatcaactcgccggaggactttaagcgccttgccctgcagtcctacgtgctgatgcagggacacaaagacatagttgtggacacggtgaagaatgcgtgcgacttcttcattccgctgacggctctgggttacacaagtctcacgccccggacaattggactcctgggggcaatttcatcgctggctggactctgggctctgctggaaccgagggccaagctaacgcctgcataa

SEQ ID NO: 12282 - protein, 241 aa, DROSOPHILA
MDQLVQLNNQAGGRDKIARLIQYASRAMWDSLESANSNPALVDNFKTVEYILSTFRKLLRFGKCVDVFYGALKTIHHPDLNIRVTLTLSKLSQSLFLFADHFLWLARTGLTAVNAKRWSNIANKYWLFSIIMNLCRDFYEILRVLDLHRSGSKSGISRCRIPASINSPEDFKRLALQSYVLMQGHKDIVVDTVKNACDFFIPLTALGYTSLTPRTIGLLGAISSLAGLWALLEPRAKLTPA

SEQ ID NO: 12283 - DNA, 13749 bp, DROSOPHILA
tgtactatatttataaccattttaatataaagctcaccggggtatccttttcgctacgctcctgggaaaacaaaaacagcgagcccactgaacacaaagctgagatttttcacaagaaaatattcaatgtgaaggcgaaaactgcgcaggcgcatgttttgtcaactggcaaaaagatacaaaagacagtcagacattcggaggccgaggctgaaaactctgacgttttcgtgacagcggcaacagcaacaactacaaatgccacaactgctacaataactgcatccagacgccgtgttgaccagttaccaattttggcagcggactttcatttattcgcgattcgattttggcagtttgggatcgctcgttcaaaagggaacatcacacatctgcttagctctctagagaaaatgttaactcatataacgactctcgttttgttatgataattttaatcatacgcacaaatactatcaatatattcaagtacctacactaggaaatggtgatgaaataacacaactaacacaactgtgaacaaacaagcaattcaaaaatttttaatttttgcctaatgcatacattacagacgccttttagataggcaaaaaaaagttgttaacttttattttacattacattctgtctacaccaatttactcaattaggcattcgtagcgacatctaccgcttatttacagtaccacttacagggtatggtgtataattcgggatggcaactgtaagatacgggattttgtcctcaaagtacgttattttatattatgattggtatttttagtgtactttttgaacatgatattttaacagaattaattgttttataattaattgaagtctccgcactctgaaaactctcttacacatcgatataacaacaacttcgatgatcgttgaaaatatcgatgcttcgtctatcgatactgacgaacatcactatcttcaacaagtgtgaactctcagttgagttttgaacttcaacaggtgttgaatacgcgctagactagaaagcgatcccacgatcaaccgactcggtaaagcaaaacaagccatcgaaatcaacaggcgagcacgtgattagcgtcccaagccataaagcatagaaaagtgccgaattgaaccactttcagcaatcgtagtgtcggccaaatccaataaagtttgtgtgtttctttcagcgatcaaaaaccaatatttggattaccctgcttcactttgagaaaagttgtctgcaagcagaccgctcataaggtgagtttccactcgtgccgatctggatttcggatcgtatctttagtccgagagtcggagttatggagtatctgcgggggagggggtttcactggaaaaaaaagtgcagtgcaagcgagggttaatatttcgtcactcagtgagtgagtgggataacgctatggacacccatgcagtccagcagttgtctcgttctctgagcgtatctttacgtcgctgcaagtgtgtgtgtgtgagcgtatctgctacctgagaatgttttacctggcgtatctgtatctcagaaaacataccgaaactctcacacacagatacgccaactgcagctgctcgtgtatgtgtgtgtgtgtgtgcgagtgtatgggtgctgtgccgtggtgacatataaattgaaaacccgagtcgcaattatctcgataaattcggcaagcaaagcgatcatattttcggctcacctaccactggcttatcagtcgagccaaattaatttccctgccccaaatactccgaacaaccgaaagcgtttaagccaagttaaggcaaatgcactgggaaagccaaacagtcggggaaaaaacagttaacgcgtttgcttttcacaacaacagcaacaacaagagtcaccagatagataagattacacctgtgtatgtattcgtgcgcattagtatatgtaagtataagtgatcaggggaaaaacgagagggaaaggtgctgaaaaaccggtaatgcatttgctcacaaaagaagtcaccttcataacaaactcaacgctctgctgcaaaaacacaacacgctcaactgtcacagtcggagagataaatctatatagtttaggttcgaccatgatcatagtttgcatataccacacactttacggcgggcgatgagcaaacagagtattggtttaggccataaacccagttggtaccgatctgcccgtctaaagggcataacaactcgtttttaatcggctttgagagcttcctgtagcatcgcccaattaatcaaagacgaaaactacgaaatattctcaaaatataaattatttatttctatgcataattcagaaccagttccaaacgattttcaattttaatgctcgccgcttttataaccatctccgttggctgggccgagcacgaagctggaatttaaatgaaatgtacatcgcacacaaataatttaccaagatctgggcaataaacacacgagttcatttgattttgaggtgcgactcggttttccagacgtaatcaaccagttcggaggagtgcactgtgaattcctggaaaacgatttcgaatgctaattttcaccctagctcgacttgactgcgacttggttcttgggcagggctttcgatctgtggcaggatcggcagtagtgtcttgtgtgtcaagctgtcgccagttggctgctagctgatggctgatgaattcagtgaggcattatctaatcgctacataagccggccgcacataggaaccaccatggctccatagctccatagctccatagctccgtacatccgtattgtacagataaagagcccaaagcaaacacgggccagttgagagttaatgaggtcacagcactctctgctttaggtgtttctggtttcatggctggtaattggtcggagtacgagttttggacgtatggctctatggctctacgtctacggcgtggagggcgaattatgaatacttaagcacatcttttatggatagccgtagttcgagttggagctgggcttaagtggccagccaaacatttgcgatcaactgggtgtgtgggtaaacttggtttagagccgtgtcttacacagaacttaagtgtcggcacatgtggcgtatgcgcaatgtctccgctttgctctggctcacttagaagtttttatttggcacatgattgccatacgaaaacagcgctgggtaaactatttcgagagtgatttaacgatccaggatgttgtattttaacagctttggctaacaatgatgtcatatgaatgggatttggatgcctatgccgccgagtgaaagccaaatgcaattctctatcgccgcttgttcactgatcaattgagcgtgacgctcggctcgcatatttcgcacccacattgcgttgactttttaccttaaccctgaatctaatcgatcaagcctgacagtcagacaaagtggcattagcattaatcaattcctgccataaaacattagtcaccgatggtcccaagccaaacgaaaccagctgacaactgagtaaatgttttggccctattctgcgcgactgcaactttctcctcttctgcaattgtacattggaacccagcatttggggcgttggacgctgaatctctttgcgggattgccttgatctgctttggtctgaccataactcaagatctccagatcttaagccgatttcacagcctcaaagtttgggttcagggtcttgcattggacttggctacacatatgcccatgtgcccgggctaatgaaatgcagagagacttggctaaaagtgactcagaggagtgtgcttacgtgctgtgcaagccgttttgaggctcggaatgcggcctgccacatggaacgtggccaactacgttggtggaggccaaaatgcagccattccagcccttaatttaagcgataaatgctgcaaaaaaaccaaaaccaaacgtaaatattatgtagaaccataaactgtctaattaggaagatacgctattgatcaaattgcttaagaggtaacagaagtggacacttttgagctttcctttgtcccacctagactgtattttcatggtagtcttaccaatggcaagcaaaactgttctttgttaattccattaacttgatgagtgtaaacgctgattgcaggccttttgacagtccgcgatcagtgcctttcaacgctcagtgatgagttctagcctcttaacactcgacacttaataaatatatattgtagatggctcaacgggttgacaattccaggcatttgtctctggaaacgctcgttcgaccgataaccaatacgtgatggcggaacgcttttgttattgaaaacaaagcctcgttcgagtgcaaagtttagtgcaaaaaggtcggatttatttttttaaatcacactcggctgggtaaacaaatcaggtttccgacgactaagcacaatgaaaagcgctttccagcttttcagctgggggcagaaagtcgtgccacaagccagactgctagaatcgacttatccggcactctaaaagtcggaagctgggatcgaaatacgatacagatatcgctaatgaaccgcccccgccaggtgaaagccggtttctcatttgcaccacctccttaagttcttaatttatgttacgcttcctgcttcagattcagggctatatatacggtgcaccgatcgatccaaacaaagggcaattgctggcaaggcgaggaagcaggcataaaactcggattcgaatggctgaaatcaatttatggagttttaatcactgaattcccatgcagggaattccctcagataacagcaaatgcactttatcgactaaaatgcagcacacaaggtgcaattttatttccgatcgatcagaaggcattacttcgcgataaattttgaaaaggtcttaactgagaaatgtcgtttcgctcacacgaacttgcagctgctgcaaaattttaccctgaagtgtaattagtttgccgacttggcaagtacgcgtctcttttaagctccagtgaccttcttagataagctaatcgatttcctataatcgaatagcaattttaattgattatgacacttctcactatatactacatatagtattacagacaatatgtacacactagacactacaaagtgtcattgcgattaaactatttacgtaaacattaacgactttattttgattgtaatagagcacattcggtgcgaagagttcaagcaactcgaacgtgacaccatcggttattatttagaaattccctttcgaaatgtttgagtttgagcgaattgaaatggcttttagcaagaatttttcgtaactggtaaagtcatctgcctgacttttggctgccaccgggctaacttggctcacacatctgctccgagttcgagtggcagtttccagccaaaaaccagtctggccatctttgtgagccaacagtttccccctttttgtaccaaccttttgtgccaactgcgtgttagtctgtgtggtcaaatgtcggcattttttatacttttgtgtttattttttatgtgcacgccttgggcaattttgtccattgtactgcctgtctgcctggctgcaaaaaattaacgttgcagaaattatattccagaatggcttcaaccgagtgggatacactatgatatatagatggaaatgttatatctgagcagttggccagtggtgtattttctagcagaaataacaatcgtaaatcgtcaaaatccgcagcaactcgtgatgctaatgaatcggtcaacaaatttgacgatgtcgtgatccgcagatttaaagccggatgaaattggcttgagccaccctaatgaaggcatcagctgaggcatttccgtttcgcctgtccctccactctttccatgaatcgatatcctttaaaggggacacataagttcccgaaaaaatgcaatattctacctacacgtccgtttctctcgtttcacttcctgttaacgccagctatttttacccagacatctcaatcactatctgcccacgcacacagactcatgatcgcattattttgggtatttcttggtatttgccagagacacatttgtgttgatcgtaagacggaatcaaggcgaaactacctgagttcgaggttcattagccaaccttgctaatcaacgggatctctctacccagaggaatgcagatatttttcgggcatatacttggtatattgactgcccaagggtcgcacccagtttccaatttccgatcgacgacgcacccatgcacaatttgataaccgggccccatctgctctccaatccacatgacatttctgggtaacttgatacttaaatgtgggttggcgggtctcatgggaagcgtttataattctaatctgttgacaaaaccgaccacatgccaaccgtctgtgaaccagttgataaaaaccgaaagacaaccaatggagccaaatcaaaatatactaataaattgaatagaggtttacgtttaaacaaatcgtgtcttgtatcaagactcgaaatcattttgttaggcgatactctgatactctgtggaagtgtgcctttaaacgaagcgatccaaagtgtttccgtatcgggttacgttaagtacggggccattatgtatgacagggccagatcagggtttatctcgatcgaatgtcaaagtgttctagaaacagtttcaggaaagcatttccccattagctggacgttaattagatgcacgacactacaaagcactcagttatagatttttatttactggcgggggagacagatcaatggagggatggggcttaccgattggatatatcccgactagtctaatctttacagctgtagatagccgcagcaatatgatgaattggctgactcacgaatttccgagtggaaaacgtatttgcatacatgtacaagtatggccagtgccagtgccagttaccggtttctctctaaacttgaacagagtctaccctcgtatagcccagttcaagcggacatctgtgtatacagacatatatacatacatatatcgctgcaatgacagaaatggaattaattatggtcggagtgtcggcggcgccttggccaaagctaaagccaaagccaatttcaagcgagccaaaaaccgctgtctttcttgactcgatgaaatgtgttagccgagagacctaaacacgtttaatgcgatctcgagactgcagttttcccttcgcgcttgtgtcaggctcccagtcaacctgacacccactcgcaacgcggagctggctgctaagcggtttgctgtggggtctaatgaaatgctctaacatacgatatgtgcgcacatatgttcccatagccgccatactgtgtattggctggataaatgcgatctattctggccgccttaactgcgcattttgcattttacactttgctggcggagtcggatctctcgcgatcccgggtcgtttgcctggttacgaaaagcaataatacccaaagctctttgtttaccactcggcgagccacggtctcgaattatgtgtttgctttgccatgaaaacgaaggcaaacacaggcggtctttcaatagggccatccgccatggaatccgcatcgaatgggtggaaaatgcattccaaaactacgtaaattgcataagagacctggagagcgtcgagttttcagtctggttttgagaatttcttagaatcagcgagctggcaaacgagttcataatcggcgtcaagaaacgctcagtggggattccctcatatcgaatcgattccaaaaagcacaatgtgattacccaatcgtttagttagggtaaccaaaccagtcgcgtgcaatcaaagggcaagcaaactgaaactcaaataaacaagctccagttgatgacagaccaactcgaatcgcgagattgagagtcagcaattctccagaaactattttcggcatatgcattactgttagatgatgtatacagtactaatcaataagggaagtactttgcggatacggtagtgcgaattgtgctttcactggattctgagtaacgtgttgaaaatacgcagcgaatcatatggggtgcaaaacaattgccattaaacgataagcaaacatttggaaattcgtcgattcgaatgtagtgtacctactaaattagcatgcgaaatgatgtcaactctccgggtgccaatgtgctaattggggcagtcaacttggctcaccatttcgtcatgcagatcggtgatttttaaggaaataggtggacaatgtgcgcattctgagaccagccatgagctcggccacctctccagaatgtggttgattcaataaacgcatatctacttatctggctccagcaattagcgataagatagggcccgttgggtgtgagtcgtctgtttttgtcattttctcagaagcggccattactgtactgtataacgttgaatttcctggtccatttcagtttgcccatctacaggaaaatgagtcgccagtcgacttgcaggctagtcctgctgctggcctttaccctggccctaatccacgccagccactcaaataccgtgggccccaagatccacttcattcatgacgatctgacggaaaacgagctgaactctggagaggaggtgagcccgaccgagagtctgcccaaaatctccacccccaaggtaaaggatttacccgtggagacgaccaccaggagccccacaaaaaaaaccacgtcctccggcaccgagaagtcccttagcgaggaggcttggaatgatctgatggaggcggccaagcacagccaagctttggctgatgatccacacttcaacaagatgctcaatactaccgtcgccgccggggagaagaactccaccgataccgacgatagcgaatactatgactacgatgatgattacaactatttcgatgaggagacggtgacgatttcccccagtcccaagaaggccaagagcaaccccaagctgcagcccattgtggatgccaccatcacgaagtccaaggtatacttcccccatcatccttaaattcaaataaatatgttttcgtactttacagagcaaatccaacgaccaaaagaccaaagagagtgctaacgatatcgacagcgactctcaatatgactacgacgagggtctggatgatgatgatgacgaggacgatgccgctgacgaccttttgaccgatgatgagcaagttgtcttcagcgaggacgttccgtgtccaagattctgccagtgtgcccggaatgtcaacagctatctggtggccacctgcagcagacttgacatgggcatccagaagtttggctctgacattacggatttggttgtgaccaatgtgggtcctaagtaccccatcctgatgggacccaacttcttccagaatctgggtcttaagaacgtggcttccatcaagatcgccaactgcaccttggagtacctgcacgccgaggccttccacggactgaacgagctgtacgctgttaacttgacggatgttggtttggctatcattaatcccgatacctttgttggaaacaagaaactgcgcatgctgaccatttcgggtaacgacttgagtgtgatgtccagcattcactatttgctgaaggtgagtgatttcaaaaacctttaccttgaaatccagctaataaattataattttgcagtcttccagcattgaggagctggacttctcgcgcaacaaccttatggagttgaatcccaaggccttctcccatctatccaatgtcgtctacattaacttgagccagaacagtctcaagaaactgcccgagaaggctttcgagaaggttactcttctggaagaattggatctgtcttacaactcgctgactgaattgccccgcgatatcttcaatggcaccaccctgtccatactgcacctgaagtacaataccttcaatggcgatctgcactttggcaccaaggatctgcagcagctggacttgagctttaactcgattgtccaagtgcaccacagcatgttcgacaagatgcccggtctgaccaacctgaacctcaagggcaatggcattaagaagatccaaccggactcgttccttactttgaagaacctgcgccacatcgatttgtccatcaacgatctggaccagatctcgggaatgctgttctttaagaactctgagctggatgtgatccgtttgaacgacaatcctcgtctgagccagttgcccaccgatggcttcttgagctacagtggggagttcaccgtctactacctggatatttccaattgcgccatcggtccattgggtcacaaggccttctccactatgccgcatttgaccaccttgaagttggcctggaacaacattaatcatctgccgcgcgagattttcactggactgcacaagctgattgacttggatctgagcaacaacctgatcacccgcatggacgatctgatcttcatggacaacggagagctgactaagctcagtctggctggaaatcccattagccgcttgtccgtccgcctcttcctgccgctgcaccaactgcgatgcctggacgtcaatgactgcgagcttaccaccttgctctccgatcgcgacttgggtgcgggttacaagatctttgacagcctgcgctcctttaacgcctctggtaatttgatcaagaagatctcttcggaggatgtgaagagcttcaagaacctgcgttctctggatatcaccaacaatccgctgaagtgcactcccgacttccaggagttcatcagctacgtcactcttcagatgcagatgactcccaagcgtctgcccgtgctggccaatctggaggacgatgctactattgtgcagctggagactctggctcaggctggttggtcgtctttggcccacgaggtgtgcaagcatgccgaaggatcagatctcttggacgaaaagaaggccgacagtgccgaagccaaactggagaagcgtctgaaggaaagcgtgaagaagcttaacgaggatgaggctaagttgctgagtgtcctggacaagagtgtgctagacaagagcaggctgagcagcatgcagaagatcatgaagggatcggtgaacactgaaaccgcgaagcctgaggaagatgctgacgaggagaatctgaacaatggcggcgaggataaggaggatgacagcagtgactatgacagtgaggaggatgatgatgacgatgatgaggacgatgatgatgacaacaacgatgatgatcgcttcgaggaggccaagaagaatgccaaggctaaggccgatgctaacaaggccttcgacacgttcgtgaacaaggaactgaagccagtcctgaagaccgatggtatccaggcggaggaagtggacatgtctcaggagacccgtgataaattccttctgggtaagttttagccaatcattcgttgatggaatgtattccaatcgtatgttttaccttctcagagaaactgggcttcgacagcgaaagcgaggagtcagatgagtacaccgagaagatgatcttccacggcgaactatcctacgacctggtggtcccactgatcgtcgtgtccttctgcctcctgatgatcgtgctgtccatcgcccgagtgatctacgtggtgctgcgcaagcgcggcgagcgctatcgcatggcgctgctggcctcaaagaactcgttcgtataccagaagttgagcgaggacatcgtgaagccgaccagcaaggagcagaaggagcccaagcatctgaagcagccaaaggtgcaccgatacgcgcccatcaatcaggtctaagtccacctagaatcagcagttccgggccggtggccgcggaaatcgaacgagttgcgctgtttttctaatttataagtatattgatagttgaaaaagtggaaaatcacatcagacaattgactaaacacaagcacaagaatgtaagaaacaggaggaggagcagtaggtggcagttaaaagtattagcgaaagtgcgaggaaacaaagcaacaactaaaaaatacttgaatccaaataagagattgaaagagagagaataaatctttgacaaaatcctttatccttgaaatatcctgtaccatcaaatactgttaagaccagtcaaaggtccttggcaacagcagaggtgggctttcagagaacgcgtttgatgagcaaccgtttcgaaagcaacggatttgcaatttatcaaacctctgcccacaatccgtatccaattagtccatatccgggaacaacttgaagatttagtgccattttgccaaaattcaaaccgagcgaaaattacttaaacacattaaggtttctaaactgagtgtcaagtcaggaacaagaaacgaggagcgaggaacagaaagtagtaagagttttagatgcgggtctgtgtagcaaacggttaggagactccctagaatgacgtctgatttttaatatgatcaagagatgagagaaataattaatgcataaactatgttaagacttttttattatcttttttccaatcgaaggcaagtaacagcttgacctattcgacattgaaaccgattccgaaaacaataaattattttaaccaaaccgatcgtaatctttacaatgcatacttaatagacatacacacttgcatacgtactttaaacaataacatgcctttcaataaaattgaatatattttatctgcgttcaataaaagactcaagttgaccgacatccccttcctcctttacgtaggtgctcaaattccgctggaaacagagtgccaattcgttatcttcccgatcccgtttcagttcctctctgacctgccgccacatccgttcaaatccactatcgaacggcattcccaggaagcgattatgtctggaacggagttcattgccgatctgctgccacattgcctcgaattccccgtcgtagggcatccctagaaatttaccctcacatccggaggattcgaacatgaaggagtactcaaacatgtttcagtctaaaatatattataattacaaaaattacaagctttttttggagcaactaatttgtaggatttaatccttttttttttgttttaatgatatgatatcatgtatgatttgtatgatattatattaatattaatatcttatatcatagtatttttggtcccagcgtcggtcttcttcctgcagcttaggaaagcaaactgagtagaggattctcaaacgaagtgcagaccaaaaaagaggccacaaaataatgctgaatgtacataagatccattgcgacaaagaacataaagtaaacaaaaatcaagcagggcatcaaatttcctgtgattctgtatagggtttttaatggtatttttcgtatatacacaagtccaaccaaaattaaatggttcactctaagctttttatacgcttaaaaaaaatagaattttgaaagctcaagtatggtcagatcttaaacgaagatccgttagtttaacatttttttttcttcaagagaacaagttgagcgtgggtaagttttggctccaaattaatagacctccatggacttctcaaagagttgcgacaggttttcctgcgtctgcgccctgggtgctagcttagtgatcctttcctggggcagggttccctccaccaaggcgggtatatcgctgctggagaatcccagctctcggaggccattttctatgcccgcgc

SEQ ID NO: 12284 - DNA, 4210 bp, DROSOPHILA
ttcaacaggtgttgaatacgcgctagactagaaagcgatcccacgatcaaccgactcgcgatcaaaaaccaatatttggattaccctgcttcactttgagaaaagttgtctgcaagcagaccgctcataagtttgcccatctacaggaaaatgagtcgccagtcgacttgcaggctagtcctgctgctggcctttaccctggccctaatccacgccagccactcaaataccgtgggccccaagatccacttcattcatgacgatctgacggaaaacgagctgaactctggagaggaggtgagcccgaccgagagtctgcccaaaatctccacccccaaggtaaaggatttacccgtggagacgaccaccaggagccccacaaaaaaaaccacgtcctccggcaccgagaagtcccttagcgaggaggcttggaatgatctgatggaggcggccaagcacagccaagctttggctgatgatccacacttcaacaagatgctcaatactaccgtcgccgccggggagaagaactccaccgataccgacgatagcgaatactatgactacgatgatgattacaactatttcgatgaggagacggtgacgatttcccccagtcccaagaaggccaagagcaaccccaagctgcagcccattgtggatgccaccatcacgaagtccaagagcaaatccaacgaccaaaagaccaaagagagtgctaacgatatcgacagcgactctcaatatgactacgacgagggtctggatgatgatgatgacgaggacgatgccgctgacgaccttttgaccgatgatgagcaagttgtcttcagcgaggacgttccgtgtccaagattctgccagtgtgcccggaatgtcaacagctatctggtggccacctgcagcagacttgacatgggcatccagaagtttggctctgacattacggatttggttgtgaccaatgtgggtcctaagtaccccatcctgatgggacccaacttcttccagaatctgggtcttaagaacgtggcttccatcaagatcgccaactgcaccttggagtacctgcacgccgaggccttccacggactgaacgagctgtacgctgttaacttgacggatgttggtttggctatcattaatcccgatacctttgttggaaacaagaaactgcgcatgctgaccatttcgggtaacgacttgagtgtgatgtccagcattcactatttgctgaagtcttccagcattgaggagctggacttctcgcgcaacaaccttatggagttgaatcccaaggccttctcccatctatccaatgtcgtctacattaacttgagccagaacagtctcaagaaactgcccgagaaggctttcgagaaggttactcttctggaagaattggatctgtcttacaactcgctgactgaattgccccgcgatatcttcaatggcaccaccctgtccatactgcacctgaagtacaataccttcaatggcgatctgcactttggcaccaaggatctgcagcagctggacttgagctttaactcgattgtccaagtgcaccacagcatgttcgacaagatgcccggtctgaccaacctgaacctcaagggcaatggcattaagaagatccaaccggactcgttccttactttgaagaacctgcgccacatcgatttgtccatcaacgatctggaccagatctcgggaatgctgttctttaagaactctgagctggatgtgatccgtttgaacgacaatcctcgtctgagccagttgcccaccgatggcttcttgagctacagtggggagttcaccgtctactacctggatatttccaattgcgccatcggtccattgggtcacaaggccttctccactatgccgcatttgaccaccttgaagttggcctggaacaacattaatcatctgccgcgcgagattttcactggactgcacaagctgattgacttggatctgagcaacaacctgatcacccgcatggacgatctgatcttcatggacaacggagagctgactaagctcagtctggctggaaatcccattagccgcttgtccgtccgcctcttcctgccgctgcaccaactgcgatgcctggacgtcaatgactgcgagcttaccaccttgctctccgatcgcgacttgggtgcgggttacaagatctttgacagcctgcgctcctttaacgcctctggtaatttgatcaagaagatctcttcggaggatgtgaagagcttcaagaacctgcgttctctggatatcaccaacaatccgctgaagtgcactcccgacttccaggagttcatcagctacgtcactcttcagatgcagatgactcccaagcgtctgcccgtgctggccaatctggaggacgatgctactattgtgcagctggagactctggctcaggctggttggtcgtctttggcccacgaggtgtgcaagcatgccgaaggatcagatctcttggacgaaaagaaggccgacagtgccgaagccaaactggagaagcgtctgaaggaaagcgtgaagaagcttaacgaggatgaggctaagttgctgagtgtcctggacaagagtgtgctagacaagagcaggctgagcagcatgcagaagatcatgaagggatcggtgaacactgaaaccgcgaagcctgaggaagatgctgacgaggagaatctgaacaatggcggcgaggataaggaggatgacagcagtgactatgacagtgaggaggatgatgatgacgatgatgaggacgatgatgatgacaacaacgatgatgatcgcttcgaggaggccaagaagaatgccaaggctaaggccgatgctaacaaggccttcgacacgttcgtgaacaaggaactgaagccagtcctgaagaccgatggtatccaggcggaggaagtggacatgtctcaggagacccgtgataaattccttctggagaaactgggcttcgacagcgaaagcgaggagtcagatgagtacaccgagaagatgatcttccacggcgaactatcctacgacctggtggtcccactgatcgtcgtgtccttctgcctcctgatgatcgtgctgtccatcgcccgagtgatctacgtggtgctgcgcaagcgcggcgagcgctatcgcatggcgctgctggcctcaaagaactcgttcgtataccagaagttgagcgaggacatcgtgaagccgaccagcaaggagcagaaggagcccaagcatctgaagcagccaaaggtgcaccgatacgcgcccatcaatcaggtctaagtccacctagaatcagcagttccgggccggtggccgcggaaatcgaacgagttgcgctgtttttctaatttataagtatattgatagttgaaaaagtggaaaatcacatcagacaattgactaaacacaagcacaagaatgtaagaaacaggaggaggagcagtaggtggcagttaaaagtattagcgaaagtgcgaggaaacaaagcaacaactaaaaaatacttgaatccaaataagagattgaaagagagagaataaatctttgacaaaatcctttatccttgaaatatcctgtaccatcaaatactgttaagaccagtcaaaggtccttggcaacagcagaggtgggctttcagagaacgcgtttgatgagcaaccgtttcgaaagcaacggatttgcaatttatcaaacctctgcccacaatccgtatccaattagtccatatccgggaacaacttgaagatttagtgccattttgccaaaattcaaaccgagcgaaaattacttaaacacattaaggtttctaaactgagtgtcaagtcaggaacaagaaacgaggagcgaggaacagaaagtagtaagagttttagatgcgggtctgtgtagcaaacggttaggagactccctagaatgacgtctgatttttaatatgatcaagagatgagagaaataattaatgcataaactatgttaagacttttttattatcttttttccaatcgaaggcaagtaacagcttgacctattcgacattgaaaccgattccgaaaacaataaattattttaaccaaaccgatcgtaatctttacaatgcatacttaatagacatacacacttgcatacgtactttaaacaataacatgcctttcaataaaattgaatatattttatctgcgttcaa

SEQ ID NO: 12285 - protein, 1051 aa, DROSOPHILA
MSRQSTCRLVLLLAFTLALIHASHSNTVGPKIHFIHDDLTENELNSGEEVSPTESLPKISTPKVKDLPVETTTRSPTKKTTSSGTEKSLSEEAWNDLMEAAKHSQALADDPHFNKMLNTTVAAGEKNSTDTDDSEYYDYDDDYNYFDEETVTISPSPKKAKSNPKLQPIVDATITKSKSKSNDQKTKESANDIDSDSQYDYDEGLDDDDDEDDAADDLLTDDEQVVFSEDVPCPRFCQCARNVNSYLVATCSRLDMGIQKFGSDITDLVVTNVGPKYPILMGPNFFQNLGLKNVASIKIANCTLEYLHAEAFHGLNELYAVNLTDVGLAIINPDTFVGNKKLRMLTISGNDLSVMSSIHYLLKSSSIEELDFSRNNLMELNPKAFSHLSNVVYINLSQNSLKKLPEKAFEKVTLLEELDLSYNSLTELPRDIFNGTTLSILHLKYNTFNGDLHFGTKDLQQLDLSFNSIVQVHHSMFDKMPGLTNLNLKGNGIKKIQPDSFLTLKNLRHIDLSINDLDQISGMLFFKNSELDVIRLNDNPRLSQLPTDGFLSYSGEFTVYYLDISNCAIGPLGHKAFSTMPHLTTLKLAWNNINHLPREIFTGLHKLIDLDLSNNLITRMDDLIFMDNGELTKLSLAGNPISRLSVRLFLPLHQLRCLDVNDCELTTLLSDRDLGAGYKIFDSLRSFNASGNLIKKISSEDVKSFKNLRSLDITNNPLKCTPDFQEFISYVTLQMQMTPKRLPVLANLEDDATIVQLETLAQAGWSSLAHEVCKHAEGSDLLDEKKADSAEAKLEKRLKESVKKLNEDEAKLLSVLDKSVLDKSRLSSMQKIMKGSVNTETAKPEEDADEENLNNGGEDKEDDSSDYDSEEDDDDDDEDDDDDNNDDDRFEEAKKNAKAKADANKAFDTFVNKELKPVLKTDGIQAEEVDMSQETRDKFLLEKLGFDSESEESDEYTEKMIFHGELSYDLVVPLIVVSFCLLMIVLSIARVIYVVLRKRGERYRMALLASKNSFVYQKLSEDIVKPTSKEQKEPKHLKQPKVHRYAPINQV

SEQ ID NO: 12286 - DNA, 9437 bp, DROSOPHILA
aagctgctgtagaacgccggacttggtccggccaccgcgttcagctggagcgttcgattggagtgttgattgaatagtgtcaccgtctgagaacgcgcctggccgacggaccacgttccaaagtctagacgggacggcacaagccgaaggtcccccaaatcgtggattggtgcctcctgcagccccaggaaagtctcctgcaggaccttttcacctttggcgcccaaagtgaaaaggaagattaggatgagcaggatgggttctgcgaatattcgcaaaagcggcctcatctggacttgtgtgggcatggcgtgcgttcccttgatcctgggatgctgtgtgtgtgtgtgttcgtgtgggcggcgatggcgcagctcctggtaaccgactttctgtccagctgctaatctaaattggagtttccttggcgttgcgctttatttatattatccaatatcgctggccaaaaattattatcgcttttcggtgtgaccgccgtggaatacataaaacataccatccggcacagggaaatactaatcatatgatcattttaaaaatataccattaaagcacagaatccttttttaaggcgcatcaggtggctacataaattgcttgatatatgggcttatgtttagttgatttcttgctggtagtataatttaagcgttcaatggcatgcgattaaatttaacattgtattgtagcagattattaaaataatgaaatatttatatattattaaatatatataaaaaaatatatatttaatttgtttactataaatgctattaatattatagagcctagcgcatacagttaatactgtatataatattacatactgttgcgcagtattttaaaacgcgccaaaaagtatgctcgaaaaaaattaataacaaaatgtatcgccatgtattcgagggaaaacagtgaaagagctatcgaaacttggccatcgctagctaaagaaacgacaaccgaaagaaagttgcagtttagtttacgtgttaaaattaatcgcaggtcgtgaagctgatttaactaaagtgagtgctctcgtcgcccgttaatatacccgcgtatatacacccacaatttcattgaatagtgacgagtacaaaggaaaacatgaccaaatgaaatttcgcacagatcgttcggcttgctccacgcacttacactcacacacacacacacacacacacacacacacacacactataatcacatattcgctgaatattgcagaaatattaatgcgaaaatcagcaagcattttgcaataattactgaaggcgaagattaacagctatttgacccacgaacggtgatgcaacagccctattgattttgcccactttcaccgcttacaacatttttagtttgggcttcggtttcggtttcgcatttagttttttttagtttcaccagcagggcagccaatttgcatacgcatcggctaggcgtgaacttcgtttccagatgtaaattagatcgtgtgtacttgcaaagtcatcagcccccttcaatgtgcgctcttcatcgaattagattccatgccatttccgatttgctagccattggctgttcatgtatttttgggagaaagttcggccctcagccaaagtgacccactgacttgactaactgggcttgatatccaagctgcaatgatatgttgataaccggttctacaaaaggtgcttccccacacccaacgcaatggtaatggtccagggccagatcccgttgcagacctaatctctgggaaacaaccatctggttgagcgagagccatgtacatatcaacacataagccgaaaattctaaagacccgaagccgttggagtcgcgaagcttgaaagccgaggcagcgccacgaaatcgaaatcagaatacgcctgttgctggctcattttcatggatggtgctgtcgcgcattcgatttcagtttacttccagacccgacgacgtgcaggttgattagctagctgcccagcctgtagctacccaaagctgaagccgcccagcacgcacactttgaaacttactcgaaacctattgcacctgcacacagtcgtgctctaatcaattctaagtaaataaatcaaagtttgaaagtacagacaaagtcaaacggtacgcgcgaacacacgagaccctcctttatttgtatttgaaagaaggctatattaaatcttaattgatttgtttttatatatttttgtatttttgtttttttgtttttttgtatattctgtagcttcatcatgtcggcgaaagcaatcaccgaggcctccggcaaggacatcctgaaccgccatctcaacacccatggcgccggcgcggccacttgccgtttttccacagtaaattccacgacagattggtccaagctcgccgttgaccatccctggctgctgaccacggtgagtgccagttaaaaatagccgcgaaactcgcggaactcgacgattgcgaatcagccgatatgtaggaacaacaattgggccagcgacaacaaacgctcggcgggattgtcattgaacttgacctcgtggtggacgcttcgaccaccacgccgatgccgaatgactaagcgcggctcctgataagagcgaattgggcgccagtcggtcgcgcgagttgatcgctggaaattgcggagtagacggacggacgcgggcgcagaccgacagctcaccccatggcgcactctggtttttatcagattgccggggacccagtcgtaggtcgcgtggcatggcgtggtcttggcccctttggttatccgccggcggatcaggctcacctcatttgcgaacacgataagcgtgcgtggagattgggattcacgatcacgcagctatctctgattgaccttccgatcgatagtggaaagtttggctgtagccaagtacttatcttgagcacttataacggttgagtgggaaataaggggaagctaacatgttccgtgtttgttttagaaaacctttatcaccgaaatccatatgttcgaaatcttatcatcaagttatttgttgattttggagcgtctcaatttattgaccttacctagcattgttgcgccgcctgaatttctaaagaataatttcaattcaaatatgccggagattttaaagtggcgaagtgtcgctgagtcgagtgggggattcagggaactactctactatctttcaaacaattttcgcaaaataatatattctattgaaatgtgatcagttaaaacttatctataagttgtttgttgactctagagggagcgtccctatacttagtcttagtaatctaaaggcaggattgtgaaactctgattatcaggaaggtgttttaatttatgacatgcagatagaaggtattaactttctgatttaatagacttattgtcttgttgtcacgttttcgtttgaagtgcataatacttttattacgttactgataatgatgtttaccccactgaagggggagaagcaaacaatcaaacacaatacaactccctttaaatagtttcacttagagctattagtttaatattttgatctcgtaattttatatgcaattaagatagatccgaaatttagtgagcataatgggagttctttcggctttaattacacgacaaagtgaatcgcctgacggacatctcggatgatatttcgtagtcggactgtttgctcaatttacactcgtacgatcttctaataagcatatgagatgtgtttttgtgtgggcacaagtacaagttcgggtaagggtacgagcactggcattgtcattggcaatgacgcgggaacgacccctgatgttatcggctgatcttttcgacagatgctgatcgttggaaccggcttttttactgacgcgccgagatcagaaggcacaagttcaacgatttgtcgcttatttcatttatatttagcatacatttaattagccccgtcctttcctttgttgcagccgctggtgtgcaagcccgatcaacttatcaagcgccgtggaaagctgggactaattggcgtcaagaagaactttgagcaggtgaagcagtggattggcgagcgcctcaacaaggaccagaagatcggaaatgccgtgggaaagctcaggaactttatcatcgaaccttttgtgccccacaccgatgtgagttatcaaattgtttattatgtgtatgtatacttaacaccattgtatctaatccataaggctgaggagatgtacgtgtgcatctactcgcaccgcgccgcagacaccattctgttctaccaccagggtggcgtggatattggcgatgtggatgctaaggccgtgaagttggacgtacctgtgaactcttctctgtcgttagccgacgtgaagagcaagctgttgaaggaggtcaaggacgcgggcaccaaggagcgcattgccaagtttgtcagcgccttgtacacgacctatgtagacctgtatttcacatatctggagattaaccctctggtggtgacagccgacaatttgtacatcttggatttggcggccaagttggattcgacagctgatttcatctgccgtcccaaatggggcgagattgactatccacctccgtttggtcgagatgcatatcccgaggaggcctacatcgccgacttggacgccaagagtggagcttcgctgaagctgacgatccttaatcgtaatggtcgtatctggacgatggtggcgggcggtggcgccagtgtcatttactcggacaccatctgcgatttgggtggagcctccgagctggccaattatggcgaatacagtggggctccatcggaacagcagacgtacgagtacgcaaagacgattctcaacctgatgacctcctcgccaaagcatcccgatggcaaagtgctgattaccggagggggcattgcgaactttaccaatgtggctgcgaccttccaaggtgagagattgataccttatcttatcagcgatctatctaaatgtaatactctgtgcaggcatcatcaccgccctgcgcgaattccagccgaagctagtcgagcacaatgtatcgatctttgtgcgccgcgctggacccaactatcaggagggtcttcgaaagatgcgcgactttggcagcaccctgggcatcccactgcacgtttttggacctgagacccacatgaccgctatttgcggaatggcgctgggcaagcgacccattccccaaacggcaagcgttgagttctcgacggccaacttcctgctgcccggtggacagcaggcccaggccgatctcaaggcggccagcgatgcctctgaggcgttgggctccggttccggtaagtagagcgtaatgaattgtgatgtagttgggtgttttgataagtttgtgtgcggctaacccgggatttcactagtacattttagctgtaattcaataatctttttgtatcccgctaggaattgcaatgcatcgatcgacctcacttatctgatctctctctcttttctctctttgtattttgtatgtttgcattgctcgccctcgactacaacgacaacgaaatttgtcgccacactcaccaaaaaattataaaaatatccacataacctccaccaaattattaacaaaaaccaaatataaaacaaatttgaaatgctcgtttggccaaccgatctgcacttgatctgatctgattctgcacggtccttcataaccccgtgttcgtgtattgtgtgtgtttgtgtatcgtcctggtttgtcaaacttctacacgtcctgatctcgctctctgctcctccatcatcatacaatcgattcccgacatcgatctcgactcgtttttcgactcgttccatttgggatagctctgagcccgaccgcagctaaaccgattaaactaccacctatctcagcagatgaggccgacagcgcgggcatttccggtgctcagcgcaacggatcgagtcttaaccgaaagttcttctccaacaccaccaaggcgattgtgtggggaatgcagcagcgggcggtgcagtcgatgctcgactttgattttatctgcaggttggtcaaattctcgttattaataacaagcgcccctatcatatactcataattgcttattttctcagacgcgatgagccttctgtggtggcaatggtatatccattcaccggcgatcataagcagaagtactactggggtcacaaggaaattctgattcctgtctacaagaaaatgtcggacgccattcataagcacaaagaggtggacgttatggtcaactttgcttccatgcgcagtgcgtacgaatcgacgctagaggtgctcgaattcccccagatccggacggtggccatcatcgctgaaggtattccggaaaacatgactcgcaagcttattattgaggcggataagaagggagtggcaatcattggacccgcaaccgtgggtggcgttaagcccggttgctttaagattggcaacaccggcggtatgctggataacatcctgcactcgaaactgtaccgtccaggcagtgttgcgtatgtttcgcgctccggaggaatgtccaatgagctgaacaatattatctcaaaggccaccgacggcgtgattgagggcattgccattggaggagataggtacccaggctccacctttatggatcacattctgcggtatcaagccgatccggaaaccaagctgattgtccttttaggagaggttggtggaaccgaggagtacgacgtttgtgccgctctgaaggacggacgtattaccaagcctctggtggcctggtgcattggtacctgcgccagcatgtttacttcggaagtccagtttggccatgccggatcctgcgcgaactccgaccgagagacggctacggccaagaacaagggtctgcgagatgccggcgcctacgttcctgattcgttcgacacgctgggtgaactcatccaccacgtgtacggcgagctggttaagactggtcgagtagtgccgaaggaggaggtgccaccaccaactgtgcccatggattattcgtgggcccgcgagctgggtcttattcgcaagcccgcgtcattcatgacgtcgatctgcgacgagcgtggccaggagcttatctacgcaggaatgccgatcagcgaggtccttagcaaggacgtcggcattggcggtgtcatctcactgctatggttccagcgctgcctgccttcatacgtgtgcaagttcttcgagatgtgcctgatggttactgcggatcacggtcccgcagtttctggagctcacaacaccattgtgtgcgcccgtgctggcaaggacctggtgtcctcagtcgtcagcggtcttctgaccatcgtaagttaatgcatccgcatttccatttgcaagatagactgtaaatctgctttaacctttagggggatcgatttggaggcgccctggacggatcggctcgacagttctctgaggcatacgacaccaacctgcacccaatggagttcgtaaacaagatgcgcaaagagggcaagcttatcctgggtattggccaccgtgtaaagtccattaataaccccgatgtgcgcgtgaagatcattaaggaattcgtactggagaacttccctgcgtgtccacttctcaaatacgccttggaggttgagaagattaccaccaacaagaaaccgaatcttatcctcaatgtggacggtgtgatagccaccgcatttgtggacatgctgcgtaacagcggctcatttaccaggtgagcgaacggcgcgtgtattgaacttaagaacagcaactaacttaaatcctttgcactttcagtgaggaagcacaggagtacattaatgtcggcgcaatcaactcgttgttcgttctgggccgcagcataggatttattggccattacatggatcagaaacgtctcaaacagggcctgtaccgtcatccgtgggacgacatctcatacgtcattcccgagcagtacaactaaggcgtgctgatgaagccgcgacgatgttatatatatatatttacgtatatacaagcatatatattattcggaagttgttgtagttaagcacagatgtatgatgttaggcaaagaggtcacccgctccgctggctggaaggatccattgaggtctatccgcgcatgtgactctccccagatccctttccctctcacttatcctgcatttaaagttcttaagttaccatcattaccctcgttgtttttgtaagcgctgcgtgtccccggagcccttaggggttttggaatctagacctagttaaatctagtgctccgagccgcacaacacaccagtacccggcataacattatttgatacttttatactttagtttggatgctcacaattgtctagacaacaagagaataaattgttgcaaaagcttaattttatttttgtcacccttcctttactatttgttctttaaatcccacgcttcctttgccagcatctcgaagagaaacggacactgcactagttcctgctgcactgaagcacatttatttataaacaattacacgaatatttacaatgcacaaaaaatgggaggcagccttgaggaaatgcaatttccctcgcaaagtttgcgtctttaaaaattcaccgcaattaaatcgcacaaatgctttgactaactaaaacaatgaattgtctttgtctcgagcagtttaatttgctgaacaattaacaaattggaaacgcacacacaactaagcgtagaatctcattaaaaccaggaaccccttaaccaccaggtcaactcggaaagtggcttctatctcatgcgacgcattctgcgatccatctttttttgctttttctcgtccacctggggattatcgtcctgggcgttgcgttgcgacagccacggctggatgacggagccccagagcatccatccagctcgtatgggcgccaaaagcagcaccaaccagaagtagtttgagatgagggccagcagcagggtgccggaagtaaggatgatcaaatccttaacgtttctagagggagaatcatgtgtaggcagagtacttcaaagcttctgtgggtgcacttactccgcgatgccgccttccatatttaagtcgttgccggagtccaaaagagcaccgctctcagagtatttggcctgcgacatgaacgccataaactggtaggagctccccaggatcagcaacgaaagaatgtgcataaactaataaagaacgagaggctgatgattgagttcattgagggggattttcggcggcctaccactgaggttttggtgacttcgaagaccaggaaactgaggagcagagcgggtgcagcacatccaatggccatgttccggtagaaagtcagtgtagtcttgttttcctccacgatttgcttggcgcccttcg

SEQ ID NO: 12287 - DNA, 3745 bp, DROSOPHILA
tttagtttacgtgttaaaattaatcgcaggtcgtgaagctgatttaactaaacttcatcatgtcggcgaaagcaatcaccgaggcctccggcaaggacatcctgaaccgccatctcaacacccatggcgccggcgcggccacttgccgtttttccacagtaaattccacgacagattggtccaagctcgccgttgaccatccctggctgctgaccacgccgctggtgtgcaagcccgatcaacttatcaagcgccgtggaaagctgggactaattggcgtcaagaagaactttgagcaggtgaagcagtggattggcgagcgcctcaacaaggaccagaagatcggaaatgccgtgggaaagctcaggaactttatcatcgaaccttttgtgccccacaccgatgctgaggagatgtacgtgtgcatctactcgcaccgcgccgcagacaccattctgttctaccaccagggtggcgtggatattggcgatgtggatgctaaggccgtgaagttggacgtacctgtgaactcttctctgtcgttagccgacgtgaagagcaagctgttgaaggaggtcaaggacgcgggcaccaaggagcgcattgccaagtttgtcagcgccttgtacacgacctatgtagacctgtatttcacatatctggagattaaccctctggtggtgacagccgacaatttgtacatcttggatttggcggccaagttggattcgacagctgatttcatctgccgtcccaaatggggcgagattgactatccacctccgtttggtcgagatgcatatcccgaggaggcctacatcgccgacttggacgccaagagtggagcttcgctgaagctgacgatccttaatcgtaatggtcgtatctggacgatggtggcgggcggtggcgccagtgtcatttactcggacaccatctgcgatttgggtggagcctccgagctggccaattatggcgaatacagtggggctccatcggaacagcagacgtacgagtacgcaaagacgattctcaacctgatgacctcctcgccaaagcatcccgatggcaaagtgctgattaccggagggggcattgcgaactttaccaatgtggctgcgaccttccaaggcatcatcaccgccctgcgcgaattccagccgaagctagtcgagcacaatgtatcgatctttgtgcgccgcgctggacccaactatcaggagggtcttcgaaagatgcgcgactttggcagcaccctgggcatcccactgcacgtttttggacctgagacccacatgaccgctatttgcggaatggcgctgggcaagcgacccattccccaaacggcaagcgttgagttctcgacggccaacttcctgctgcccggtggacagcaggcccaggccgatctcaaggcggccagcgatgcctctgaggcgttgggctccggttccgcagatgaggccgacagcgcgggcatttccggtgctcagcgcaacggatcgagtcttaaccgaaagttcttctccaacaccaccaaggcgattgtgtggggaatgcagcagcgggcggtgcaacgcgatgagccttctgtggtggcaatggtatatccattcaccggcgatcataagcagaagtactactggggtcacaaggaaattctgattcctgtctacaagaaaatgtcggacgccattcataagcacaaagaggtggacgttatggtcaactttgcttccatgcgcagtgcgtacgaatcgacgctagaggtgctcgaattcccccagatccggacggtggccatcatcgctgaaggtattccggaaaacatgactcgcaagcttattattgaggcggataagaagggagtggcaatcattggacccgcaaccgtgggtggcgttaagcccggttgctttaagattggcaacaccggcggtatgctggataacatcctgcactcgaaactgtaccgtccaggcagtgttgcgtatgtttcgcgctccggaggaatgtccaatgagctgaacaatattatctcaaaggccaccgacggcgtgattgagggcattgccattggaggagataggtacccaggctccacctttatggatcacattctgcggtatcaagccgatccggaaaccaagctgattgtccttttaggagaggttggtggaaccgaggagtacgacgtttgtgccgctctgaaggacggacgtattaccaagcctctggtggcctggtgcattggtacctgcgccagcatgtttacttcggaagtccagtttggccatgccggatcctgcgcgaactccgaccgagagacggctacggccaagaacaagggtctgcgagatgccggcgcctacgttcctgattcgttcgacacgctgggtgaactcatccaccacgtgtacggcgagctggttaagactggtcgagtagtgccgaaggaggaggtgccaccaccaactgtgcccatggattattcgtgggcccgcgagctgggtcttattcgcaagcccgcgtcattcatgacgtcgatctgcgacgagcgtggccaggagcttatctacgcaggaatgccgatcagcgaggtccttagcaaggacgtcggcattggcggtgtcatctcactgctatggttccagcgctgcctgccttcatacgtgtgcaagttcttcgagatgtgcctgatggttactgcggatcacggtcccgcagtttctggagctcacaacaccattgtgtgcgcccgtgctggcaaggacctggtgtcctcagtcgtcagcggtcttctgaccatcggggatcgatttggaggcgccctggacggatcggctcgacagttctctgaggcatacgacaccaacctgcacccaatggagttcgtaaacaagatgcgcaaagagggcaagcttatcctgggtattggccaccgtgtaaagtccattaataaccccgatgtgcgcgtgaagatcattaaggaattcgtactggagaacttccctgcgtgtccacttctcaaatacgccttggaggttgagaagattaccaccaacaagaaaccgaatcttatcctcaatgtggacggtgtgatagccaccgcatttgtggacatgctgcgtaacagcggctcatttaccagtgaggaagcacaggagtacattaatgtcggcgcaatcaactcgttgttcgttctgggccgcagcataggatttattggccattacatggatcagaaacgtctcaaacagggcctgtaccgtcatccgtgggacgacatctcatacgtcattcccgagcagtacaactaaggcgtgctgatgaagccgcgacgatgttatatatatatatttacgtatatacaagcatatatattattcggaagttgttgtagttaagcacagatgtatgatgttaggcaaagaggtcacccgctccgctggctggaaggatccattgaggtctatccgcgcatgtgactctccccagatccctttccctctcacttatcctgcatttaaagttcttaagttaccatcattaccctcgttgtttttgtaagcgctgcgtgtccccggagcccttaggggttttggaatctagacctagttaaatctagtgctccgagccgcacaacacaccagtacccggcataacattatttgatacttttatactttagtttggatgctcacaattgtctagacaacaagagaataaattgttgcaaaagctt

SEQ ID NO: 12288 - protein, 1086 aa, DROSOPHILA
MSAKAITEASGKDILNRHLNTHGAGAATCRFSTVNSTTDWSKLAVDHPWLLTTPLVCKPDQLIKRRGKLGLIGVKKNFEQVKQWIGERLNKDQKIGNAVGKLRNFIIEPFVPHTDAEEMYVCIYSHRAADTILFYHQGGVDIGDVDAKAVKLDVPVNSSLSLADVKSKLLKEVKDAGTKERIAKFVSALYTTYVDLYFTYLEINPLVVTADNLYILDLAAKLDSTADFICRPKWGEIDYPPPFGRDAYPEEAYIADLDAKSGASLKLTILNRNGRIWTMVAGGGASVIYSDTICDLGGASELANYGEYSGAPSEQQTYEYAKTILNLMTSSPKHPDGKVLITGGGIANFTNVAATFQGIITALREFQPKLVEHNVSIFVRRAGPNYQEGLRKMRDFGSTLGIPLHVFGPETHMTAICGMALGKRPIPQTASVEFSTANFLLPGGQQAQADLKAASDASEALGSGSADEADSAGISGAQRNGSSLNRKFFSNTTKAIVWGMQQRAVQRDEPSVVAMVYPFTGDHKQKYYWGHKEILIPVYKKMSDAIHKHKEVDVMVNFASMRSAYESTLEVLEFPQIRTVAIIAEGIPENMTRKLIIEADKKGVAIIGPATVGGVKPGCFKIGNTGGMLDNILHSKLYRPGSVAYVSRSGGMSNELNNIISKATDGVIEGIAIGGDRYPGSTFMDHILRYQADPETKLIVLLGEVGGTEEYDVCAALKDGRITKPLVAWCIGTCASMFTSEVQFGHAGSCANSDRETATAKNKGLRDAGAYVPDSFDTLGELIHHVYGELVKTGRVVPKEEVPPPTVPMDYSWARELGLIRKPASFMTSICDERGQELIYAGMPISEVLSKDVGIGGVISLLWFQRCLPSYVCKFFEMCLMVTADHGPAVSGAHNTIVCARAGKDLVSSVVSGLLTIGDRFGGALDGSARQFSEAYDTNLHPMEFVNKMRKEGKLILGIGHRVKSINNPDVRVKIIKEFVLENFPACPLLKYALEVEKITTNKKPNLILNVDGVIATAFVDMLRNSGSFTSEEAQEYINVGAINSLFVLGRSIGFIGHYMDQKRLKQGLYRHPWDDISYVIPEQYN

SEQ ID NO: 12289 - DNA, 2747 bp, DROSOPHILA
gcatttattttgttgcaaaacgaaaacatttatttaaaatctagtcacaaatatggaattcgaatggttatttcgcaatgttcttgaaagtcaaatattatctcagatcaaaactaaaaacaacgataacacgatttaaatgacactcacttgatgtaattaggtagttcaaatattcacagtcaatggagccaaattgttagccttttaagactttgtttaatttcacactatcaccgcgccggttcggcttttctagatttgatgcttatcgcgcgacgagcgaatcttatttaaacaatttcctactccaggcccgccttatattacgaatagtgggcagtgttgccaacatctttctttggatccggccagcatgatcgcattttttttctttttgttttttacaaattcattgtttactctggattcagatgcgcttggctatatagagtttgcattggaggaatattttttgctctggttacacaaactttatgggaagttcccatgttcataatacggaacaagcccatatagtgctttattgacttacttatacaattatacaacacgcttgtagcgtacattgcatccaacatcataaatcaatgcgcataaaactggaatttattaaaaaggactaccaggtccaaaacctcatcaaacaagtcacaagattcaattgttgacaagcatttgctaactgtaaccacatatcctttatttatatttaaagagagagttacatgttaagaaagtcttctatttactcttttagtaacgtatttaaaagaatataaagaagttggtcaaataacctaatattatgtcgcgagactttatttcgaaaactgagttaggcgccaaactatcgataggcaactcaacagttgttttagccgtacaatcccaatcctcaagaaacggcatttactgcgccactgtctacacccacctcgctcagctgtttcacttgtctctctcgcacacataatcgtgaacgtgtcaagcgaaggcttttgttttcgttccgcattttccttacttttggctattttccggacgagatggtggacgacagcactcgaaaaacgttgagcaacattccgctgctgcagattcgcgctggtccgcgcgaaaaggatgtgtgggtgcagcggctcaaggaggagtaccaggcactaattaaggtacatacatacatccatagtatgttccatggaactattaacgtttccttgcttgcagtatgtggagaacaacaaacagtccggcagcgactggttccgtctggaatccaacaaggagggcaccaagtggttcggaaagtgttggtacatgcacaacctgttaaagtacgagttcgacgtggagttcgacattccagtgacgtacccaaccaccgcgcccgagattgccctgccagaacttgacggcaagacagcgaagatgtaccgtggtggcaagatctgtctgacggatcactttaagccactgtgggcacgcaatgttcccaagtttgggatcgcccacgctatggctctgggtgtaagtactctaaatataccaccgccttcgttggatctgcttcatcaatcctttgttacagcttgctccctggctggccgtggagattccggatctcatcgagaagggaatcattacgtacaaggaaaagtagctaactcaactagataaaattactggcaacaaaacaatgaacaaagtttgatacgaaagtcaattatctttgcgtttattagtcaaaagtcaaattggaaaagatcattcagcgttcctccatcgtcgcgtatcctaggtgtctaagtggtaagaatttcatttggttgattcggtttgatcagtgagcttgctcctcgtcattcccttagttcatgtggttatggttgttgcgctgtgatgactgacgccacgtatccgaccagattgagcttggcgaggtaaaaggatcgtattgcgtgggtaggctttcgccgtgtagtgcagctccagttccagatgccggtcccgctgagacctgttcttgtgcaaggttgtgcgtctgacgtgcgctctgctccagacctggaggaggacgcatgacaccgatgccagctgtggcattgggccaggtggagtatcctagtggtgaccagtttgtggcccagttgctcggatccatattcgccagcagcgaaatcttctcctgctgccttagctgaaactctagtttctggggctgctgaagaagtagctgctgtcgcatgaccaagtcgctccgctgttcccactgcggcttttcccgctccctttgttcgtagatagctgttcgagtagaaatacattagggaattgtgagcttataatcattatagcgacttaccatctggcgttatgaaatccacctcggtgttggcgaacagcgaattactggccgtagctgaaagtggctcccacagcgatgtcaccatcggtggcgtggcgttctttcggttatctccgatcggtccgagatcactcgaagacgtcgcatggttccaatcgaaaccattatctgtgggcgccatttgaggagtccgaagcacatcccggaaggagacgcgactgctcgtctcccaaggattgctgatgcatttaagcgcatctggtgactctggcggcgacgtgctattcgtggtctgcccaaaattcaacttctggcgctgttttcgctctggctttctgaatcccactccagcccccgt

SEQ ID NO: 12290 - DNA, 628 bp, DROSOPHILA
tgaacgtgtcaagcgaaggcttttgttttcgttccgcattttccttacttttggctattttccggacgagatggtggacgacagcactcgaaaaacgttgagcaacattccgctgctgcagattcgcgctggtccgcgcgaaaaggatgtgtgggtgcagcggctcaaggaggagtaccaggcactaattaagtatgtggagaacaacaaacagtccggcagcgactggttccgtctggaatccaacaaggagggcaccaagtggttcggaaagtgttggtacatgcacaacctgttaaagtacgagttcgacgtggagttcgacattccagtgacgtacccaaccaccgcgcccgagattgccctgccagaacttgacggcaagacagcgaagatgtaccgtggtggcaagatctgtctgacggatcactttaagccactgtgggcacgcaatgttcccaagtttgggatcgcccacgctatggctctgggtcttgctccctggctggccgtggagattccggatctcatcgagaagggaatcattacgtacaaggaaaagtagctaactcaactagataaaattactggcaacaaaacaatgaacaaagtttgatacgaaagtcaa

SEQ ID NO: 12291 - protein, 164 aa, DROSOPHILA
MVDDSTRKTLSNIPLLQIRAGPREKDVWVQRLKEEYQALIKYVENNKQSGSDWFRLESNKEGTKWFGKCWYMHNLLKYEFDVEFDIPVTYPTTAPEIALPELDGKTAKMYRGGKICLTDHFKPLWARNVPKFGIAHAMALGLAPWLAVEIPDLIEKGIITYKEK

SEQ ID NO: 12292 - DNA, 3892 bp, DROSOPHILA
gactaggatgcaacctgtagcagctacatttcgcggcttaaagctcttaatcgcgggtccaatgaagaggccagagaaattgagagctaggctgtttagattcgtgatcagggccgccgtaaatgtgtcctcttgcattttctgcagctcacccacaaagagctggccgaacactgacaaaatggattggttggtcatctggatgccggcatatgcaataaatatgtttagttttgggtattccttttaaagactattgaacactcacattaatcaatgcaacggcggccaccacaatccatccgtagcccccatcggggacaacgcgactcgattgcacatccatgactgtgctctccgagtttctcgtcgagattaagctggctaaaaatatgtaaacagcgataagtggactgttattaaaacgtctggatttgtttatggcgtctaaagacaggtgtaaaagtgcgttccgataagcccggcgaaatggcatttacccagtggagacgagttgaacggctcgtctcagagatttccccaaactgcgtggccatttcgcaagcaacgttttaacaaattaaggcgaattaaagcctaaattaaaataaattaatcccaaagtcacaaaactttgaatcagtatgacctctctgcgaatgccataaaacgtatattcggaaatattgcgcacttccagatattgcgatatgcaccttctttttatgtgcgaaactgtcagtacagattcgtttaataaaatatttagggtttacttttccagatagtgcttatctaagtgcttattataagcaagtgaaaacaaataacccgaagtttttaattcaaaaacacgactatggtcccactattctggcgccgcttatcgatagccgctagcgatgacagtaatcagctgtgctttgccctgttttcatttgtagaataacacacatttttaataattttttttgtatattttcgcgcgtctctctcacaaatgccttgttttctgtgcactcagactgtggatgatgcggcgggcaatatagagtttgcctcggaggaagccgattcacttggcctgcggtgcatcatcgagaaacacttctggcttcaggtaaacaaacaaatattacctgtgttattattgttattgttattgaagagtgatctttttcagatccctgactcaaaaagagccggctatgtgtgcggcccctgctgggagcagctactgctctttcacaacttttacctcaatgtggaacaagcccacaaagcgctggagcaaactgttttgaaggagacatctccgccagaagtggttgcttccgctctagaagagcacatcgttaaaagcgagcatgacgacagcgtagccgctgccgtcaaacgccgacgtggacgtcctcgaaaagtcgctcaacaggatgcacgcgaggagttgaagagcgtgctggagcaaatcaatttaaatgaaataaaaatcgagttccccgaagctgacttgacaattgccgatgtgcttgaggatcaggaggagcaggatttcctacccgacgactgcatcagcaaggagggagcggaggatccagaggttttggagaaaaaaccgccgacgcttaagcgaaaggttagcggacgctcaagaggtcgtcgacgcgtgcaactcgcggaacggcccaatacaagctgtctgcccaaaatccagaaatcacaagagtttaatgattatattcgcgagcactataaagttcagtgccacatctgtaacttgccaatggaggacttctccgagatgctggcccatgtacgacgggagcacaagcagcgcggctatgcaatgtgttgcaaccgaaaattccttaagcggggagttcttgtcgaccacttgcgccgccaccaggaccctgaaacctttaagtgctccatctgcggccgcgtgatgggccaccgtcgaagtcttgagttgcacatgcgcatgcatgagatcaaatctcgcggacgactataccgctgtgaacagtgctccaaggccttctacagcgccgtcgtctatgagcgccacaagctgactcacattccacgagagcagtggaaggtcccttgcacgcactgcgagaaaacgtgagtgaccgaaagatttactctttctcagatagctacatttgtatttttcagttatcccagtcagtatacgatgcagcaacatgttaagctggtccatttgaatttatatgccaagatctgtgatgtctgtggaaaatcgatcagaggacgcgaagccttggccaggcacatggaggagcacacgggagggccgcaggcagcaatcaaatgccacttgtgcgactcaatgctaaccaccaaatatggactggcccgccacataaaaatgatgcataccgctgagaacctgcagccgatgcagtgtgaattttgtcttaagatatgccccagtctacaggcacaccagcaccatatcaagtacacccacaatacggcacgtagtcatcagtgtcctatgtgcgaaaaggccttcaagagaccaaatgaactaaaggtaattagcgaaatcagtgaccgatgaaagcaattgattttgaactgttcttgcaggaacacatgacaacccacacgggcgaggttttgtacacatgcccccattgcccgcaaaccttcaattcaaatgccaacatgcatgcgcaccgcaaaaaggtgcaccgcaaggagtgggaggagaaccgacacaagcgactgaatcgttctcgcaaatcagacaccatcatcgccgtcagcgtacgaaagaccacagagaccaggcaggatggagggttggtacctgcagaagcgatagcaactaccagcagccctcgagcagaatgctagccctaggtgaccttttgacgcaataaaaaaccaaatgggacaccgtacccctattgtgatgactgcagtggcggggtaaacaaattatgtgattattaattgaaatccctgtgtcgatgggatcaaccggctgaaactggtttgtccatctgccccccgatcatctcgaactggtaaaacggacatcggagctggcgttatcagcgattaaggtcgaatctggtaattcataacacatatagacgcatatagcacaacggttcagtttaaatactcttattttgacgacgaccaacccgggatgcttcaacggctcaggcagacggagaaaccagtttgagtcggtttggaaaagtggatttaatccttatcagcgaattggcattatcatggtatcagttcaaaggtatcatcaatcggcgtgtgtgtttgtacacattctagtcttctgcggaatcctcaatctgtgccaaagaaatgactaggcacgttatgatgttttgttttttcatctgtggcaacatcttatttaccaatggaatatttggaaagttttgcaagccacacatggtgcgacgcaaatctgccatgatctattgacctttttttttgcatcaccacttcgatggctgtgattcccattggtttaagtgattcccactgatctatcccttacttatatttttgagtacctattgattgaaatcaagaaatgtaatcttttgactttaagcaaacatttttgggtgctttcctcaaaaatctatttgtctacataaaatgttcgctcttttaaaattaggtaaatagcatttattttgttgcaaaacgaaaacatttatttaaaatctagtcacaaatatggaattcgaatggttatttcgcaatgttcttgaaagtcaaatattatctcagatcaaaactaaaaacaacgataacacgatttaaatgacactcacttgatgtaattaggtagttcaaatattcacagtcaatggag

SEQ ID NO: 12293 - DNA, 1719 bp, DROSOPHILA
atgccttgttttctgtgcactcagactgtggatgatgcggcgggcaatatagagtttgcctcggaggaagccgattcacttggcctgcggtgcatcatcgagaaacacttctggcttcagatccctgactcaaaaagagccggctatgtgtgcggcccctgctgggagcagctactgctctttcacaacttttacctcaatgtggaacaagcccacaaagcgctggagcaaactgttttgaaggagacatctccgccagaagtggttgcttccgctctagaagagcacatcgttaaaagcgagcatgacgacagcgtagccgctgccgtcaaacgccgacgtggacgtcctcgaaaagtcgctcaacaggatgcacgcgaggagttgaagagcgtgctggagcaaatcaatttaaatgaaataaaaatcgagttccccgaagctgacttgacaattgccgatgtgcttgaggatcaggaggagcaggatttcctacccgacgactgcatcagcaaggagggagcggaggatccagaggttttggagaaaaaaccgccgacgcttaagcgaaaggttagcggacgctcaagaggtcgtcgacgcgtgcaactcgcggaacggcccaatacaagctgtctgcccaaaatccagaaatcacaagagtttaatgattatattcgcgagcactataaagttcagtgccacatctgtaacttgccaatggaggacttctccgagatgctggcccatgtacgacgggagcacaagcagcgcggctatgcaatgtgttgcaaccgaaaattccttaagcggggagttcttgtcgaccacttgcgccgccaccaggaccctgaaacctttaagtgctccatctgcggccgcgtgatgggccaccgtcgaagtcttgagttgcacatgcgcatgcatgagatcaaatctcgcggacgactataccgctgtgaacagtgctccaaggccttctacagcgccgtcgtctatgagcgccacaagctgactcacattccacgagagcagtggaaggtcccttgcacgcactgcgagaaaacttatcccagtcagtatacgatgcagcaacatgttaagctggtccatttgaatttatatgccaagatctgtgatgtctgtggaaaatcgatcagaggacgcgaagccttggccaggcacatggaggagcacacgggagggccgcaggcagcaatcaaatgccacttgtgcgactcaatgctaaccaccaaatatggactggcccgccacataaaaatgatgcataccgctgagaacctgcagccgatgcagtgtgaattttgtcttaagatatgccccagtctacaggcacaccagcaccatatcaagtacacccacaatacggcacgtagtcatcagtgtcctatgtgcgaaaaggccttcaagagaccaaatgaactaaaggaacacatgacaacccacacgggcgaggttttgtacacatgcccccattgcccgcaaaccttcaattcaaatgccaacatgcatgcgcaccgcaaaaaggtgcaccgcaaggagtgggaggagaaccgacacaagcgactgaatcgttctcgcaaatcagacaccatcatcgccgtcagcgtacgaaagaccacagagaccaggcaggatggagggttggtacctgcagaagcgatagcaactaccagcagccctcgagcagaatgctag

SEQ ID NO: 12294 - protein, 572 aa, DROSOPHILA
MPCFLCTQTVDDAAGNIEFASEEADSLGLRCIIEKHFWLQIPDSKRAGYVCGPCWEQLLLFHNFYLNVEQAHKALEQTVLKETSPPEVVASALEEHIVKSEHDDSVAAAVKRRRGRPRKVAQQDAREELKSVLEQINLNEIKIEFPEADLTIADVLEDQEEQDFLPDDCISKEGAEDPEVLEKKPPTLKRKVSGRSRGRRRVQLAERPNTSCLPKIQKSQEFNDYIREHYKVQCHICNLPMEDFSEMLAHVRREHKQRGYAMCCNRKFLKRGVLVDHLRRHQDPETFKCSICGRVMGHRRSLELHMRMHEIKSRGRLYRCEQCSKAFYSAVVYERHKLTHIPREQWKVPCTHCEKTYPSQYTMQQHVKLVHLNLYAKICDVCGKSIRGREALARHMEEHTGGPQAAIKCHLCDSMLTTKYGLARHIKMMHTAENLQPMQCEFCLKICPSLQAHQHHIKYTHNTARSHQCPMCEKAFKRPNELKEHMTTHTGEVLYTCPHCPQTFNSNANMHAHRKKVHRKEWEENRHKRLNRSRKSDTIIAVSVRKTTETRQDGGLVPAEAIATTSSPRAEC

SEQ ID NO: 12295 - DNA, 2966 bp, DROSOPHILA
caggacataatcaccgatcttgcaaactgtgaccaacagcggaaccgtctcgatgccgatgcgggtgcagtcatacggattgtccgatatgatgaggtctgtgatgccggcatccaacatggtggctgtcacccggggcagctttgtgttgaacagagccgctttggcggccagcgacactgcgtcgtgtagattgccgccacactccagaatctgcgagaacagggattagcattttcggtataattaagcacactagagtctaaccaggatgtctatgtacagcttccagcactgctgacccggaatgaggcacaacgtgcggtagttgaaggccaatggcgattcgtaggcgttctgcagggagagaataagttcttgggccagatccgagcccccgcgtccttcaaactccggcgtggcattagcagagctgaaatatatatgttatggcatattcttcgaacttcagttgcatcattaccaatccacaaaaaattccagtttaccaaactcgggcgtcagcgggttgggtacatcaatctcggttttgacgcccaccagtatgtctgtgttcgccagccgaaggcgagcggatccactggcattgctaaccagtccagtttccaggtccatgggccggtaatctcgtcgtgaacgtccatcgcaacgaaagtcatcctggaaacgcatagtttaaggtacagactatatttcttgcataaccgtttaacacacctccacgccgtgtagaatatatgttttttcagcttcgctcagtgcaacgtatgccattttagacttaattcaagaaaacaaatattcaaaacaaattcaacatgtgcaatgaacccacatcgatactatcgatataccgcaaagcagggctgctggcacttcgtttttactttactgaactgttgtcagtgcgaaaggtgtatgttttcatttgaagcatttcatttcacatcgccatctggtaacacttatccaaaacaagccagtcatttcgtgttcgtgcggcgtttcaacaaatatcaattgtaaattgaattgtaacaaatttaaagatcaatatgcagcccgactttgatttcaccgacacaccggtcagcactggtgtaagtatgaagagcatcagccacataacttcgtactaagagcacaatcctacctatttgcagaccaccattatggcagtggagttcgatggcggagtggtcattggagccgattcgcgcaccagctcgggcgcctatgttgccaatcgggtcaccgacaagctgacccgcatcacggacaaagtgtactgctgccgcagtggctcggccgccgacacccaggccattgccgacattgtggcctactcgctgaactatcacgagaatcagaccaacaaggatgctctggtgttcgaggccgcctcagagttccgtaattactgctacagctaccgcgagtccctgcttgccggcatcattgtggctgggtgggatgagcagcgcggcggccaggtgtacagcatcccgttgggcggcatgctgacccgcgagtcctgcaccatcggcggatcgggatctagttttatctacggatttgttagggagcactaccgccccaatatggcgctggaggattgcgttacattcgtcaagaagggtaggtaatcccaaaaaaaccaaaacagtttcccttcaatcgaatcccatttaaacctcctccaacagctgtccagcacgctatctaccacgatggcagctccggtggtgtggtgcgcattggcatcatcaccaaggatggcatcgagcgacgcatcttctacaacacagaatcgggcgcatcggctgtttccagcactcccagcttcatttcctcggaataaatagtatacctacccaagtaagatcgatcagagaaagagttgcaaactcgtctcatgctaataaacctggtttttgtaatatgcatactttaatttgtattttggctcttatggcagtacaaaagttaggtctaggggctaaaatggtaataaataatcgaaaacctaaacctaagatgcatagtcatacagatagtgctgttcctgacactggtccttcctcacaactcagataactactgcggcgagagtggaatgttccctacggggaagtcatttcatcgcctatcacatgacagtcaataccgatatccttcgcttaaactcttatccagtcaggtagtgaccagagatttaggagttgagtttggccacttcagctgcgtctatagactgcgtctccatggacttgttggtggcacatcgctgcctgcggtggcggtacaatatctccggtgtccaaacaagaaccaccaccagcagaatgactccttgagcataaaggcagattaggtaggagtcggcgtagtctcgcacccatcccagcagctggcccactgtgataacaataacgcccttggacatcatgctcagacccagaccgccggccagtttttccgagcggcaatgcgccgatatggtgagattgttgttgattacagtggctgatttcatcatgcctgtcaacacagacatggtgatgatcacgggcagcgtttgattctcggcaagcacacagcgagcgacaaagagtccaacaatgccgatcaggaacactacgcgatagggtattctaaggtgatctgtgacgatgggcagcagcaaacggaacacaatgtcggcgccagccacaagggacatgcagaaggccaccatttggctgttaagttgtgccgtttgtccaagaaaaccaggaaagatcatcgtgaagtttatggtggccgtatagactagagccatgcccacaatgatgctccagaatactaaatctttgagcagctccagatccattgcctgtaccaaccgctgtcccattcggctgcacagagtatccacatttggcgggctacgctcgatcttgctt

SEQ ID NO: 12296 - DNA, 835 bp, DROSOPHILA
ccagtcatttcgtgttcgtgcggcgtttcaacaaatatcaattgtaaattgaattgtaacaaatttaaagatcaatatgcagcccgactttgatttcaccgacacaccggtcagcactggtaccaccattatggcagtggagttcgatggcggagtggtcattggagccgattcgcgcaccagctcgggcgcctatgttgccaatcgggtcaccgacaagctgacccgcatcacggacaaagtgtactgctgccgcagtggctcggccgccgacacccaggccattgccgacattgtggcctactcgctgaactatcacgagaatcagaccaacaaggatgctctggtgttcgaggccgcctcagagttccgtaattactgctacagctaccgcgagtccctgcttgccggcatcattgtggctgggtgggatgagcagcgcggcggccaggtgtacagcatcccgttgggcggcatgctgacccgcgagtcctgcaccatcggcggatcgggatctagttttatctacggatttgttagggagcactaccgccccaatatggcgctggaggattgcgttacattcgtcaagaaggctgtccagcacgctatctaccacgatggcagctccggtggtgtggtgcgcattggcatcatcaccaaggatggcatcgagcgacgcatcttctacaacacagaatcgggcgcatcggctgtttccagcactcccagcttcatttcctcggaataaatagtatacctacccaagtaagatcgatcagagaaagagttgcaaactcgtctcatgctaataaacctggtttttgtaatatgc

SEQ ID NO: 12297 - protein, 224 aa, DROSOPHILA
MQPDFDFTDTPVSTGTTIMAVEFDGGVVIGADSRTSSGAYVANRVTDKLTRITDKVYCCRSGSAADTQAIADIVAYSLNYHENQTNKDALVFEAASEFRNYCYSYRESLLAGIIVAGWDEQRGGQVYSIPLGGMLTRESCTIGGSGSSFIYGFVREHYRPNMALEDCVTFVKKAVQHAIYHDGSSGGVVRIGIITKDGIERRIFYNTESGASAVSSTPSFISSE

SEQ ID NO: 12298 - DNA, 3024 bp, DROSOPHILA
ccattgacattgcccaaaaaccacaacaaagttaagattgtgcttcaggctgaacttgatgtgtggcctgttgcacgctgcatgttgcaagcgcggcatgtggcacttattggccatgggcacacctgcacgcccagtagaacgcgaacgcaaatgccgtcgccattcatcgcgaataactcaaaacccgtttgtcaaagcacgcactaacctaaaatcgccgtcaacaatattcgaaaaacactccgagctgcgttagctccgtacttcttgtccaatcaacagagtgaatatggccaaaccgaacgcaacgaaatgccgccaacgactgaaaagtcggcggagagccgctcgaaaagtgctgcgaagcatttgaagtgggttttcagtcgtgtatcgatagtaagccaaaagacaaaccaccgataccgccaactaccgagctttttggttttaagtcagcgaaactggttttcaattgccttaagtcagtttgataacaacatttaaagaagggaggtttattctttaaagctaactttgattgtgaaatcgtaagcattgcaaaatctaagggtctaagggtctgcggttcaagctttatataaaaaaaaaacgtacattgaaatattggttcattgaagttcccaaataatatccataaatataagcaattttgatctgcgcatttcggacaaagcatttcaatgaaataatgaatgcaatattatatattcaaaggataccattttatgcattgtcttcgcatcgattggaatgctatatcaaaggtttgtcaaacatattctgtaagtatttcagcaaatttatgtaaaacaagtttctttcattggttacacacatttaaatatcccgcgttgccgtaacttttttttttttgttgccagccctgtcattggattttacacaacctcacaaacggtcacatcatcggctgacaattggaaaattggagaaaaaatttactttgacccgaataatgtgcctaaagttatttgtttttacggcccttctggcccttgtcagctgcgaggttatcattggccaggacgaactggtggacgaggtgtctggcctgtacaccatcgaaggacgcgtttccccgccggattccattttttcacccactcaaggaggcggacgaagtgctccggtgaacaagaatacaccgaagtggcacacagagattacgctctccatcaacgacggcgaatttaagggattcgtccgcgaggatgggcagttcatgatcagcggagtgccatccggcagctatatcctggatgtccaccacccggatgttttctatgagccggtcagttaagggaatccattcaatatgatgccagaatcactaaaaatttcttcaattgcaggtgcgcgtcgagatcaatcccaagggcaagttccgcgcccgcaaagtgaactttgtgcagcccgcccaaattatgcaggtggcatatcccctgcgcgtgaagccactgatgccctttaaatacttccagaccagagagcagtggaaggtgcatcattatattgccaccaacggaagaatcacaaaactaacttttgctcttgacccacacagatcaccgacttcttgttcagccccatggtcctaatgatggtcttgcctctgctccttatgctggtgctgcccaagatgatcaacgatcccgagacaaagaaggagatcgacaatctgcagttcccaaaggtaagccgtgaggatcatgtatagcacagcactatagtattatatgaatcatgctctgctccacagatgggcaacgatatgcccgagatcagcgaaatgctgacttcactgctaacgggcaagcagcccgagcccaaggagaagaagcctgctccggccgtcaggcaggcgaagaagcgcaaggaccagtagtagttggccaccagatagcttttagtattaagcttaatcggagcgccgagctccaagtcagagtcagatcgtttaaatagtaaattttcattacaagactttgccgctttatttaagaaatcctactatttgcggtcgcttgagtccgacgcgctgctgctccagatttagcattttagtgagcagccggtccagatgctcgccaatggccagacccagctccagacagttgcgcatggtgtcccggtgcatggctccgccgccggtcaagtgtgtacccgaaaggaatgcctgtccattccgcatggaaactgacacaaccatgctcactgtgctgcagacttcctcctccgccgaaggatccaccaggacataatcaccgatcttgcaaactgtgaccaacagcggaaccgtctcgatgccgatgcgggtgcagtcatacggattgtccgatatgatgaggtctgtgatgccggcatccaacatggtggctgtcacccggggcagctttgtgttgaacagagccgctttggcggccagcgacactgcgtcgtgtagattgccgccacactccagaatctgcgagaacagggattagcattttcggtataattaagcacactagagtctaaccaggatgtctatgtacagcttccagcactgctgacccggaatgaggcacaacgtgcggtagttgaaggccaatggcgattcgtaggcgttctgcagggagagaataagttcttgggccagatccgagcccccgcgtccttcaaactccggcgtggcattagcagagctgaaatatatatgttatggcatattcttcgaacttcagttgcatcattaccaatccacaaaaaattccagtttaccaaactcgggcgtcagcgggttgggtacatcaatctcggttttgacgcccaccagtatgtctgtgttcgccagccgaaggcgagcggatccactggcattgctaaccagtccagtttccaggtccatgggccggtaatctcgtcgtgaacgtccatcgcaacgaaagtcatcctggaaacgcatagtttaaggtacagactatatttcttgcataaccg

SEQ ID NO: 12299 - DNA, 832 bp, DROSOPHILA
atgtgcctaaagttatttgtttttacggcccttctggcccttgtcagctgcgaggttatcattggccaggacgaactggtggacgaggtgtctggcctgtacaccatcgaaggacgcgtttccccgccggattccattttttcacccactcaaggaggcggacgaagtgctccggtgaacaagaatacaccgaagtggcacacagagattacgctctccatcaacgacggcgaatttaagggattcgtccgcgaggatgggcagttcatgatcagcggagtgccatccggcagctatatcctggatgtccaccacccggatgttttctatgagccggtgcgcgtcgagatcaatcccaagggcaagttccgcgcccgcaaagtgaactttgtgcagcccgcccaaattatgcaggtggcatatcccctgcgcgtgaagccactgatgccctttaaatacttccagaccagagagcagtggaagatcaccgacttcttgttcagccccatggtcctaatgatggtcttgcctctgctccttatgctggtgctgcccaagatgatcaacgatcccgagacaaagaaggagatcgacaatctgcagttcccaaagatgggcaacgatatgcccgagatcagcgaaatgctgacttcactgctaacgggcaagcagcccgagcccaaggagaagaagcctgctccggccgtcaggcaggcgaagaagcgcaaggaccagtagtagttggccaccagatagcttttagtattaagcttaatcggagcgccgagctccaagtcagagtcagatcgtttaaatagtaaattttcattac

SEQ ID NO: 12300 - protein, 245 aa, DROSOPHILA
MCLKLFVFTALLALVSCEVIIGQDELVDEVSGLYTIEGRVSPPDSIFSPTQGGGRSAPVNKNTPKWHTEITLSINDGEFKGFVREDGQFMISGVPSGSYILDVHHPDVFYEPVRVEINPKGKFRARKVNFVQPAQIMQVAYPLRVKPLMPFKYFQTREQWKITDFLFSPMVLMMVLPLLLMLVLPKMINDPETKKEIDNLQFPKMGNDMPEISEMLTSLLTGKQPEPKEKKPAPAVRQAKKRKDQ

SEQ ID NO: 12301 - DNA, 5501 bp, DROSOPHILA
ctccctggaaaccagacccgatccccttctgatgtgttccatcctgtgcagcagatggtagtagagctgacgttcgtaacgcgtaggcgccacgtaacgcagtttctctgcaatgcacggggcataaataaatacgcacatccgtcatccgtatcgcaagtgtacggttcattgggctcacgttttatcagaaactgcgagagcaacagggcgaatgtagagctggcactcaggcggcgtcctccggagaggcggtccagcagacggtagatgcggtgcggcaggacctggtcagtatccgatcctgatccatggattggcaccaggaaacagccggtaatggccagtagaagagcgtatttcaggcccaagagcaacatgttgtcggtttaccagcccggagtcgtctacaccacgtcttcatcctggccatctacaagtcacatcggaccgcgtctttgatttcgccacttcatgaagattaattgagccgcatttgtatcgccggctgtgcggaggctcttttattcgtccccgggggtgcggagtataaagtttctcatattaatcacaatttacagctgaatacatttcgcagattgaaggattggctttcagtttttgtgggaattcagcatttttctttgcgtgggcagctcatatcctttgagttctgatgtggcggcggcaagttttgccgcctttcattttaaatttaacatgacttcaagcgagttaacagagctatatgtaacagctgcaactctatggaaagtaaatgctatccgattgtcagtgttttatttgtcgtccaaattaatcaatttccaatgagcataggttaaaaaatttaaaaaaaaaaatacatgaatatataaaaaggtttgaagaaatttatttcaaagtgccgttagcagcagtagcgctactgcgcataaatcgcttactctcaactggtcacactgactagccacttttttctttgtgtaattttttgtagtgaaaatcagtagagtttaaagaagagtttatcggccaaacaaagcgaaccacaagcgtttccaatgtcagagaacaaggacgaggccttgaccagttttcaggtaatgctcttcatagatctcaaccgaaaaacccgtcaatttcgctgcgcacattgcgatgcgtgtgcgtttttggtgtatgggtgactttggcagatagctccaatatcgaactatatggtactaaatgatctttatgctcatccgcagagcattacgggcatcgacgatgtgggcgaagccttttcccacttggaggccgccgactggaatcttgtggtgagtgtgcagattctttgttcagttgccctgctttggattccccaactccgcaaatatgccttgtcataacactacattgtctctttgcaggaggctctaagtcgcgtgatcccgcacgaggatgcgccgctgaccagtccccatcctatcctggtgccagagccaccggccaggaatgccgtggagagcacgaatggcttccgtccgcctggctttgatgaaatgcccgggacttctaacgcgtccggtttctttgcggccgcccttcaaaaccagaaccaaaacctaaacctaaatcagccgcacatccagcaaagatttccaagtgagttgaacatgatagcgccgcttttgtcccatgacttgaaatgtatctactatagcgtcacaattgctagcccagctgacgtccagtatcaacctggaccccgcgtccagccaaaacaacaaccaaaacgtgatcaccttcaacatccactttaaccagcagctctaccagctccgtttaccatcggaggccacagttggtaaggatttctactggatcctgctggatctggatctcgcgctgcctgagtcaattaaccaatacatatctctattagaacaacttaaacgcaaaatctttgccgagacaagtgtgcctgtgtgcaggcaagccattcgcggctggccaccctccaaagccagcgatgcacagcagctgggcactcgtttatgcaacctagatctctccccggagaatgaactgatcctggtggacctcaccgaagacggtttcatggacaccgaacagtgagtccgctcgaaaatactccttaaaacattttactcataaatcttgtgtagggatgaagtgacgcagcgcgtggacaaggacttcaccattttcatacagttcgaatcggacccaccactcactcttagcctgccaggacgtatgacagtgcaagaggtaaagatgaacgtgttcgacatcaagagcataccagtgcgccaccaggagtggaccggctggcccaacggttgtgacaatgacaccactctggcggtatgtcaatttaaataatatcttgatgctagcttaatcctatctgttactgcaaaccctttagcaatctggcattgggctctcgcatagattcgctgttcgcagcacggaacgatcagcgccaacaaattccaatcagcacaacgcattcgatgtggtgaccgtggacagtgagagctcgacagatgagttcgaagatgccacagacttcaacaacgccgagtacatatttactgactcgccacccgctcagccccccaacagacacttaagtaagcattataaatgcattctattgaatgcagtaggtaaagttatttaattttccagtaccaaacgatacggatgatgagataagtggctccacgcagtttgtcgagaactacaaggcgcgttatggcgagccctgtcccgaattttttgtgggcagccttgaaaacgccaagcagctggcctgccttcgatccgccaaggaggtaaattttggctaattcatttcaatttctcttataaattatattaccaactgacatgtgattttagcgcaagctgttggccatttacttgcatcacggcaagagcattctcagcaacgttttctgtgatcaactgatgaaacatgagagcattatacaaactttcaaagagaagtttgttttatatggctgggatatgacctacgagagcaacaaggacatgtgagccgttattggtgtacttctagggtattttattgacaagttatgtgtgccgcaggtttctctcctcgttgacggcctgcattagcagcaacgcctctctgacggccagaaacattaaattggacaagctgccagccatcatgttggttggaaaaagccgccagctgggcagcaattgcgaagttttatctgtgattcatggtatgcccactgaaatctttaaaataatattgtttacttatcacaattcaataatttataggtaacattggtctggatgacttgcttacgaggctgattgaaacatgcgaaatgtttgaggagcagcttcaggtggaaatacggcaagaggacgaacgcgctgcccgtgatcaggtgaaggcagagcaggacatggcctatcaggaaactttgcaagccgacatggctaaggatgcggcaaagcgccagaaggaggctgcacaattggccgagcgaaaacgaatggagtccgagcgggccgaagaagatgctagacgcgagtccatcagattagttgtaagttcatgttgtttttctttctgtacgataaaccgcttataaatacacatttcgcccaggctcaacaatccctacctcaggagccgtccgaacaggaaacggggacttcaaagatccgagtgcgtaagcccactggcgattttctggagcgccgttttttcatcaacaacaacctacaggtaggtgctactaagccacacttgaattgcctgttgactgttctctgtttgaccaggatctgctcaactttgtgacggccaatggtttcctcatcgaggagtacaagctaatcagcagctggccgcgtcgcgatcttacggccatcgagagtagccaaacattggagtcgctcaagctgtatccgcaggaaacggtcatcctggaggagcgatgattccgcttgttactttaaggccgtttcgttcgattgggtttagtttttgcattaatatctgaaaattgtagatctacctataatttacgtactataattaagcaagcagcaacactttaacgaaagcatacacaccacatacatacatatatacctatatctaaagataatgataatttctagctgcaaggttttatacaaatccatactaaacatagaataatccaacgcaatccgatcgatcagcactcaccagcaccagatactaccggtaaaacatatatgcatgtagcgcagcagattaaaattgagcatagcagcaaagaagagaaagaaagtactgcatttatgttggcttgttttattttattaataataaattatataacatgtactgaacgctccgccccaggttacacatgcgcctaattacacttaacaacacaaagctgaatggaaaaaggatgggaatttgggtggtgggcagggcagagccgtgggcggaaggggttaaacaatgagcacacaaaactgacacgagtattggaaggggacaggttacaggacatccgaattagggggcctaggactttcccaggaattgttcgatgggcgccagcaccaccaacaggatcagcaccgtcacgaagagaatcagcaccacgccgtaaactccgagcaatcccttgcgcatgcccgcatactgaaattgggaagttacaggatgaagaatatggacaatataggttactactacttaccggggcatccatcttccgctccatgctcatgccattccgcatggcgtgctgctgatgatgggacatgtcgcccatttggaaagtgttcgcccgctggctgagatgacgctccgaggccatgccgccaatctgccaatgattcaaacacaagccgatctacacattaagggacatagccaccagttctcgagcggatgatgggtgacagatgaattagtatggaatgaatgaacgtttagggacacaactagaaccactgtacaggcaggcaggcgatgctgggtctaatctttgtacacttcggggtcacatgagaggggagaaacacccaaccactgcagtatgaattacttacggagaatatcaggtggacgagtacatgcaccaccacgaagctgaccaggatccagtccatccactcgggcagctcggcctttggtagttttacagaaaagaagatggtaacaactgcaagaagattcgtgaataagccatatatttggatgatctacgaccgctgaactcacttcccagaatatgggccaggttaccgcccagccaatgaccccagttgaagtatggccgcttcttgtcattgggtcccggtcggaacagagctccaatgggttgaatgaagcacaatatcaccgtgatcagaccgattatcgaatgggcatgccacacagcctgcttcagctccacccagatgagtacgtaagcggccaccgt

SEQ ID NO: 12302 - DNA, 2642 bp, DROSOPHILA
tgaaaatcagtagagtttaaagaagagtttatcggccaaacaaagcgaaccacaagcgtttccaatgtcagagaacaaggacgaggccttgaccagttttcagagcattacgggcatcgacgatgtgggcgaagccttttcccacttggaggccgccgactggaatcttgtggaggctctaagtcgcgtgatcccgcacgaggatgcgccgctgaccagtccccatcctatcctggtgccagagccaccggccaggaatgccgtggagagcacgaatggcttccgtccgcctggctttgatgaaatgcccgggacttctaacgcgtccggtttctttgcggccgcccttcaaaaccagaaccaaaacctaaacctaaatcagccgcacatccagcaaagatttccaacgtcacaattgctagcccagctgacgtccagtatcaacctggaccccgcgtccagccaaaacaacaaccaaaacgtgatcaccttcaacatccactttaaccagcagctctaccagctccgtttaccatcggaggccacagttgaacaacttaaacgcaaaatctttgccgagacaagtgtgcctgtgtgcaggcaagccattcgcggctggccaccctccaaagccagcgatgcacagcagctgggcactcgtttatgcaacctagatctctccccggagaatgaactgatcctggtggacctcaccgaagacggtttcatggacaccgaacaggatgaagtgacgcagcgcgtggacaaggacttcaccattttcatacagttcgaatcggacccaccactcactcttagcctgccaggacgtatgacagtgcaagaggtaaagatgaacgtgttcgacatcaagagcataccagtgcgccaccaggagtggaccggctggcccaacggttgtgacaatgacaccactctggcgcaatctggcattgggctctcgcatagattcgctgttcgcagcacggaacgatcagcgccaacaaattccaatcagcacaacgcattcgatgtggtgaccgtggacagtgagagctcgacagatgagttcgaagatgccacagacttcaacaacgccgagtacatatttactgactcgccacccgctcagccccccaacagacacttaataccaaacgatacggatgatgagataagtggctccacgcagtttgtcgagaactacaaggcgcgttatggcgagccctgtcccgaattttttgtgggcagccttgaaaacgccaagcagctggcctgccttcgatccgccaaggagcgcaagctgttggccatttacttgcatcacggcaagagcattctcagcaacgttttctgtgatcaactgatgaaacatgagagcattatacaaactttcaaagagaagtttgttttatatggctgggatatgacctacgagagcaacaaggacatgtttctctcctcgttgacggcctgcattagcagcaacgcctctctgacggccagaaacattaaattggacaagctgccagccatcatgttggttggaaaaagccgccagctgggcagcaattgcgaagttttatctgtgattcatggtaacattggtctggatgacttgcttacgaggctgattgaaacatgcgaaatgtttgaggagcagcttcaggtggaaatacggcaagaggacgaacgcgctgcccgtgatcaggtgaaggcagagcaggacatggcctatcaggaaactttgcaagccgacatggctaaggatgcggcaaagcgccagaaggaggctgcacaattggccgagcgaaaacgaatggagtccgagcgggccgaagaagatgctagacgcgagtccatcagattagttgctcaacaatccctacctcaggagccgtccgaacaggaaacggggacttcaaagatccgagtgcgtaagcccactggcgattttctggagcgccgttttttcatcaacaacaacctacaggatctgctcaactttgtgacggccaatggtttcctcatcgaggagtacaagctaatcagcagctggccgcgtcgcgatcttacggccatcgagagtagccaaacattggagtcgctcaagctgtatccgcaggaaacggtcatcctggaggagcgatgattccgcttgttactttaaggccgtttcgttcgattgggtttagtttttgcattaatatctgaaaattgtagatctacctataatttacgtactataattaagcaagcagcaacactttaacgaaagcatacacaccacatacatacatatatacctatatctaaagataatgataatttctagctgcaaggttttatacaaatccatactaaacatagaataatccaacgcaatccgatcgatcagcactcaccagcaccagatactaccggtaaaacatatatgcatgtagcgcagcagattaaaattgagcatagcagcaaagaagagaaagaaagtactgcatttatgttggcttgttttattttattaataataaattatataacatgtactgaacgctccgccccaggttacacatgcgcctaattacacttaacaacacaaagctgaatggaaaaaggatgggaatttgggtggtgggcagggc

SEQ ID NO: 12303 - protein, 695 aa, DROSOPHILA
MSENKDEALTSFQSITGIDDVGEAFSHLEAADWNLVEALSRVIPHEDAPLTSPHPILVPEPPARNAVESTNGFRPPGFDEMPGTSNASGFFAAALQNQNQNLNLNQPHIQQRFPTSQLLAQLTSSINLDPASSQNNNQNVITFNIHFNQQLYQLRLPSEATVEQLKRKIFAETSVPVCRQAIRGWPPSKASDAQQLGTRLCNLDLSPENELILVDLTEDGFMDTEQDEVTQRVDKDFTIFIQFESDPPLTLSLPGRMTVQEVKMNVFDIKSIPVRHQEWTGWPNGCDNDTTLAQSGIGLSHRFAVRSTERSAPTNSNQHNAFDVVTVDSESSTDEFEDATDFNNAEYIFTDSPPAQPPNRHLIPNDTDDEISGSTQFVENYKARYGEPCPEFFVGSLENAKQLACLRSAKERKLLAIYLHHGKSILSNVFCDQLMKHESIIQTFKEKFVLYGWDMTYESNKDMFLSSLTACISSNASLTARNIKLDKLPAIMLVGKSRQLGSNCEVLSVIHGNIGLDDLLTRLIETCEMFEEQLQVEIRQEDERAARDQVKAEQDMAYQETLQADMAKDAAKRQKEAAQLAERKRMESERAEEDARRESIRLVAQQSLPQEPSEQETGTSKIRVRKPTGDFLERRFFINNNLQDLLNFVTANGFLIEEYKLISSWPRRDLTAIESSQTLESLKLYPQETVILEER

SEQ ID NO: 12304 - DNA, 3670 bp, DROSOPHILA
ctcctcctccttaccgtggtcgcgcatcgagttgcgccccataaccaccattttgcacatagtctcttcctgcagctgccgcagtgtgttgcccttgggccccaggatcttgccaacgaaattgaacttggggtactccttgatggggaacaagactttctgggccacgcggatgggcttttcgctgtacacgttggcatatatctcgggctttggtatgcgtccgctgaccaagatcttctccacctctgcggggccatgaaaaattgcaattagatccactatagcttacatgtcgcagcgcctaactcaccgtcgtcaagtaagcgcttggtgatgatgtgcttcttctcgagcgtcttcttttccagcaggcactcctgcagatacgcgttggtcttctcattcagctggggcgtgtcccgcagggcggcgtggctggtggtgtgtccgccgccatccgcctcaggggtctctggagcaccggtagccgctggctcctcgtcgcgtcgcttccgcttgtagtcggcggcgtcctcgttgtagtctctgtcgtagtcgcgcggcattgcgttttgtaggatttctggcctggaggattcgtgaattttaaaactcctactcttgaatacaaaattctactattgcagaattagttggctgaaaaaatatgtatgtggtaggacatcgataggtaaatcggcatcaccgattcgatagcgtattatcggttactgccgataacaacccgccatcatgtgcattagtagtttatgacttatcaattttattaaaaactttcccataacaaagagagcatttaaattatatttgtaatttaaaaatcactaagtgcatattataaattattgccatgcacctgacgacgcatctatgttaatatatagcgttagatagtgtctgcaagccgataacaactatgcgcccttaacagcaccgtcgattggcagcgaacagcacgctgcagaagcacgagagacagcccgagagaccggagttgccggaccgagccgctgacatagtaaatgtccgaataaaatacacacttggaaaaagagagaaaaattagggccattgggaaggctgaagtgtgctaagttagcaatcataccgaatcgacagcaaaagcgatcgcccgcaatctgcgcacggaaaatccgagactcggcgacttagcaggacgatagagcgacagcgatcccgaaggcaggacgacaaatggcggagaacggactgcgcgtgccagggtcatccgcggtggcctctgcggtggcttccactgcgacgggagtcggcggtggatcagcagcgggaactgcgggggccgggacaggagtggtgcccaccggcgtcagcggcgggacgagcaacggggagcatgagaacgaacacaacgccaacgcagacggcgagaaggcccagccggcgccggcggtccagaagtacatgcaggagctcatgacggagcgatcgcgcatggaaaaccacttccccctggcggtgaagctaattgacgaaggtaaattgatttgtcaggggcacttcatggtaattactttgatttccctctgtttttgcagctctggagcgtgtgcagctaaacggacgcattcccacgagagaccagtacgccgatgtctaccagcagcgcaccatcaagctgtcccaaaaagtgcacgtgcccatcaaggacaagaagttcaactatgtgggcaagctactggggcccaagggcaactcactgcgtcgcctgcaggaggagacgcagtgcaagatcgtcatacttggtcgcttctcaatgaaggatcgcgcacgtgaggaggagctgcgcaactccgcggacgcgaagtacgcccacctgaatcttcctctgcacgtcgaggtgtccaccattgctccgcccgccgaggcgtacgctcgggtggcgtatgccctggccgagattcggcggtacctcacgccggacaagcacgatgacatccgccaagagcagtaccgcgaactcatggaggatccggaggcggccaagaagctgacgcttcgccagctgcaacagcagtcgaatgcggcagctagtggtgcaggaggaggaggcggtggtggaggcggaaacggaaatggcggcgcagctggatccggcagcaataatggcaatgggaaccagcgctccggcggcaactacaggtgggttgcagttcaatgtcctctacgagcctcgagtctagctaaactcccatgtttcttacagacaaaagtttcagcaacaatcacactatcgccacaacgaggagactgtctattttcgctcacacaacaatgcgtaccaccagccaaaaccctatgtgccaggtaagtctgggctctcctggtccatagaccatagattctatgttcgcttttgcagccgcccaacggggcaatgccatgcacaccaccttgccaccgcaagcaattgtgcgagcctcaccgcccggaatggtcgtcagtgcggccagcttcaatggccgaaatgccggactgggtaatgccggcggtggcggaatcatggccaatagcatcgtggccaccactggcggtggcatcggtggcgctgtgccgcctaacatgcgttaccgtcccgctgccccctaccagtttgtcaagaaataatacagatgggaggatgcaccgcccgctgccgttcgctgtttgttcaactattcctcaccatcattgatgcctcatccggaagtattcacgcccatctgtcatacccatccaaacacccacaaccacacacagctccaaaggtagatgtagtaactatgagaacattggaaacttgtcatgcattgatttcatcaagatttcggcagggtggaaaccaaaacgaaacgaatgagtaaatctatgtttaagaaaactagcctaagtagacaaatgctccgaggaacagacgaacacctcagccacccaaccaaaaccaaaactaaccgaccagacaaacacccaccaccccacacgcacgcaacctcttctcgaggattgggttcgaaggatcacgagggtctgcgatctaagactttggaatccgtgtgttgggccctgcgagcatttggaagagaagaattgaagaagaagaacgaggaggaggtggagaacgcctcgatgttggatcgggccgaatcgaatggacgcattcaaggttggtcccagtcgagccaaatgtccttgttttgttttgtcgcatattattaacattttaattttaccactgacgcgtgcgaagatttcatcactttgtaatttatataaatgaatatatatatctccttatgcttactatcatacgtatccttctcgcagtcgctttaactctattgcttttccaactctgcgtttaagtttatcccattttttgttgtaatgcgttttgtattatgtttacgtttagaagaggaggcttcttatttttatttgttacgtcgccaggacagaaaaagcaactgcaaacgatcatgaataatatatataacaagtatatacaagcggtatgatttataacacatagtgcatatgcaacaccacacgatcatacgcgcgtacgcatattcaaaacatcagcatattcacctaaagccgtaaagtttaaaccaaatgaacattagaa

SEQ ID NO: 12305 - DNA, 1490 bp, DROSOPHILA
cagcccgagagaccggagttgccggaccgagccgctgacatagtaaatgtccgaataaaatacacacttggaaaaagagagaaaaattagggccattgggaaggctgaagtgtgctaagttagcaatcataccgaatcgacagcaaaagcgatcgcccgcaatctgcgcacggaaaatccgagactcggcgacttagcaggacgatagagcgacagcgatcccgaaggcaggacgacaaatggcggagaacggactgcgcgtgccagggtcatccgcggtggcctctgcggtggcttccactgcgacgggagtcggcggtggatcagcagcgggaactgcgggggccgggacaggagtggtgcccaccggcgtcagcggcgggacgagcaacggggagcatgagaacgaacacaacgccaacgcagacggcgagaaggcccagccggcgccggcggtccagaagtacatgcaggagctcatgacggagcgatcgcgcatggaaaaccacttccccctggcggtgaagctaattgacgaagctctggagcgtgtgcagctaaacggacgcattcccacgagagaccagtacgccgatgtctaccagcagcgcaccatcaagctgtcccaaaaagtgcacgtgcccatcaaggacaagaagttcaactatgtgggcaagctactggggcccaagggcaactcactgcgtcgcctgcaggaggagacgcagtgcaagatcgtcatacttggtcgcttctcaatgaaggatcgcgcacgtgaggaggagctgcgcaactccgcggacgcgaagtacgcccacctgaatcttcctctgcacgtcgaggtgtccaccattgctccgcccgccgaggcgtacgctcgggtggcgtatgccctggccgagattcggcggtacctcacgccggacaagcacgatgacatccgccaagagcagtaccgcgaactcatggaggatccggaggcggccaagaagctgacgcttcgccagctgcaacagcagtcgaatgcggcagctagtggtgcaggaggaggaggcggtggtggaggcggaaacggaaatggcggcgcagctggatccggcagcaataatggcaatgggaaccagcgctccggcggcaactacagacaaaagtttcagcaacaatcacactatcgccacaacgaggagactgtctattttcgctcacacaacaatgcgtaccaccagccaaaaccctatgtgccagccgcccaacggggcaatgccatgcacaccaccttgccaccgcaagcaattgtgcgagcctcaccgcccggaatggtcgtcagtgcggccagcttcaatggccgaaatgccggactgggtaatgccggcggtggcggaatcatggccaatagcatcgtggccaccactggcggtggcatcggtggcgctgtgccgcctaacatgcgttaccgtcccgctgccccctaccagtttgtcaagaaataa

SEQ ID NO: 12306 - protein, 416 aa, DROSOPHILA
MAENGLRVPGSSAVASAVASTATGVGGGSAAGTAGAGTGVVPTGVSGGTSNGEHENEHNANADGEKAQPAPAVQKYMQELMTERSRMENHFPLAVKLIDEALERVQLNGRIPTRDQYADVYQQRTIKLSQKVHVPIKDKKFNYVGKLLGPKGNSLRRLQEETQCKIVILGRFSMKDRAREEELRNSADAKYAHLNLPLHVEVSTIAPPAEAYARVAYALAEIRRYLTPDKHDDIRQEQYRELMEDPEAAKKLTLRQLQQQSNAAASGAGGGGGGGGGNGNGGAAGSGSNNGNGNQRSGGNYRQKFQQQSHYRHNEETVYFRSHNNAYHQPKPYVPAAQRGNAMHTTLPPQAIVRASPPGMVVSAASFNGRNAGLGNAGGGGIMANSIVATTGGGIGGAVPPNMRYRPAAPYQFVKK

SEQ ID NO: 12307 - DNA, 7025 bp, DROSOPHILA
acttttatatttctacaaattaacaactgaaactggaaattctattgttgttctggcaaaaaaacgtgattatattttatttgcttttcaggaaatgagcactacttttatgaccttcattgtaaggagtctttttcgctcttttcaaagtgattttctcaaactgaatatgatctgctttctctgctaactagcgctgactcaccgatgatggcctcgtgatcgaactccacgttgtgctccccatcctcgccgtggtggtgggcatcccggggagcgtagatgccgtccttgacccgctccttgctaaggtgcttctcgtgcttgtgactgttggccaccgccccatgggcgggcatgggacccacggcggccagcaaggcgacggcacagagggtcagcgggaggagcggcagattcctaggcattttaattgattatgccaagcggcgtgttctttggtctttgttttctctttttttttggcagcttcccgagttctcgagtggatgggggggatgatgttccggcggaggagggagaccggatggacgcacacgtaatgcccaacagcacaatgaactcagttcacctttcgcctgcttctgaaatatgcaaatgtcagtaaaaaaccgacaacaaaaaaaaactattttttgaattttaaataatcaccgacagctgttgtcttcgcttgccttgccaatatttcgctgaccacaactgtttacctaaccacacagcccttcagtcacacgtgcatattatgggcatggaaattaatttatttacctatacatattaatacatgttcacataaaaattcgtttatttatttgcgtacaccaaagaaacgaaaatgcagacaatgtgaccgtcagcgaaaaataaatgttagcccatcgatttttgggtttagcatctgtgcagccctggtgtttccacgccctaccaacactgcccaccttgctgttaactttacagcagtgtttgctacgcgccagccctgacttacattacgaggaataaaagaaaataaattgcacaaattggcgaaaagcgcattattgctaaactaaagcctcgttaatttagcaggtgagctcttaaagagaaaaacaccaacacagtgctgtgcaggttaaaagcaacaaggaaaaaagctgaaaacatctaaaaaaaaagtgggcgaacgaagttgattaaattcaaatgacatcattttgcgacagctgtgtggcataaaaatcatttggagccgcgcgtttatttatttcgaaatttgatcataattcacgttcattttgtgtgccccaaacacgcaaaggacacttgagcccactgggtgtgtgcgtgtgcatttccaggaccccaattgcctacgtgtgcgtgtgtgtgtgtgtgcgcgcgcggctatgtatgtgtatgtgggtaggagttgttgaccggcttggttagacttttattttcattttattagtattttcgttgggcgccgagcgacagaaatacttactcattagtcgaccggtcggtcaggtcagtaattatagtcactgactaaagcttcacatgcaactggtcgcggggtgccaccccgccagcgagtgcgagcgagagggcgcatggctcagggatgtcgctggtggaattccaagggggattgcaataaggtaatccatttcaaaatttgcactcgcactgtctgcatgttttgaaagcgttgatcgaatgggattttgtttttaggaaagttagcatttctgaggctaaattcaattcattttgtttataataatatatataaataagttttgagctaggaaagaatgtccagtaatatctggttctagaatgtcccctgaaccatatagccatctaggtatatgttccgccttggccactgggttgggtcatatcgtacatatatcggtcgagtgattatcctggccagagtgcgtcactttgtcatttgggtatctgccaccttacgccgcaggctaatccaataaaaaaaatagctgctaaccatttcagagagcagcgctgcgcgacgcccaaaagcgaaataaaaatacgaaaccaaaccaaacaaaatagccaaagcagtagagctgagctagcgctgggaaaacctcttggtcaacaacgtgttacccgatttcggtttcagtcgagagtcagccttcagcagagcgccacagcgagcattagctgcctcacggtttcgtatctcatttggttttcacttacgtttcacggctttcgttggcacgcccgcgctaattaatccgcagatatattcagcagtaatcgggccaaatgccgtacataatcatacgggggaatctagcctcctacagccacaaatatccatggagggtgctcgtctccgggttgaaaggtaaagcctgaaccgcgtagatacagtatctcttttttttttggtttcgtttcgcttttatttgtagtgtgtttaccattgcgacacacacaattcatttcgagagcttggcaaacagatacgaacacacgatagatttctgaacgctcttttcggtttttccactttgcaccacaaaaaaaaaaaaaaaaaaaacaaatttttgaatggttagacagtggctgtataaatattatatacatatattattttcaaactattgtttcaatatctagcatgtattttgctcaagcttggaaacatgaccaaatgcacgcctatttgatgtcataataatacaatgtaatgttttaaaactttatctagttatattctttaaaatactgaaagcatcttgaaaatccaatcctatacttattttttgacattcaaattctactcccattttgaattgtaaagttacagtaaatctcactgaaacaataataaaaaaaaaataaataaaaaaatctacggcaagctatttttatttgctggttacccaataaccattagcgctgtgccgtagttattttcctcataaaatcaacagctgccctttaattgcactccatttgcccctggaaatccgcctgcccgcaccattccgcttttttcgaccgccactgtgcgaagtttggtgcccgcagacgaggtcttcagttcgccagtttgggtttgtttttcgctccgtgcagttcgcctggcagagcggcctgtcgtgcttatatttgtagatatctatatatacagccgtacgtagtgccacatatatgcactcgattccggtgcatatttctggaagtagtatctgtgcggcgcagaagtcaatgcactgggatcgtctagggacaaagaaaatacgatactcccgagatactcccattttacgtttattatgaaacagcagtcaatatttctttcgccatttcgcttaattagcacactcacattgaaagacaattgccctgggctgacgtcacttttcgacacagccgagtttatcttttgtttgcactgtttaaacattagcgaaaaggaaagcgattttatcaaaagtagcacccatgataaccattgcccattcttccagctgacgacatcgagcagttgaacaagttctcctgcggcggctacagcgacgagtccaccatcgtctacttagtgcatccttgtcggattttatcggcgctagaagtgagtacaccttccagatcccataccgacctactcagaatgatattttcttatagacacacatttcgctatctaatgagacagcagttattttatcaacttaaacaattcgccgagcaggcactgattaattattttagtaaaactttcaaccccacttcccttcctattgaactttcaattatccagtgactcatcgatttctgcatttttccttctagatcctgggatttcgcgtagtggccagctcatcgactgccgtgaagcaggactacaacgagtacatgtggacgatgcgcaaggagttcgacgaaccagaacccttggaagccgagtccgtggtgcgagaaaatctatcgaatattggccgcgaggcagccagtttaggcaactatcacaaggtggattcgcctgaatagacccgcatcccatccagtccaaaacaaacaaaaaaaaaaagagcagcaatcaaccaagaactctactctagttgtataatttagtgtgtgtgtgtgtgaattgtgtgcgtgtttcggtgtgaaaaaagaaaaaaaaaaaattatagtaacctagggaattttgttccataacatacactgagcaaaggaggcgaccaagcgagtcccttcagacgaacgaactatgagtgagggcgcagtcgggctgaaggaacctcagaatctcaatagcgaagttgtttcgactgtcgtgtccgcggcatcggctgcatccttgaacgccgccaccgccaacgtaccggccaatgtggtgaccataccggtgcccattctgcagtcggagggcaactttgcctacgtgaccgtcaagggctcgctgcacgattacacctgcaccatttttggcctgaatcaagcggaagttcaagccctgtccaagcgcttcgagagcggtgttaaggcgtgcgtcaatggtattatggtggcagtgccgcccatggttatgctgaacactctcgcccagctaagctacaaggttgtctgcagttgcggcgaagccgaaatttgttggaccatgcagcgtgaggtctaattcgtttgatgagatcacactgttatagcgtcaaagatcaggcaactggcagcgaaagcaaaagaagcggaaaaggaattcggaattcggaattgtagagaatatctcgaaataatcggcaagctaagatggatccacatagtgcggacaactgcaagtgccacaagcagacgcagccggcacagcagacgttaagcgacatggacttcgatcgaggcatttggaatgcaggtaagaaatacagccgtgaatcttatggttattatcgtccttgaccaactctttaattttgtatagctatctataacgaagtggagcgtgtaagagagtttatcaagaagggccagtcgatggctcgcgatgactgcgactatacggctctgcactatgcggcccgcaatgggaacgagcccatctgcaagctgcttctcgacgagggcaaggcagacgtgaatgctgtgaccaaagcaggagccaccgcgctgcatcgtgcagccatgatgggtaacaaccattgcaaatcgcagttatgatcaatcaatactacgagttttaatctgacggcaggccacttggaaatcgtgaagctactggtcgagcacaaggctaatcttctgctgcaggacgagagcggacagaccgctttgcatcgagcagtgatgcggggccacctggaggtgtgtcgcattctgctggcaaaggagccaacacttaagctggtcaaggataaaaaggacaaaattgcatttgagtacatcatggagaacgccaatgatgattttaagctgctgctgaagccctaaagggcttgtcattccccgttcaacatattcgtattcgttacggtttaaatatctttgtttattgagtctgttaacacgttttctataaaattgcacccgatatcgttgtaaaatcctacttagaaattgcatacgtccttatttgtttgcattgtgtgcgagatcgattgtatatgggaaaagtaatcttaacgtttgcgtagtcaaattaacatagtggatacatacatcgtttaaatcttctatatagactatatacacatgcctagtaaacataaaatgtgcaagtaatttagtgaaaactctgtgcccaacaggatgtgcacacggaactcgttttgaaaaatgcgagatttgcgtgaaaattctgttcaaaatttgtaatacatcgtaagaaaattaatatcacattggagtccgtgtatcgaagttgttaattaatctggcgttgaaattgaaattaaggaaactattgcagaaccttcctacacactcgtcgccaatttacaaaaactatacgctacctatcattatagcaaacatataaaacctatataatctgaaaataaaattcctaaagcgcaatcaatcccaagactcagtccatttaacaacaggtatatcgaccggctccatacccctcaccggcggcagttcgtcaaagtcgctgaggtaacgcttcaaggtggcgggtatggcgaactcatccacaatcctccccagcgatgaccgctcctgagtgggaagatacctttcctgcacctccggccgcgtttgcaggcatctcaggagactccgacgaatctccaggcgagcgagagactgcaaggagcgtggctgggtgccaagcaaacacatttcccgctcgaattccagccgcgctggtggccagtccttgggcaggggtcggtgcttgtgcggaaactgaaagccagcgttgcctatggacaataggaaatgaaaataactaccatgtacttcataggaactaagatcagagtaagcaacttacatagcaacctggcaaaggccaatcgtgttggtgtgcaattcgatctgagctcattcaccacatgttcccggcaaatctgcgccagattgcagccctcgtggatgaggaattcggccacctccaggcggtgcaggttgatggccctggacaacggagtgtgacaataaatcaggccacaaacgattgtcggagcacacgagtcatagaaatcattacgagcgctgggcgatttggcaagcaatacacgcagtatgcggctaaactccttaacccaaaaattctgctgcacggcaaacagaaccaagccctcatcgtggacatccgagtagagtccgagcttgcgctgttcctcagccacgttcagcagatactcaagcatttcgtgacgcccccgatggatggccagcatgatgggtgtgaagtttttgagattccatacggacaaactctcgccgtactgcagtagaagctccaccagttccttgacattggactcaacggcgagatgcagcaggtgttg

SEQ ID NO: 12308 - DNA, 2516 bp, DROSOPHILA
ccagccctgacttacattacgaggaataaaagaaaataaattgcacaaattggcgaaaagcgcattattgctaaactaaagcctcgttaatttagcagctgctaaccatttcagagagcagcgctgcgcgacgcccaaaagcgaaataaaaatacgaaaccaaaccaaacaaaatagccaaagcagtagagctgagctagcgctgggaaaacctcttggtcaacaacgtgttacccgatttcggtttcagtcgagagtcagccttcagcagagcgccacagcgagcattagctgcctcacggtttcgtatctcatttggttttcacttacgtttcacggctttcgttggcacgcccgcgctaattaatccgcagatatattcagcagtaatcgggccaaatgccgtacataatcatacgggggaatctagcctcctacagccacaaatatccatggagggtgctcgtctccgggttgaaagctgacgacatcgagcagttgaacaagttctcctgcggcggctacagcgacgagtccaccatcgtctacttagtgcatccttgtcggattttatcggcgctagaaatcctgggatttcgcgtagtggccagctcatcgactgccgtgaagcaggactacaacgagtacatgtggacgatgcgcaaggagttcgacgaaccagaacccttggaagccgagtccgtggtgcgagaaaatctatcgaatattggccgcgaggcagccagtttaggcaactatcacaaggtggattcgcctgaatagacccgcatcccatccagtccaaaacaaacaaaaaaaaaaagagcagcaatcaaccaagaactctactctagttgtataatttagtgtgtgtgtgtgtgaattgtgtgcgtgtttcggtgtgaaaaaagaaaaaaaaaaaattatagtaacctagggaattttgttccataacatacactgagcaaaggaggcgaccaagcgagtcccttcagacgaacgaactatgagtgagggcgcagtcgggctgaaggaacctcagaatctcaatagcgaagttgtttcgactgtcgtgtccgcggcatcggctgcatccttgaacgccgccaccgccaacgtaccggccaatgtggtgaccataccggtgcccattctgcagtcggagggcaactttgcctacgtgaccgtcaagggctcgctgcacgattacacctgcaccatttttggcctgaatcaagcggaagttcaagccctgtccaagcgcttcgagagcggtgttaaggcgtgcgtcaatggtattatggtggcagtgccgcccatggttatgctgaacactctcgcccagctaagctacaaggttgtctgcagttgcggcgaagccgaaatttgttggaccatgcagcgtgagagaatatctcgaaataatcggcaagctaagatggatccacatagtgcggacaactgcaagtgccacaagcagacgcagccggcacagcagacgttaagcgacatggacttcgatcgaggcatttggaatgcagctatctataacgaagtggagcgtgtaagagagtttatcaagaagggccagtcgatggctcgcgatgactgcgactatacggctctgcactatgcggcccgcaatgggaacgagcccatctgcaagctgcttctcgacgagggcaaggcagacgtgaatgctgtgaccaaagcaggagccaccgcgctgcatcgtgcagccatgatgggccacttggaaatcgtgaagctactggtcgagcacaaggctaatcttctgctgcaggacgagagcggacagaccgctttgcatcgagcagtgatgcggggccacctggaggtgtgtcgcattctgctggcaaaggagccaacacttaagctggtcaaggataaaaaggacaaaattgcatttgagtacatcatggagaacgccaatgatgattttaagctgctgctgaagccctaaagggcttgtcattccccgttcaacatattcgtattcgttacggtttaaatatctttgtttattgagtctgttaacacgttttctataaaattgcacccgatatcgttgtaaaatcctacttagaaattgcatacgtccttatttgtttgcattgtgtgcgagatcgattgtatatgggaaaagtaatcttaacgtttgcgtagtcaaattaacatagtggatacatacatcgtttaaatcttctatatagactatatacacatgcctagtaaacataaaatgtgcaagtaatttagtgaaaactctgtgcccaacaggatgtgcacacggaactcgttttgaaaaatgcgagatttgcgtgaaaattctgttcaaaatttgtaatacatcgtaagaaaattaatatcacattggagtccgtgtatcgaagttgttaattaatctggcgttgaaattgaaattaaggaaactattgcagaaccttcctacacactcgtcgccaatttacaaaaactatacgctacctatcatt

SEQ ID NO: 12309 - protein, 181 aa, DROSOPHILA
MDPHSADNCKCHKQTQPAQQTLSDMDFDRGIWNAAIYNEVERVREFIKKGQSMARDDCDYTALHYAARNGNEPICKLLLDEGKADVNAVTKAGATALHRAAMMGHLEIVKLLVEHKANLLLQDESGQTALHRAVMRGHLEVCRILLAKEPTLKLVKDKKDKIAFEYIMENANDDFKLLLKP

SEQ ID NO: 12310 - DNA, 4978 bp, DROSOPHILA
taattagatacaaaaggataggacgttaaggatttcatcatataatcgccaaatttcctaattcatttcctaggcctggccaaacccaataccctgatagccagcgtccatccggcagataagctctccctgcagtcctttcaatccctgggagtggaaacagtgatcaagaatgcacccgttgtgcagcaatcggatgtggtcttcgtgtccgtgaaaccccaagtggttccctcggttttgtcggagattcagccattgagctcgggcaaactattcctttccgtggccatgggcatcactttgtccaccatcgagtccagtttatctccacaagctcgcgtcatccgtgtgatgcccaatctgccggctgtcgtgtgttccggttgttcggttttcgttcgcggatccaaggccacagatgcagatgcggatattacccagaagctgctgcagtccgtgggcacttgtgagccggtggatgagtcccagttggatgtggttactgctctgagcggaagtggaccggcctatgtattcgtgatgattgaggccttggcggatggagccgttcacatgggcatgcccagggatctggcctatcgtttggcatcgcaaacagtcctgggcgcaggtcacatggtgcgggacagtggtatgcatcccggacaactcaaggatggggtcacaagtccggcgggatcgacagcagcggcactcagacaactcgagctgtcaggtaagttgggatgatgacgccgatgacgcactcgcttatcgccgccacttcaacctttgatgtcgattgcaggttttcgggctgcggtgtctggagcggtggaacaggcgactctgcgatgccggcaaatctcgggaaagacgaagtaggcacataggattatcatatacatatacgtacattggggtgggtcaattttgttattaaagttatagtagttaaaggaagtcgttaaattttgttgcttcttgaagaaacatgtttttaatttggaaatgtatgttggtgctatagtgctttcaaagagcaatgatgagatgtttcattttaatcgacccacccttgtgcttaatctgggttagtagctttgcataactataaaaactgtgaaggccgatttcgtgatactaaaatataagcaacactgctatattctttactctcagctttgtttatagtctagctaaaaataactaattcaaagtcgagcctagaacttcttcttctttttggcccgggacagctcattgagctcgccctgttgcacggatgcctcctggtaaatgcgcttaaccttctcgtggcgctccttgtcactgtggatatgaaatacaatagattagaaaggaacggttaaattgtaaatggaacacaaacctttgcagggtctgtttgagcctaagcatctgaacgaaggacgtatctctgcgtatttctcgaatggcacccttcttctcgcgcttgatcttgtgcagcagtttggcccgctcttccttggccttggacatcttgggacgacgtttgtcatcgtaaaccgcctcgaatcgaggttccagcagcctaagagccttgggtttcttttccgccggagccaagggtttcattttctgcgcagctagcttctccgccagttcggtggcatccttgtggtgctgatgcacatgctcggggtaagactccagtggaaggcgggagagtagtgccaaaaagggttgggccaggtagcaggcacccacatgctcttccaccagttggagagcttccttgattagcaggagggaagtgtccagtgctcgaaccttgaaatctggagtgatcgtctgggtgaccaagtcagtaggctgcagctgttggggctccaacttcgtggattccgtgttagctggaagtgctaggagcttgctcaatggaccatcacgctcaaaaggcggcgtgatctccaactgttccacatccctcttcggtatggacatgtgtacaatgccctgcaggaagttgaatacggctggaaccagtctcttggattgggacacaaactccaagactacggtgaccaggaacaaacccatagatatttcctgacgcgttcgcactcgtgatctggacaggacgtgttgtatgaatataaagcaaggagtgaccaccggatggcggaaatcggaagtcgagtacaagttggccactagtttgaagtacaccaaagtgtcaagtgaaggatacattttgtgatttttcctgaactcttcgtacttctccttgatcacctccagtaatgtattggacatgcgctcgggattcagttgcgttaattcatataagtaaggcatgagctttgagagcaactggaaatgttctcgtatgtcctgctcgctggcatcttcaaacaaatccttcagatattgcagcaaaaatgagtacaacttaaccacgttctcgcggttaacaccttccagtttgggatgattacattttataatcctttcgataatgatcgccttctgggccgtagcatgcttggagagcagctccgtaaagtcctcgtaggtcttgggcatcttgatggtaaacggaatactggtgtccaaggaggcgggaattgtatccgcagactttttcgctttctttttgctagccttcggagcttcttctggctctgactcactttcagattccttgagatcgctcagattgtcgacctctgaatcactctcctcatccgagtcctcctcttcctcttcttccccctccttgtcatcgtcatcctcattttcgtctcccttcaacacggcttccttctttccattgagatgtgtgcccagattgccgtccaaatcgtaagcgagcgtatcatctccctcgtcatcttcgccggccaagaaatagccatcatccaggtcatctgcggatcggtgcttgggtttggcaacggaggcctcctcatcctcctcgccatctgctcgcatgcgacgaagccgttcgttctcgagcttctccaatcgagcggcctcctgtttggccagctcgtcgggattgattagtttatccgcgacactgccacgcggctcgaagatcatctccttgagcagtttatcgtaggcatctggcggtggcttggcatcctgctcatccttcgtgaccttggcgaccagcggcagcagaagcttatagttggcatccagtttctctgtgagatcatacacttcgtccttctccttggcgatttcgttctttcttcgtttttgttcaacgatcatctcatcgatggccgcctgtctatcctgggcagagtctccctctccgccaaaatgagcagcagcagtaaaatcggctgaaagaatatgagagttagttgtgcgcttcaaagtacaatcatttgggtataccatctaatgcctcgtcgtctagctcctcgtcgtcggagcgctcgtccctgtactgctcgatctcctccagagtttgtcccctgtgcgtcagtagttcgtcgtcgttgaggttgaacttctccgctttctggttggagcgcacctgggacatcttttcggccaggtagcgggcattcatcacggactcggttagctgatcgccactcaagtgttttccaattcggttatccttgaagcgattggtcttgtgcttcacggcaaactgttgacccaatgtctgcgctcgtttctgcagagccttggcccgcgacacgcccggcattcccctgtcatgcttgcagatcctccccagaatcttgaacttctccttgttcacgtgcacatcgaagggattgccccgcttgctggactgtgccgtcgagttgtcgaagggattggccgacctggttgtctttttggcgtaaaccgcatctgcgctggccttctttcctttggccaccattgttttatatcgcgttctacggataaattaaaccgagttcatttagcaaaacaaaacacctcacacgtgcaacccaataacggactagcgcgtctacgaaatgccgaaatcagtgttggctaatcctgcgaatagtcacgtacaatggtaatgggatcagtttcaatttcaactgtaactacaaattaatcataatttactgtataacaatgtattttttccttgttaatgtaattgtaaatctacaagggcatttaaatattacacaattaaaatctttgttttggtatctacttcgaaaaactattgtatattacgaaacaccggtacatacgctgtatgatctgagtcatttaacacaacaattttaagggtagaccaagaaaacgatgcttcaatttgaaaattttgtaatcgaagcaatcaagttgtacatttttgaatgggtgactgaattagtagttatattgttatcacattctatttataatagctaaaatgttaaatcgataaatattagttttcggggaattccttggaaccttatccgctgaaatgtaacagttaccgctgctcatcactaatagcatgacttttccagcactgaaccacgtcgccattttcgtttcgttccttgccacaaaaattttcacacgcaacgccggatactgaaaaattggtttttaaagcgtgttaggagcttttataactttgcgtggctacagtcagtcagttcttggtgtgaaggtgctggaaaaagcatgagcgccacgccgccggacctactttcgttggcggcgtcccgagaagtctcggccgccgtcgcagtcgccgcctctgccaacggaggcagcggcagaagcgctgataaggagcgttcacgttccagagatcgtgggcgggacaaggataaggatcgggacaaggacaggaagaagaggtgcgtgcgttgcagggagaatgattttgtacccttgcccttttagcttcccctttttacttccttttccggtgtacacatttttcaacaatgtgcttttataaaagcagaacttttattaacgccatagcata

SEQ ID NO: 12311 - DNA, 2748 bp, DROSOPHILA
ggttgcacgtgtgaggtgttttgttttgctaaatgaactcggtttaatttatccgtagaacgcgatataaaacaatggtggccaaaggaaagaaggccagcgcagatgcggtttacgccaaaaagacaaccaggtcggccaatcccttcgacaactcgacggcacagtccagcaagcggggcaatcccttcgatgtgcacgtgaacaaggagaagttcaagattctggggaggatctgcaagcatgacaggggaatgccgggcgtgtcgcgggccaaggctctgcagaaacgagcgcagacattgggtcaacagtttgccgtgaagcacaagaccaatcgcttcaaggataaccgaattggaaaacacttgagtggcgatcagctaaccgagtccgtgatgaatgcccgctacctggccgaaaagatgtcccaggtgcgctccaaccagaaagcggagaagttcaacctcaacgacgacgaactactgacgcacaggggacaaactctggaggagatcgagcagtacagggacgagcgctccgacgacgaggagctagacgacgaggcattagatgccgattttactgctgctgctcattttggcggagagggagactctgcccaggatagacaggcggccatcgatgagatgatcgttgaacaaaaacgaagaaagaacgaaatcgccaaggagaaggacgaagtgtatgatctcacagagaaactggatgccaactataagcttctgctgccgctggtcgccaaggtcacgaaggatgagcaggatgccaagccaccgccagatgcctacgataaactgctcaaggagatgatcttcgagccgcgtggcagtgtcgcggataaactaatcaatcccgacgagctggccaaacaggaggccgctcgattggagaagctcgagaacgaacggcttcgtcgcatgcgagcagatggcgaggaggatgaggaggcctccgttgccaaacccaagcaccgatccgcagatgacctggatgatggctatttcttggccggcgaagatgacgagggagatgatacgctcgcttacgatttggacggcaatctgggcacacatctcaatggaaagaaggaagccgaatctgaaagtgagtcagagccagaagaagctccgaaggctagcaaaaagaaagcgaaaaagtctgcggatacaattcccgcctccttggacaccagtattccgtttaccatcaagatgcccaagacctacgaggactttacggagctgctctccaagcatgctacggcccagaaggcgatcattatcgaaaggattataaaatgtaatcatcccaaactggaaggtgttaaccgcgagaacgtggttaagttgtactcatttttgctgcaatatctgaaggatttgtttgaagatgccagcgagcaggacatacgagaacatttccagttgctctcaaagctcatgccttacttatatgaattaacgcaactgaatcccgagcgcatgtccaatacattactggaggtgatcaaggagaagtacgaagagttcaggaaaaatcacaaaatgtatccttcacttgacactttggtgtacttcaaactagtggccaacttgtactcgacttccgatttccgccatccggtggtcactccttgctttatattcatacaacacgtcctgtccagatcacgagtgcgaacgcgtcaggaaatatctatgggtttgttcctggtcaccgtagtcttggagtttgtgtcccaatccaagagactggttccagccgtattcaacttcctgcagggcattgtacacatgtccataccgaagagggatgtggaacagttggagatcacgccgccttttgagcgtgatggtccattgagcaagctcctagcacttccagctaacacggaatccacgaagttggagccccaacagctgcagcctactgacttggtcacccagacgatcactccagatttcaaggttcgagcactggacacttccctcctgctaatcaaggaagctctccaactggtggaagagcatgtgggtgcctgctacctggcccaaccctttttggcactactctcccgccttccactggagtcttaccccgagcatgtgcatcagcaccacaaggatgccaccgaactggcggagaagctagctgcgcagaaaatgaaacccttggctccggcggaaaagaaacccaaggctcttaggctgctggaacctcgattcgaggcggtttacgatgacaaacgtcgtcccaagatgtccaaggccaaggaagagcgggccaaactgctgcacaagatcaagcgcgagaagaagggtgccattcgagaaatacgcagagatacgtccttcgttcagatgcttaggctcaaacagaccctgcaaagtgacaaggagcgccacgagaaggttaagcgcatttaccaggaggcatccgtgcaacagggcgagctcaatgagctgtcccgggccaaaaagaagaagaagttctaggctcgactttgaattagttatttttagctagactataaacaaagctgagagtaaagaatatagcagtgttgcttatattttagtatcacgaaatcggccttcacagtttttatagttatgcaaagctactaacccagattaagcacaagggtgggtcgattaaaatgaaacatctcatcattgctctttgaaagcactatagcaccaacatacatttccaaattaaaaa

SEQ ID NO: 12312 - protein, 814 aa, DROSOPHILA
MVAKGKKASADAVYAKKTTRSANPFDNSTAQSSKRGNPFDVHVNKEKFKILGRICKHDRGMPGVSRAKALQKRAQTLGQQFAVKHKTNRFKDNRIGKHLSGDQLTESVMNARYLAEKMSQVRSNQKAEKFNLNDDELLTHRGQTLEEIEQYRDERSDDEELDDEALDADFTAAAHFGGEGDSAQDRQAAIDEMIVEQKRRKNEIAKEKDEVYDLTEKLDANYKLLLPLVAKVTKDEQDAKPPPDAYDKLLKEMIFEPRGSVADKLINPDELAKQEAARLEKLENERLRRMRADGEEDEEASVAKPKHRSADDLDDGYFLAGEDDEGDDTLAYDLDGNLGTHLNGKKEAESESESEPEEAPKASKKKAKKSADTIPASLDTSIPFTIKMPKTYEDFTELLSKHATAQKAIIIERIIKCNHPKLEGVNRENVVKLYSFLLQYLKDLFEDASEQDIREHFQLLSKLMPYLYELTQLNPERMSNTLLEVIKEKYEEFRKNHKMYPSLDTLVYFKLVANLYSTSDFRHPVVTPCFIFIQHVLSRSRVRTRQEISMGLFLVTVVLEFVSQSKRLVPAVFNFLQGIVHMSIPKRDVEQLEITPPFERDGPLSKLLALPANTESTKLEPQQLQPTDLVTQTITPDFKVRALDTSLLLIKEALQLVEEHVGACYLAQPFLALLSRLPLESYPEHVHQHHKDATELAEKLAAQKMKPLAPAEKKPKALRLLEPRFEAVYDDKRRPKMSKAKEERAKLLHKIKREKKGAIREIRRDTSFVQMLRLKQTLQSDKERHEKVKRIYQEASVQQGELNELSRAKKKKKF

SEQ ID NO: 12313 - DNA, 4218 bp, DROSOPHILA
acaagcgattccgaaatccccgcccatcggcagcccgcataaaaatactcgatgacaggaccagaaatgtctcggttatggggtctgtgtgtcttggactctttggccatccgggatatcatttaatgttgtgtatcttctggtggttttctccctcagtgcagccgaaattggcttaaactgttgcaagttcataaaacaaacaaccaaatttgaaaagttgcgagtgccagccgcagtcggaaactttgccatgctgcctgaacttgaaatttacgttagttaaattatcaacttcagcgtctggccaaaaaaactttctgtgcaaaacaaagtcgtcgctgcgtccttttattttaaaggagtttgccgcgtctgctgggtaatcggattttcttttcccgaattttctaataattctaaactctcttctctataaatctgttattgttcagcaagtattttattttcctggaaaactattaaaacgactttaaatctataaaatattcctacaaagcgaatatatcgtataaatatatatactggttatagatagttttaaaaaaaaatcatagtattattctgtagtttttacttcaaagacatagattgtttttacttcaaagacatagattgtggtaaccacaattcactgtaaccatcgaacttggtccgcaacgcccacttccaggagtaataagcgtcatgtgtgtaatttcggcttaagatggccaacaatgtaagcggtttaaatgtgtaacattgttgcccagccaggcatcagtttattggatttggccgtacttagctagtgtgaggaaaaattattgccgactgccagcggactttgcttcatacttaagccgcttagccagcgaaaagccaactacaaattacaacttattatacaagttgaatcatccaacatccaagcaatttgtggcgactgaaaatgaagatccatttaataatcaagaaacgcacacatatattggttaatttgtacacgagctcatatgttgccgggcttctttattcatttacaaacatatttctggcattattcacgttgcattaaactaggcgttaatagtaatgaatacataacaaaacaatttttaaatttcacaagtcgagttctgaattgtgtgttcttgtgttttcaaattttgctgccgataattttcagactaagtcagcaatcgtgggaatcgtgggaatggatgccgggggtctagtgcggttgtttttgaatcaagcggggtatgtaaatacttctcaagcggtatacaatccacgaagactattttaaagtaaactagattagatatgcacacgcatacggatgtgtaactatttctttatataaatatagaggctgtgtcggtaattctattcctgattcaggttcttgatcacgtaattaacaatgagggcaaaaattgcaaagcagataatgatcaccaggtttgaatagacggactgccagtttagataggagttccgtgcactattctggaccgccgctcctccgccgctggccaaatccgcctgacccgccgccccgccatcgattgcgtccgctgcattcagtggattggccaagccgcccaccgccagattgccatccgcagatgccaggctcgctccgttggccagtccgttggaacgctttactccattggcagcgggtccgtccacagcagctgccgcctgtgttcctcgcagccgctgcttgatctcttcgactatctccggaaacagctcacagaagttggtgttgcgcaggttaaatgctagtgatttttgagcaaacatttgcttgtcatagttcgatgattcgatggatccgagtgtgggtgtgctctccagctgtgaaggatttaagattggcttactcaaacgtatgatcatgtattcgtaataactcaccatgaagctcagcagtccagtgagaatggtgcctacgcaccaagtcgggttccaagtgtccggatgaaaatctgaaaatcccaatagggttgataagttatatgtttggaacaatagaatctaaacagatctaaacagatacacgaatatctatttgaaaggtcgcaaaaaacatgtttgactaagccacaaagtccatcggcttcgtcaaacataactaaaactattcagcgttcaaagttaatggtagtctttaagcctgtagttactacccattctttaatgttctactactgtgacaaccaatccgctttatttctagctgtggattcggactcctacggatatggaactgacacatacctgatatactcaaacacagtctggtgttggtcttgaagcgaccgttcggcgtcagcatgtagatggatggcggcttgaatgggaactcgcgcggaaagagcagggtgccgtggtagtagccgccgtagtagggcgagtcctccggccccttgacgcagtagtgccactcgaggatgttgttgggcagcggctcggcggttatgtacggcaggggatcccgcttgaggcgcatatagtcctgcttcatgcgcgacacagcagtgggttgcttccggccgccggacgtcgacgacgaggacatggtgttgttttggttttgctaatttttaacgaacttaattactaccgcccaagtttgaaaacctaaactatgatcgaacacgactggcctactggtttttctctcactgtagcagataagatagcgacgtggccctgtggaataatttgcaaatcaattatactcgtatctggtcgcataaataccaatacgtaccgtccttctccagaatttcgaagctgtcgaagattcttgttcggtgtgtttatcatgcgatggatttcagtctcgccagctcggttgtttattgtttgcttttctagtactggcagccaacctcggtaacaagtgcgttttctaattgttgttgctgctgttactgcgtttttgttgatttttttttaaattgcaatgaaattgagtgagaaaacaacgcacatatacaggcgcacacgaccgacacccgcacacacacactcacacacgtgtaggggacaactagggcttgactttggtaaattttggtagtatcacgagcttactccgctacagtggatgcccctaattcgtattaatcacttgtggggttatatatccgggtttggagctggcaatatcttaatttaatcttttattttggcatgaagagtttagtggtaccgtgtgcggaagtaagtttcatctccagtttagtgttaccagagtctatgttggcttcctcaccacgtggtgaaggagggaaactttgctgcatacggtgagaaaattggatggagtggtgtatgtatccgctaattaactgactctcaaatctgtgcaattctttgaaaacagtaaatatagatcttttagttttagccgatttgctggactatcaaatacccgttacttaatgcgagatatgataaaaagaagaaagaactcttttcgaaaattgcttactaggcggtatctactttccaacgtatctagtatacccgggtatgtcccaaaatccctatggcaatattttgtaatatacaaagtaaatactttggttttctaatgtagccctttacaaataagcatgtgtatatcgcctctactgttatcacgctcacattgataacgattgttatctcttaaagtgcggaatgtttttgaaacttggtaagtaaggattgccaaagagtacagctatatagaaatttatagaaatggaatccaaaacacgaaagtggatcaacgcacgattacagggattacagggcatcggcatctcgcattaatttggacttcgtcacgccgattaatgggtgaatgagttgcggatgacagttgttctaaatgataaggaaatacaacggcgggcaaaatattagcaatcgcggcacttgaactgtattttaaactacatattatatataatcaatattatcaatcaatattataattgattgttatataagctgaaatcataataacttcactttaaataatgggttgtaatttatgatctattaaaaatttgtctctatcttaagtggattttaatgactatttttattcaaatataattcgattgtaaaacagcactattaatagtttaatgttttctttatttacaatgtgtgaaaagttcttagtatttattattattt

SEQ ID NO: 12314 - DNA, 1805 bp, DROSOPHILA
ccaaaataaaagattaaattaagatattgccagctccaaacccggatatataaccccacaagtgattaatacgaattaggggcatccactgtagcggagtaagctcgtgatactaccaaaatttaccaaagtcaagccctagttgtcccctacacgtgtgtgagtgtgtgtgtgcgggtgtcggtcgtgtgcgcctgtatatgtgcgttgttttctcactcaatttcattgcaatttaaaaaaaaatcaacaaaaacgcagtaacagcagcaacaacaattagaaaacgcacttgttaccgaggttggctgccagtactagaaaagcaaacaataaacaaccgagctggcgagactgaaatccatcgcatgataaacacaccgaacaagaatcttcgacagcttcgaaattctggagaaggacgggccacgtcgctatcttatctgctacagtgagagaaaaaccagtaggccagtcgtgttcgatcatagtttaggttttcaaacttgggcggtagtaattaagttcgttaaaaattagcaaaaccaaaacaacaccatgtcctcgtcgtcgacgtccggcggccggaagcaacccactgctgtgtcgcgcatgaagcaggactatatgcgcctcaagcgggatcccctgccgtacataaccgccgagccgctgcccaacaacatcctcgagtggcactactgcgtcaaggggccggaggactcgccctactacggcggctactaccacggcaccctgctctttccgcgcgagttcccattcaagccgccatccatctacatgctgacgccgaacggtcgcttcaagaccaacaccagactgtgtttgagtatatcagattttcatccggacacttggaacccgacttggtgcgtaggcaccattctcactggactgctgagcttcatgctggagagcacacccacactcggatccatcgaatcatcgaactatgacaagcaaatgtttgctcaaaaatcactagcatttaacctgcgcaacaccaacttctgtgagctgtttccggagatagtcgaagagatcaagcagcggctgcgaggaacacaggcggcagctgctgtggacggacccgctgccaatggagtaaagcgttccaacggactggccaacggagcgagcctggcatctgcggatggcaatctggcggtgggcggcttggccaatccactgaatgcagcggacgcaatcgatggcggggcggcgggtcaggcggatttggccagcggcggaggagcggcggtccagaatagtgcacggaactcctatctaaactggcagtccgtctattcaaacctggtgatcattatctgctttgcaatttttgccctcattgttaattacgtgatcaagaacctgaatcaggaatagaattaccgacacagcctctatatttatataaagaaatagttacacatccgtatgcgtgtgcatatctaatctagtttactttaaaatagtcttcgtggattgtataccgcttgagaagtatttacataccccgcttgattcaaaaacaaccgcactagacccccggcatccattcccacgattcccacgattgctgacttagtctgaaaattatcggcagcaaaatttgaaaacacaagaacacacaattcagaactcgacttgtgaaatttaaaaattgttttgttatgtattcattactattaacgcctagtttaatgcaacgtgaataatgccagaaatatgtttgtaaatgaataaagaagcccggcaacatatgagctcgtgtacaaatt

SEQ ID NO: 12315 - protein, 283 aa, DROSOPHILA
MSSSSTSGGRKQPTAVSRMKQDYMRLKRDPLPYITAEPLPNNILEWHYCVKGPEDSPYYGGYYHGTLLFPREFPFKPPSIYMLTPNGRFKTNTRLCLSISDFHPDTWNPTWCVGTILTGLLSFMLESTPTLGSIESSNYDKQMFAQKSLAFNLRNTNFCELFPEIVEEIKQRLRGTQAAAAVDGPAANGVKRSNGLANGASLASADGNLAVGGLANPLNAADAIDGGAAGQADLASGGGAAVQNSARNSYLNWQSVYSNLVIIICFAIFALIVNYVIKNLNQE

SEQ ID NO: 12316 - DNA, 2948 bp, DROSOPHILA
gttaacaatgcggctattggcattgtcacgagtttcttcctcaagtacatgaactccattctaaagaccttcgcgagcgctctggagttgctcttcacggcagtcctatgctacttcctcttctccatacccatttacatgaacaccgcgctggccatcgcggttgtatcctacgccatctatctctacacccaaagcccggtggttaatttgggcaaggtgcgtccgctgtccaatttaagtgatgccacgaccaaatcaacggataaacgaaagctgatcgacgaggaagcggcagaatcggacctcgatatggtgtaatgctgtagcttgtcctagacgtaatcttagactgtaaatagttgtggaaaagtgcctgcaaatgttttaaacgccagacgaatgtatttgaccccaggctttgtgcaatgcaatagcaacaggcttgtaaataccaaaacttttgctcctctagtttaagattcttattttaatcagaacataaatgcaatcaaacgaatattgtgcatgcttcttcaagaagctttttattttatggttcatatactatcacatatgtacatggtatatttggatgcctgcttgtcttagcctaaaatggtgtgtccacatcatgtccatcttcctgtttgggcggtatgcgactacgaagcgctatctgcaccgcctggttttcgatgctgcggagatagtagtcacactccttcagatgcttctccatgtcctggactcggtgtgtggcgttgtacttgcaggtctgcagcggcggtccacagtagttcttctcgcacttaattaagtgcttgggcatccggaagagcaagatgcggtgcgatttgtcgtaagggcaaattccgtactcgaaatcggacattttgaaaaagtcaagagccgtttgtcaaaacaacaaattcataaagcttaaggtaccgctatgttttaaagttttagttatcggttgtgttatcggaagtaaggaattttcgatttatttatttttcaaaccagctgtcaagatattgaccttatacggaatacccccgatgaatatagggtcacactgagcagacgcgcgtaaaccaccccgtccctcccttttacttttcattcagcttgaaaatttcatagagttcggtcaattgtcaaatctgctcaaaaccacttaattaccaggtaaacgatggcacgtaccaagcaaacagcccgtaaatcgaccggaggcaaggcgccccgcaagcagctggccaccaaggcggcccgtaaatcggcgccatccaccggcggagtgaagaagccacatcgctaccgtcctggaacggtggccctgcgtgagattcgtcgctaccagaagtccacggagctgctcatccgcaagctgccgttccagcgtctggtgcgcgagatagcccaggacttcaagaccgatctgcgcttccagtcggcggccattggagccctacaggtatggtgtacagcactccctgcaccgtgactatttcatacggtcatgtaataatgcgtctctcccccatttcaaatgcgcaatttgcaggaggccagcgaggcgtacctggtcggtctgttcgaggacaccaatctgtgcgccattcacgccaagcgcgtcaccattatgcccaaggacatccagctggccagacgcatccgtggcgagcgggcctaaatgcccatgaccgccatcttggattggaaaagcagtggcggcaaaactaccaacccacagctgtcgcttggaggggggaactcggagctagaggtggaggtggagaagcggaaaaccaaacccccggccgcagctgccgccgcttagtacttaggtctatctatacttaccgataagtaatcaatacacaatgttctaataaaatcgaattcatttttgtttgtaaatgtttaaccacaaaggaaagcgttcattcatatattttgttcagactgtacattattagttgtgtctcttaaattgtaattgttgtcttgctgtctcggcaacaattgaacattaatttgaatggtttcgtacaaaaatacatatattctattgtatcattttgtaaaatgaggtagaccatgtagtaaatgcattcatttttcgttattctagtacatatgtatatctagcatgtactggaatgaaaagtatctttaaactatgtagatttctgtgtggtggtgagctgctcccctggagccaagcagttgaaggtccggacaaaaacaggcagccttgtcagggaatttatgggtgaaccgccctcgacgaaatcgctgccgaaatacagggtttggccgaaggaactctggccaaatctgaagaagaacaattccctcagagacatggtggtgaagttgggctgcctctggctgaacttggaaccttctgcgaagtaggcttcgtggaccaaatggagcacgacgaggtactggtcgcgttggctaagcaaattatcttgggtccatgcgcttacacactcatcgccggcggtagtaatttggttatcgtcgaacaattggagcatattgaccttatgatgtttgcaattaaaaagatcgaaactttttaacatctcaaggccaaagcgaatgcccaagggtgtcactttgaagatatcgtggctgtcgggatcaaatgaagcatctgccagaaagtcgtatgccacataaatcgtatttccattttcctcatacgcagtttcgaagaagaaattcgaaatgggatatgaatggagcatgtatcgccggtctttgaagttcggttggtccagtaagcttagttcggcacgcgttcggtgctccagaacctttaggtgagcagtcgcaagttcctcgtcgtccgcaaattcaagctccttgtagtatcgggttacgaaacgtcgatggcccgcctttcccggcagattgccgatgct

SEQ ID NO: 12317 - DNA, 858 bp, DROSOPHILA
attttcgatttatttatttttcaaaccagctgtcaagatattgaccttatacggaatacccccgatgaatatagggtcacactgagcagacgcgcgtaaaccaccccgtccctcccttttacttttcattcagcttgaaaatttcatagagttcggtcaattgtcaaatctgctcaaaaccacttaattaccaggtaaacgatggcacgtaccaagcaaacagcccgtaaatcgaccggaggcaaggcgccccgcaagcagctggccaccaaggcggcccgtaaatcggcgccatccaccggcggagtgaagaagccacatcgctaccgtcctggaacggtggccctgcgtgagattcgtcgctaccagaagtccacggagctgctcatccgcaagctgccgttccagcgtctggtgcgcgagatagcccaggacttcaagaccgatctgcgcttccagtcggcggccattggagccctacaggaggccagcgaggcgtacctggtcggtctgttcgaggacaccaatctgtgcgccattcacgccaagcgcgtcaccattatgcccaaggacatccagctggccagacgcatccgtggcgagcgggcctaaatgcccatgaccgccatcttggattggaaaagcagtggcggcaaaactaccaacccacagctgtcgcttggaggggggaactcggagctagaggtggaggtggagaagcggaaaaccaaacccccggccgcagctgccgccgcttagtacttaggtctatctatacttaccgataagtaatcaatacacaatgttctaataaaatcgaattcatttttgtttgtaaatgtttaaccacaaaggaaa

SEQ ID NO: 12318 - protein, 136 aa, DROSOPHILA
MARTKQTARKSTGGKAPRKQLATKAARKSAPSTGGVKKPHRYRPGTVALREIRRYQKSTELLIRKLPFQRLVREIAQDFKTDLRFQSAAIGALQEASEAYLVGLFEDTNLCAIHAKRVTIMPKDIQLARRIRGERA

SEQ ID NO: 12319 - DNA, 2767 bp, DROSOPHILA
ggcaacagaaccgctgaatccacctataccgggcaccttgccaccgctaatcccgccgccacccggcaccagtgccccgcccatgccgccgtggggtggtggcgcttacagtggctggggcggcggctatgcgccgcctccacctccgccctgcgcaccgccgccaccagccttgagcctgtcgcagccgccgccacctccaccgccatccgcttgagcttttggacttcataagatcgatcctgagaacactcagctgctccaacgatagtgctcgaccctgtgagactgtccctgcaatcaattatgaacgtaattttaatcccggaccacatattcgctttcaccataaaagataaccgagtcaaatctacaaaactaatttgtatttacgatgcttcaaataaaggacggataaaacgataaaaccactaaatcggcagttttaatagcaattaagcatagtaattagtatgtgaagctgattctcacaaaagaaatgcttaattcccacatctgtaagatcgatttattaggcataattagttagtgcgatgcctagggtttttgtttttaaattgttatacagaaaattccaatctttatcctctttattttgcgagtcttttggtgtagtgaatgtttagggtgtttaagaaataatcagatgatcctctagccgtgcttgctgaagtacttcttggactcctccacatcgggcttaatggtagccggattcgagttgggattccagttggccgggcagacttctccgtgctgctcgacgaactggaaggctttgatcaggcgcagaacctcgtcgacggatcggcccacgggcaaatcattaatggagtactggcgcaggatgccattggggtcaatgatgaaggtgccgcgcagcgagatgccctccttgtccagcaacacatcgtagtcggcagagatcttcttggtcaaatcggagaggagcgggtacttcagctggcccactccgccgttcttgcggtcgacattgcaccaggtgagatggctgaagtgggagtccacggaaacgcccagaacctcggtgttaatgtcatggaactccttgatcctctcgctaaatgcaacaatttcggtggggcaaacgaatgtgctgcaaatgggatcgcagataaggaaatagttcaatgcaaagttcagtttactcacaaatctagtgggtagaagaagagcaccaggtacttgcccctgtagtcttccagcttaacctcctggaagctgttgtccaccacagccagacccttgaaatcgggagcaggttgctggacgcggactgccgcaaggggagcggctaaaagggattaagaaacatgtttaggctaaatattatacaaaactttgaaattggctttctgcccagatcccaacgaatcgtggaatctatctgtttatagggctttaatgttggggatcttaactcactttgatgcaggaggcgggcggcaatctgtttctgctgactcaggatggccttgcccatcagcggcacctaaaatgcataatatataagattcagcattagaacgcggtttcagccaattacgtaatcgccgcggcatgttttcgaacaactctgggtcgttcgaccaacttacattgcgaatcagtgagcgtgctacgaaagacatcttgttctaatagataacgtttatataaggcttatattaagtcagaatttgacggtaagccggcagaacttttcgtaaaaaaagtgaaaacaaacttgacagcagggtgtaaccagctctgcttaaagctcaaaatacacaggaagctggccacacagtacttgaggttggctatcgataattatgtggcgcgatattcaatttcattttttcaaatattataattcatttcaaataacttgaaaaagtctattaaatacgatcaaagatctattaatattaaaaatgtgatgatcaaaaaaactttaacttcttttctctgtttattagttttacatttaaaagtgttcttttatatatcgctctcttaatccttgcagacgaacatgccttgaagatcagagataagcacgtatcttctgatcacctcttcacatgtgctgctctgattatattagaaaccaccgcctcatatcccttagaagccgcatacccctcagaagtccatcttcttctcctgccgtgtcctttgtgcattgtccacggtggaatgaggccggcgatggataatggaaagtgtagcaaaatatttaccacgtactgcacacgccgcacaatggtaatgagcctcttacccggcgaaccaaccaactatttgcactacatgcgttttgttcgccgctcgttaatccactaaatgcccgaaagcggctcagttgcccaggctttggattctctcccttctcgaggagggtttggttttgtcttttcccggctacaatgcccgatctagatacttttgtatccagctagatgccgccgcgttcggcttggtatgccgaaacaataacgatagatacatgcgtgtcctcaaatatttttgcatatttggtctgaagttggcaaaacatctgacggattccaaaacgcccacacatctcgctccttgtccgttcccatttccatttccattcccgaatccaagcccatatccaccaatggcgctcgactctcttgctttcccgcaattagtcaattcccatgtttgcaatttcgctcgcctcccccatttcgcatcccctgccaggggtggc

SEQ ID NO: 12320 - DNA, 790 bp, DROSOPHILA
tttgttttcactttttttacgaaaagttctgccggcttaccgtcaaattctgacttaatataagccttatataaacgttatctattagaacaagatgtctttcgtagcacgctcactgattcgcaatatgggcaaggccatcctgagtcagcagaaacagattgccgcccgcctcctgcatcaaaccgctccccttgcggcagtccgcgtccagcaacctgctcccgatttcaagggtctggctgtggtggacaacagcttccaggaggttaagctggaagactacaggggcaagtacctggtgctcttcttctacccactagatttcacattcgtttgccccaccgaaattgttgcatttagcgagaggatcaaggagttccatgacattaacaccgaggttctgggcgtttccgtggactcccacttcagccatctcacctggtgcaatgtcgaccgcaagaacggcggagtgggccagctgaagtacccgctcctctccgatttgaccaagaagatctctgccgactacgatgtgttgctggacaaggagggcatctcgctgcgcggcaccttcatcattgaccccaatggcatcctgcgccagtactccattaatgatttgcccgtgggccgatccgtcgacgaggttctgcgcctgatcaaagccttccagttcgtcgagcagcacggagaagtctgcccggccaactggaatcccaactcgaatccggctaccattaagcccgatgtggaggagtccaagaagtacttcagcaagcacggctag

SEQ ID NO: 12321 - protein, 220 aa, DROSOPHILA
MGKAILSQQKQIAARLLHQTAPLAAVRVQQPAPDFKGLAVVDNSFQEVKLEDYRGKYLVLFFYPLDFTFVCPTEIVAFSERIKEFHDINTEVLGVSVDSHFSHLTWCNVDRKNGGVGQLKYPLLSDLTKKISADYDVLLDKEGISLRGTFIIDPNGILRQYSINDLPVGRSVDEVLRLIKAFQFVEQHGEVCPANWNPNSNPATIKPDVEESKKYFSKHG

SEQ ID NO: 12322 - DNA, 2949 bp, DROSOPHILA
gccgcctgctggaagcccagaagaatcgcacccatgtggatccggaggtgacgctgcagttcctcaagagcgctatcttctacttcctcacggacaaggagaactcccagggccatctgcaggccatcgagagcatactcgagttcaccgatgccgagaagcagaagatcagcgccgccaatcgaacgccaaagtgaggtccttgttcgtcgttacccatggcgtatacttattattaacacttagattgcacgccaaaatgagcaaaacgatgtctacgattttggttcgcgctaaattgcattgttttcagctaattggctggcggcattaatttcaattttattttgttaactgaataattttgttaaattttgcaggcgcccgtgttaagttctctctttggcaacgaagtgtataaaattttcccataagttaatttttacgaacatatatattttgtggtctaaggcttaaggcatactagtacgtcctttttatgaaatacgaacatcttgagataaatacaattttacaaaatctacgtagtttttgtagatctagctaatcaagtgagaataacaccatcatgttttgtggagtttcagtggagttttaatggcaaataaatgaaaaatctgagtaaattgttaagtggcgttatttatttgggtgcatacataagcataatagaaattttatttcacaacttgagaaaataaaaattgatttcggactttatgaaaattttcggcatttatgaaaatataaaggagatttcaaaatctcgataaatttgggttcagttcttagctagttgcgcatccaagtttcacaccttgtcgcgtccacattttgaggtatcatgcttgtatcgagcggcggtcacacttttcgctcttttcgatttttcgtttccggcgtgtaagtgtacaattttgttgctccacgtttttttcctattaatttatatttatctcattttcacgtgcacagaatactgctggcgaatctttcccgtgtctaacacaccaacaacaacagcaaaatggtatggctaccttaaaatccatccggaaatgcacactaaccgcataaccctctttttttttattgacaggccaagcgcaccaagaaggttggaatcgttggtaaatatggtacccgttatggtgcctccctgcgtaagatggtcaagaagatggaaatcacccagcacagcaagtacacttgctccttctgcggcaaggtgagttggcgccccaaaatggagcaacccatttagggtggcccaaaaaagggagcgccaaatggtgacaaatcgttggcggaatgttatcagtggacatttctaaagcaactccatgcacccattcaacaagtggaatcttgaattattggcctaaagtcacctagaaatgtccatttatagaattctcttcgaatagaagcattacccaaagtttccatggatagtaacatatcttatctctaatccgcaggactccatgaagcgcgccgttgtgggcatctggtcctgcaagcgctgcaaaaggaccgtcgccggtggcgcctgggtgtactccaccaccgccgccgcctccgtgcgatccgccgtccgtcgtctgcgtgaaaccaaggaacagtaaacataaacggatcattaatgatggaaccatctaattgaatgctccgctatgctagctcccgtagttttaatctgacaacgcgattttcctgtggtttgcgccgtgccggtcatgtgaaaataaaaaaaaatgttttttacttttaacagtatgcgcaagtgatgcttatttaagtggaaaactaagttggaaagttgtgcgaaaacgaatccaaaattccccctttggctagttatatggaaatgatacttctgtgcactcgtgatttatgttctgtgtgcaaagctgagaagttcgatttggcatcctctatagttttggtccagtggtcagctcatatgatggacaccaacttattaatcccctagcaatcctcaaatcagctgtaagaataaaatactggtagtggtggttctcttaaatttgtcatctttttttatttataaaatttaaaaagtctctaaacaaacacaaaaaataatgaactgaaaaatgcataaaaaatgttggcttacaattcagttttgcgttatcattctattatccattcgatttgtattctgagaggttttacaatttgagtaatgggaaacctatatttagctaaatatacaaatcaacaatatgaaacatagaggcagctatgatatagtatagtgtaggccatatctagcggtcacacgacatttgtaattacaagttataggattgttttcgattgttgtgggtcgttgaacctgcctgctttgttggatcgttttcctgtttcattttaaatgttaattaaaaattgcaccgtcaccagttaaaatagttgctattttgccgtatgtgtatatatcgtcgtttctctataactatgggttcgtcacacataatcgattttaaaaataaatttagctaaaaagttttacttggcctgcgtcttatcggtttgctgctttcaatgatcatctgtggaatttcgctcgtagtcaggttatgcatcgtacttttgattaaatacttttcgaaatatttacacaatagcgctgagaagagagtaagttcttcaattttgagcaatacttagtcgagagctattgttgatgttcggcaaaacgttgactaaatctaaatttaatttagaacttaacgttaagcctagaactaaatgcaatttatagtacagttttgcttgctttgcatatgtgtatatcatataggtactacatagatattttatttaaatgtatatttttaatagctacattaatcatatttacattgtttttgtttagttctcgtttgaatgtagctt

SEQ ID NO: 12323 - DNA, 627 bp, DROSOPHILA
ctgctggcgaatctttcccgtgtctaacacaccaacaacaacagcaaaatggccaagcgcaccaagaaggttggaatcgttggtaaatatggtacccgttatggtgcctccctgcgtaagatggtcaagaagatggaaatcacccagcacagcaagtacacttgctccttctgcggcaaggactccatgaagcgcgccgttgtgggcatctggtcctgcaagcgctgcaaaaggaccgtcgccggtggcgcctgggtgtactccaccaccgccgccgcctccgtgcgatccgccgtccgtcgtctgcgtgaaaccaaggaacagtaaacataaacggatcattaatgatggaaccatctaattgaatgctccgctatgctagctcccgtagttttaatctgacaacgcgattttcctgtggtttgcgccgtgccggtcatgtgaaaataaaaaaaaatgttttttacttttaacagtatgcgcaagtgatgcttatttaagtggaaaactaagttggaaagttgtgcgaaaacgaatccaaaattccccctttggctagttatatggaaatgatacttctgtgcactcgtgatttatgttctgtgtgcaaagctgagaagttcgatt

SEQ ID NO: 12324 - protein, 92 aa, DROSOPHILA
MAKRTKKVGIVGKYGTRYGASLRKMVKKMEITQHSKYTCSFCGKDSMKRAVVGIWSCKRCKRTVAGGAWVYSTTAAASVRSAVRRLRETKEQ

SEQ ID NO: 12325 - DNA, 6016 bp, DROSOPHILA
caattgtgtgtatggggcatgtgggcaattatagtctcgatttcttacgaatttttcttttatttgctttaaattaattatcaaataataccccccgacgtgtttccccctgcttatctgacataaaaaaagagaccttgcccgccagaacagaatatacacaaagttgtcacacaaatatgttcaacctttaacaaaagaaaatctttgggaccatttatacacatacatatatatgtatatatatttatatttatatagacgcttggcttggcttttctggatctgtttggttgccggattgtcctgcagatcatgcccaattgacgcgtaaggccgtttaacagtctggcggagaaggaatcgcatttgcataattcaatgcaccgattgtagctgctttcgtccttggctgcctgttttttttttttttgtttctgtaatattttacataaatctgcaatttactcacttgacctcagctgaatttatctgtattgaatgtggtttgctgttattaaccgatacattgactctgctgtttgagaacaagtatcttttattgtttaaatgcaagttgaatttgacttttataacatttactattctgtaaagcaaaaaataccccatcagttattttagattattattaagttattcagaagtcataaaataaaacaatcataaacatttttcatttattgtttgtaacaactatatactctgttgcataaatatctttatattatagctgtcgatctttttaattaaataagaatttaattttataagatctggttcttacaagtacttcatctttaaaccattaatttcgatttttggacatcagaggaaacctgacaaaaataattgctctcgagcccattgaaatatttagtatttcaacgtgacatactcgtttcgcatacttttgggccatatttgggtgtctattaaaacagaaatctctggtagagacttgacagattgttggcccaataatgagctataaatatggtcatctaaatatgtctggaaacgagcgcaagaggaatgcgaagcggctacccacacaaatccatcgacggtttgcttgaaacaccttaaaaataggacaaaagcctatttgagtgtgatgtgggtggagtggggtgggtttttttgtttgggaatggaacggattagagtgggttggcttggatggttgattggttaggtggttggttgttggaggtgttgctccattgacgacccaaatatagattgcctatcaataatcagccaggatacagagcagctttcaacaagttgagtgtttcgctttggctgtcggcccctttttatgcaaagttatgcaaaaacttgagaggtgagcggaaaagcagcggaaaaggggtgaaggctgcgggattgcgggtggagttcacctgcctaataattgcaaaagccagacgctggaaaaagctttcattatgctagcgatgcagcagcaactacaacaagaccacacgctcataaaatattcaagtgcatttgcacttcacttgcaagggttctatgtgcaacaaaaaatgcattaggaaaaagcaagaaagagtaacgctaggtttaagtacccttcgtagaccactccttgcaaactcagcatatgaacaatataacacgtttttccttagtttaaatgaaaaactagcatgggttaagttatatttttgaccaatgtgaatgggactttcttaggacctcgtttattttctaagttcggtggtttcctaaaatatcaagattattttgcttgagaaaagttttatattttagtaactatttaatttcttaaaatgtcctcaattaatacttgattataatttaaatttctaccaagcaaaaatggtgttctaaaacactgaaatagattgctatttatagagagagggttgcattttctgcaaatcaactgggaaactcttggaaaaagggtatgaaggaatgagggacacagaaagaaaatgctcgacatatcctaagctcagttttcacttggctaacggttcaatgaaccgttacgtctagcttagccagcaagaaggacgctctcgcacaagaaccccacccccaccccttctgccgccacccacatcgcccacttgaagcttgttttccctgctaagtgatgtttgactgctgtttccttttgttgccacacaatgcaaatggcggacggaccgcattttcgctatcctctatcgctggctccccatctgcccacccactcatcccttttggccaaggtggccgcacctcaagccagcttaaaggtcaacccgtgaccttctatccatctatctctctatccgactaactatctttctgctcgctgtatctgctacagtgcaacttcgatagtttgcactggaacatttagtaagatttaatttcattaatcaaaaaatatggtgtacttattgagtagtagtagttgaaacacaactttccaactctttgtcatataattcttacacatttatcaagaatttttatgagctagcaaaaaaaaacataataaatatatgtaatttatattgaaataaaatcttgtcacttgtgaaattgggaacttcgatcgtaacaaatggtgcaaaacaactttgttatttttagtagcaaaattagttgaagtgataaagtatgttattaaattaattaaatttataattgctgtttttcaacgctgaagtgggactgtaaagcactgacttgctcacctgctctgcctcctttgtttgtgtttgtatgcaattatagcatttcccatcgattaaacgcatgtttccaccgcctgaaccgcacaccctcccaccctgcctccaccccctgcccctcggcagccaccgtgttgctgccttctagttttgcctttggcttctatttttaaactatttcgcacaaaaaataaaaacacaaaccgcaaaccaaaacacaatgacggccaaacgagaaactataacaaattgtctgcattgcatgtactgcagtattaaccagatatagaaattggaatagatctatatttgtattatgcaaatgtggcaaacaaagcagacaatgtttatgccattatgtgtagcaaaactgacaatctgtaaatagtaatccgtgcaaggcgaaacatccagacgaaaatggaatgaaaatatatatatatatatacgcacgtatgttatgggaaaacattgtgggcggacgagtatttaggggtcctaaatattgcgcgagaagtttttatgaggcggctagaattttgtttaaattaatggaggagtcatcggggaaatgctcggaattgctgtttaaatatatgatgtttgagtagtggaatgtattcggtatttagctatccatattgagatttatgatgtgcttagctacatcacatgctgaaaattagtttgttttatttgaaaaacgtggctgcaattttaaacaaatttgggatttaggttttattgcacatatatacaaattgattatttctatcgtggtttttgggagcgatcattttaagtcccaataatactgacctgaccaccgatccattaaatattttctaagccaatattttcgatatatctaatttgatttgcatttaatttgcagacgatgtggatcgtttaaagccacagaagcgaggattattccattctctgctttgctgctggcgacgaaaccgaacgaaaaccaaccagaatggcacacaaatcgatggatcgacaacaccgccaccattaccggaccaacaaaggtacctactacctcaggttaggcttaccgatatgcacagaaagtgcatggtgatcgatttggatgagaccctagtgcacagtagttttaaggtgagtacatctggttaatgccacccgtattgctcatattcatatttgatcttattttttattttgccagcccataccgaatgctgatttcatagtgcccgtggagatcgatggaaccgtacatcaggtgtacgtcctgaagcgaccgcacgtggacgagtttctgcagaagatgggcgaactatacgagtgcgttctgttcacagcatcactagccaaatacgcagatcccgtcgccgatctgttagacaagtgagttgaaataggaatatataatattgaatttagtcattaaaatacgacttacattcgtgcttgcaggtggaatgtgtttcgtgcaagactgtttagggaatcatgcgtttattacaggggtaattacattaaggatctgaatcgtctggggcgggaccttcagaagattgtcattgtcgacaattcaccggccagttatatctttcatccagacaatgcagtaagtagattaaaaaacagtgcataatataaaaaccccccttctaaacaatttattcctcattaaaggttcctgttaaatcctggtttgacgatgtcaccgactgcgaactgcgcgaactgatcccgctctttgagaagcttagcaaagttgattccgtctactcggtgctctgcaattcgaaccagccgctgaacaatcagacaaaccagcagcagcatccccaggaactgcagcaggcgccgaaccagctgcatcagcagctccaacagcagcaacaacaacagaccatctctgccacgacagttattacccaggcaaccacattgtctgctccgaccatgttgaaccagcagcagacaagtccgcccagcccacaaagcgagttgctgcaaaagacgtaacatcagtgggaactaatgtttataaatatatgataaattgtttacatattacaagaccaagcaagccgataagcaagcaaacaaagcatccctatcccaagcagttcactcagtaccccaggacgaatggtaatgggtcgacgagatgaaatcaactaccaattgctatcaactataatccccagatcgacacctaggcctaagcataagttttatatgatatacataatttttacagaacccaatttacacggcacatttgttatttattcttgttttgctctaaaccaattataataattattatttttttgtgttttttctaaacaactgcttattgcttactgcgttttgcggtaccccaactagggggtatattaaatccaagcataagcctctatttttacccaataatcataactctgtagacgtatttaatggtaaaccaattgagcaagcaaaagatttaaatgcataaaacaaaaatgataactatacatatgaacagagagataaaatcaaattcaaaatagctatatttatatatattttttattaaaaaaacaagaaaacaaaaagaaatatgagtaaatgtggagaagaaaaaatgaaaagaaaagagaaaactaaaaacaatatatataatacgtgtactaaaacaaatttatatatacatacatacatggatatatatatatatatatttaaggcatgtgtctacacatgtttctagcacttaggcatgtataatatttcgtatatttattaaagaattaagtttaagcgcggtctcccactcacgcttgatcgctggcactggcaaatgtcatagttggtatatcgggtttgtcgcataaatggcttcatcgtatcacattctggtttcctgaaatgtctctcagtcgtgagtgggattgggccgcgcttaaagcagccaagttgcattgcaagagggtgaaaatgggctatctgtaagccactttgtaaagcatctaaaagtctgcggcgcgtcccgtagttataatatataaagattcgcttattctgcgcttatcgatggtccaaagtcggcaggttccattcgaccctattctgtacacacattcagtccaatctggtattacgattagcccactgtcctagcgcaaattctaattgccggtctttggaaactcggccaggcgcagtcgtaaaacattgtattaggcttaatgaaaaattatacatctaaatattttaaccgattt

SEQ ID NO: 12326 - DNA, 1124 bp, DROSOPHILA
aatgagctataaatatggtcatctaaatatgtctggaaacgagcgcaagaggaatgcgaagcggctacccacacaaatccatcgacgttgcagacgatgtggatcgtttaaagccacagaagcgaggattattccattctctgctttgctgctggcgacgaaaccgaacgaaaaccaaccagaatggcacacaaatcgatggatcgacaacaccgccaccattaccggaccaacaaagcccataccgaatgctgatttcatagtgcccgtggagatcgatggaaccgtacatcaggtgtacgtcctgaagcgaccgcacgtggacgagtttctgcagaagatgggcgaactatacgagtgcgttctgttcacagcatcactagccaaatacgcagatcccgtcgccgatctgttagacaagtggaatgtgtttcgtgcaagactgtttagggaatcatgcgtttattacaggggtaattacattaaggatctgaatcgtctggggcgggaccttcagaagattgtcattgtcgacaattcaccggccagttatatctttcatccagacaatgcagttcctgttaaatcctggtttgacgatgtcaccgactgcgaactgcgcgaactgatcccgctctttgagaagcttagcaaagttgattccgtctactcggtgctctgcaattcgaaccagccgctgaacaatcagacaaaccagcagcagcatccccaggaactgcagcaggcgccgaaccagctgcatcagcagctccaacagcagcaacaacaacagaccatctctgccacgacagttattacccaggcaaccacattgtctgctccgaccatgttgaaccagcagcagacaagtccgcccagcccacaaagcgagttgctgcaaaagacgtaagcaagccgataagcaagcaaacaaagcatccctatcccaagcagttcactcagtaccccaggacgaatggtaatgggtcgacgagatgaaatcaactaccaattgctatcaactataatccccagatcgacacctaggcctaagcataagttttatatgatatacataatttttacagaacccaatttacacggcacatttgttatttattctt

SEQ ID NO: 12327 - protein, 302 aa, DROSOPHILA
MSYKYGHLNMSGNERKRNAKRLPTQIHRRCRRCGSFKATEARIIPFSALLLATKPNENQPEWHTNRWIDNTATITGPTKPIPNADFIVPVEIDGTVHQVYVLKRPHVDEFLQKMGELYECVLFTASLAKYADPVADLLDKWNVFRARLFRESCVYYRGNYIKDLNRLGRDLQKIVIVDNSPASYIFHPDNAVPVKSWFDDVTDCELRELIPLFEKLSKVDSVYSVLCNSNQPLNNQTNQQQHPQELQQAPNQLHQQLQQQQQQQTISATTVITQATTLSAPTMLNQQQTSPPSPQSELLQKT

SEQ ID NO: 12328 - DNA, 3113 bp, DROSOPHILA
acgcaccgcaagagagcgaaagagatggatggagcgaggggagattcggaaattgaacacgtttgccgcgattccgatttcgattccggcggagggcgtagtaacgtccctaaattgtgggcgacccggtttatttacacgtccgtatgcccgaattacttacatacatatgtgtgtattatggaccgcgcctgctgcactttccactactaccactccaactctctgttgcgtacgcgcggctgtgtgtgcgtgtgtgagtgtgtttatgtgtgcgtatcaagtgcacacgtatgcaactgcttggccgtgtgggtgttttaaatttgattttttatccgcaaaaaattgcaccaaactactcacacttgcactgcacaagcactgttaactctcttttgattaataattaattcatgcgcgacgcgacatatcctcgtatcggagcaaaaaattacgaagaagagagcgttgcgggttgcttaaatagatttttcaggtttttagagtgcccagctgaggtgtgctggaaaataaaagtgcggagggactaatgttatcgatagttgcaataagactgttcaaaaacaatagcttaaaattatttttaatgctgttttttagtggattaattgaattgaatcagttgaattaactattctaaatcctactttaatattattagaaatttttaaaaataaattgtaaatggaagggcaatataaaaaaacaaaaaaaatttattttgatatatattctatatatacataaaattttgggattggtacaaagtagtattttcgaactgcccgcccatttatcaggtttgtgaaattaacggtataattaagcacgatagtcggcgagtaatcggcttgcacaaaacggaatacatttagttatcgattgcatatcaacttcgcgtgcaatgcccctggtcacacctgccataataaaagaaaaacttagaaaaacggcgattaattcagcgctgaaaatcatacgcctcgcgtctatccgcgtcgcaatgtacagtagcagcttgctgccggatccggctgtctatcagccggacaccctggacctgaacacggatggaaaggcggcggattactggttcaactgcttccgcgacatggtggccaagttcgcgaaggtggcggccaagtcacaggaggaggatcacacggccacccagcgggcggagcagttccaggcggcgtatctgcagcggctggaggagcaccagcgtaatgtgccagtcaacaagggcaaggtgattctaggcaccagtgagcttctcaagctaaacgaaaccctgttgcgccgctacggatttacagatccctggctgagacaaaagaggctggaaaatgcatcggctgttgcccgcctgaagcagcgtctgcaggaattggatgccctggcggatgaggacacaaggtggacggagctggtacgcggtgtcctcgccggcaacatgtttgactggggcgcacaggccatatctaacatactggagcaggacagcaatttcggacttcattcagccctggatcgcattgagaagcgaccctggttgcttgacaacctggacagctggttgaatcgcctcaagggcgagccacacaagtgcgccgtggtctttgtggacaacagcggcgtggatgtggttctgggtgtgcttccctttgtccgtggactgctgaaacgtggcaccaaggtgctgctctgcgccaacagtgaacctgctctaaatgatgtgaccagcgaggagctgaaatccttgctggacgactgctcgcgcgagtgtgaggtcctggagcaggcctggtcaaagggacaactactggtctatgcaaatggacagactggtccctgcctggatatgcgcactctccccaaggagctgtgcgacgccatcgccgccaatgagactgacctgcttgtgattgagggcatgggacgcgccctgcacacaaatctgaatgcccgcttcggctgcgagaccctcaagttggccgtgataaaaaacaaatggctggccaagtacctgggcggcgaggatatgttcgccgtcgtctgcaagttcgaaccggctgcgcccagctagtccaggagccactacgttcattgttatcccttgttgacaaacaaacgatatccccggtccttgttcagtttgaaatcattgttaccgccacccaaaacccacaaccccctaaacaatcccatccctcaatctaccgatgagattcatatgtgtataaatgtaatcttaatgcaagtgctttcgtggtcaccccacccatataaccgcaaaaaaacttttaataattaaaaacaagaatatataataacaaagccttttgtttatcatgacggcggtttattatcggtcatggttatatggactgcaattttgataagcaccgaatggtgtggattacgccccgataacgtccaccgttcgcttccaacgggcatttcatcagcacggacggctcacccagcaatttcccaccataaaacttgtctgctgtctgcttgatttacatagagtctgtctattttgtttgcggtctgcggtgcgtgctcattcctacggactgactatctcatttatctctcgattcgtggtcgaaataaaacaacaaagtcatcgtaataactggttgataagcagcagcgaacgaagccgagaccaggaaatgcatgatcttaagctaaattcgaaattaaatcgatcaacagacttaggcataagaaacttgcgaagctattaataaaaaatatgtcattaagatccaaaaataaacaaaagaggaaaattgcctgcaaatatttgccgttcataaaacgaatatagagtagtgggtcagtttgtttgtttccgtttattgataacttttaatcatgtgctcagagttttattaagggcggttaacacgcaaataaactatatttttaagctttaatgtaagatagtaaattaagaaacgtaaaatcattaaaaattacttatcttgcttgatgaatacgaaatatagaaatcaaacaaataagtattttcaatgtgctcaaagtaaaaaaaaaacatcaattaaaggaat

SEQ ID NO: 12329 - DNA, 1113 bp, DROSOPHILA
atacgcctcgcgtctatccgcgtcgcaatgtacagtagcagcttgctgccggatccggctgtctatcagccggacaccctggacctgaacacggatggaaaggcggcggattactggttcaactgcttccgcgacatggtggccaagttcgcgaaggtggcggccaagtcacaggaggaggatcacacggccacccagcgggcggagcagttccaggcggcgtatctgcagcggctggaggagcaccagcgtaatgtgccagtcaacaagggcaaggtgattctaggcaccagtgagcttctcaagctaaacgaaaccctgttgcgccgctacggatttacagatccctggctgagacaaaagaggctggaaaatgcatcggctgttgcccgcctgaagcagcgtctgcaggaattggatgccctggcggatgaggacacaaggtggacggagctggtacgcggtgtcctcgccggcaacatgtttgactggggcgcacaggccatatctaacatactggagcaggacagcaatttcggacttcattcagccctggatcgcattgagaagcgaccctggttgcttgacaacctggacagctggttgaatcgcctcaagggcgagccacacaagtgcgccgtggtctttgtggacaacagcggcgtggatgtggttctgggtgtgcttccctttgtccgtggactgctgaaacgtggcaccaaggtgctgctctgcgccaacagtgaacctgctctaaatgatgtgaccagcgaggagctgaaatccttgctggacgactgctcgcgcgagtgtgaggtcctggagcaggcctggtcaaagggacaactactggtctatgcaaatggacagactggtccctgcctggatatgcgcactctccccaaggagctgtgcgacgccatcgccgccaatgagactgacctgcttgtgattgagggcatgggacgcgccctgcacacaaatctgaatgcccgcttcggctgcgagaccctcaagttggccgtgataaaaaacaaatggctggccaagtacctgggcggcgaggatatgttcgccgtcgtctgcaagttcgaaccggctgcgcccagctag

SEQ ID NO: 12330 - protein, 361 aa, DROSOPHILA
MYSSSLLPDPAVYQPDTLDLNTDGKAADYWFNCFRDMVAKFAKVAAKSQEEDHTATQRAEQFQAAYLQRLEEHQRNVPVNKGKVILGTSELLKLNETLLRRYGFTDPWLRQKRLENASAVARLKQRLQELDALADEDTRWTELVRGVLAGNMFDWGAQAISNILEQDSNFGLHSALDRIEKRPWLLDNLDSWLNRLKGEPHKCAVVFVDNSGVDVVLGVLPFVRGLLKRGTKVLLCANSEPALNDVTSEELKSLLDDCSRECEVLEQAWSKGQLLVYANGQTGPCLDMRTLPKELCDAIAANETDLLVIEGMGRALHTNLNARFGCETLKLAVIKNKWLAKYLGGEDMFAVVCKFEPAAPS

SEQ ID NO: 12331 - DNA, 2834 bp, DROSOPHILA
ttcggcacacacttttctggtcgaaaaagtttgcatctggctggctgggaaatttcaatggcgccacagagcaacacttgacccctgttaggtggcaattgattgattttatattggcatttcaatagacaccagccgagcgaagcgattcgagtcgagccgagtgcgcccccactttagacgcgttccaaatgccaagtgtttcccattcggggggtaggaaaaccaaagcgcactccaccagcaccgcagagaaaaaatagtaaaggaggaaaatgcgaaaagtgtctgtcgatgcggttgcagtgcaattgtcgaaataaacgaaaagaaattccgaactgcaaatggaatgaaaaagagcggcagaaggggtgggccaccaggcggtgaaagagagggacagcgagagcgatagagagagagtgggacacaccctcccaggaggggtagcaaatacgcaagtgtgtgtgtgagtgcggaaaaccatttagcgcaaagaccaaaagaatttgcagggctgccagccaaccacctcagtctcagtttcagttccacgctctccggacacgagaccgggggttaaaaatccagagactgaaacaataaaaacactaaacgatcgctttgccacacacaaacacaagcacacacacacacgcagacacacacaagcactcgcatacatacagagacagaaaggacgaaggactcagaacacagaactcaggactgcgtctgttaacagccgcatttaaattcaaatgcgaaacgttgatcaaacggtgcagacgtgtttctcccaacggtagcgctcggcgttttcccttaacgagtttttcgtggcacgactgaagtgtacaaggtttggaaaattctttattttcctaacaaatatatataaaacaaaaaaaaaaaaacacacacacaagtgcaagttgaagaacaaaagtgctgaattaaacgtttaaactgcaaatctaagcaaaaatctcaagctatgtcttcctccgaggccgaagttgacatcagtgtggtgtccagtccggagccgagtcctttgggcgccgctgcccgcgacagtccgctgctggcccgctcgccggcccgttccgccgacggcagttcgcccccggccacgcctacccatcgctccaatacgcccaacacggccgccggcacgcccacaacgtccgcctcgggcggcaatcacttccatcacagtcccagcggaggcgctgtgccgccggcggtgttgcaccatcatctgcagcaccatctgagcagcctgggcagccatccggtggcgctgcatcacgcgctccacacctttggccacttgcatcccgcccacggggccacacatcccgccctgctgcagcacgcactcacgcccaccggccagcagcagcagcaacagttgcaggtgcagcagcaacaccagcagtcgcatgtcgagcgccttagtccgccaatgaagagtccggagcggaatggcggcgatgaggtgcaaggacacagtctgaacaacaacaacagtaaggccctcaatcacaacaacacttgcgcctcggcggccgcagcggcggcagcagcagcggtggcagcggccaacctgagcaacaacagcaacgacagcaacgggagcagcgggggcggcggcggcaagagcaccaccggctccaacggattcaccagcttctccatctccagcatcctgagtcgcagtgagccggccaagaagaacggcgccgccggacttatcactccgatcccgcagttgccgcaaccaggagccggcggtccacaggatgcggccatgttgtccaggtaattaaaaaacattccagacttgctctagtcaaaaatagccctcccatttcaaatgtgattaatcttgtaaatatgaagtcgccaaatttaaaaatcttagtgtcaacattttacttcaattcattttaacaatttaatctgcaaaaatttagtccatccatctgtcatatataattagttacttctgacgatattcagctattccgcctaattttgatccgcaagatattttaaaaaaatacaaactcgaactaaaatttcattcaaattttaaccctataattactgaaattaaatgagtataatttcatatgcccaaggatttcccattgaatacctttttttgtaataataaaaatcactcgtcttaagtaccatacccatttattgctcagtgtaggcgacccagattaggacgttcgccggcgaactgaaaccaaaaagtcaagccttgcctcaatgagcccaaaacccaaagaggctgccattccacttgttcgccctcgggttgggccaattttgtataatcgtcctaggggaagacaaggcaaggtgacacaaatctcttcgcaggaagtgcacaaagaggagaaatgggatggagacggactgagatggtagccgggagatggtcgataagaccgaaaattgttgggcaaacgttacacgagacattaagtgggtgaagatgcaaatggctaaagtaccatgccattgtgctccgagaatctaacgattccaaattccagatgccagacagataaagcaaatccaatggaaccgtttttagttgcactggacgctagctgacctcgaatatatgcagaaaaggtctaaaccatttttgccctgcaatttggccagactatcgagttacataacatttgttagatgaaatttaatgcaccgcttcgggaatgaatgtaaccgactgtccggctgattgacggactgacaatgctccagtatcgtatgcaaaacgtggtcctttcgaatgaatg

SEQ ID NO: 12332 - DNA, 834 bp, DROSOPHILA
atgtcttcctccgaggccgaagttgacatcagtgtggtgtccagtccggagccgagtcctttgggcgccgctgcccgcgacagtccgctgctggcccgctcgccggcccgttccgccgacggcagttcgcccccggccacgcctacccatcgctccaatacgcccaacacggccgccggcacgcccacaacgtccgcctcgggcggcaatcacttccatcacagtcccagcggaggcgctgtgccgccggcggtgttgcaccatcatctgcagcaccatctgagcagcctgggcagccatccggtggcgctgcatcacgcgctccacacctttggccacttgcatcccgcccacggggccacacatcccgccctgctgcagcacgcactcacgcccaccggccagcagcagcagcaacagttgcaggtgcagcagcaacaccagcagtcgcatgtcgagcgccttagtccgccaatgaagagtccggagcggaatggcggcgatgaggtgcaaggacacagtctgaacaacaacaacagtaaggccctcaatcacaacaacacttgcgcctcggcggccgcagcggcggcagcagcagcggtggcagcggccaacctgagcaacaacagcaacgacagcaacgggagcagcgggggcggcggcggcaagagcaccaccggctccaacggattcaccagcttctccatctccagcatcctgagtcgcagtgagccggccaagaagaacggcgccgccggacttatcactccgatcccgcagttgccgcaaccaggagccggcggtccacaggatgcggccatgttgtccaggtaa

SEQ ID NO: 12333 - protein, 277 aa, DROSOPHILA
MSSSEAEVDISVVSSPEPSPLGAAARDSPLLARSPARSADGSSPPATPTHRSNTPNTAAGTPTTSASGGNHFHHSPSGGAVPPAVLHHHLQHHLSSLGSHPVALHHALHTFGHLHPAHGATHPALLQHALTPTGQQQQQQLQVQQQHQQSHVERLSPPMKSPERNGGDEVQGHSLNNNNSKALNHNNTCASAAAAAAAAAVAAANLSNNSNDSNGSSGGGGGKSTTGSNGFTSFSISSILSRSEPAKKNGAAGLITPIPQLPQPGAGGPQDAAMLSR

SEQ ID NO: 12334 - DNA, 2792 bp, DROSOPHILA
aagcgagacgactgctttaatcgtcatttgcaattaattgcaatttgtaatcgagtatcgagttacggacaaagcgtttgacatgtttcgcagcagagcgagtgtaattgcaactgcaactgcaagtgcaactgcaatttcagggagcgctgtttaagcccgtttaattggcccctttggtattaagagtcgttgcaattgcatttgttcatgtaaattggccttaagttcatcaccttgtgctgccactccgactatccagatatccagctatccagctatccgactttcctcatggctagttgagttttccggtctaatgtttgctggcggcgagctattaagagatttaattttttcttctgctcgaaatccattcaaggcaaattacggcaatttaaacttttcaaatgagatcaaaactaaaagcttcgataaaaagaaaatcggccaagctgactgacagccattttaaatggtaatttaatgcgcagacagagcagggattgctatgctatattataccaccatcagttcgagcataggtataccatatatatacacatacacacattcgtatagatattaaggcacacacatatactcttggcgtctgcgctttaggaacccacagcaatcacgaatgacacaagaaataaaaacgctggggcgacaagtgtgaggttaagtgttgcagcttaaatctctgcacacagatgtacacagatgcacagatacacagatacggggcatcttggagtagtagcaacccttaggaggaaccaccccaaaaccacccggcacaccgccacccacagcgactgacaaatcaactaacacaatttgagccgctctccgccacgctcgctctcttctaacggtcttcctctcacacgcttctcgttctcacactcacggtctttctctctctctctctctctctttacttgcagacagctcctcgacgaacacgaccgagaatccgccatcgcccacttccatgagcccgaacaacaataataacaacagcaacaccactgccagctcgaaccaagccagcaaatcgccctctcaccacccactgcaccccctgtaccatcccctcggctcgcaacagcagcagcaacaacagcagcagcaccaacagcatccacagcagcaacagcatccacagcagcagcagcagcagcatcctcaccagcccaccacgcccaccagcagcagcagcagcggaggcggcagcagtctgacccaccatccgcatccgcatctgaccggctcacatggcggatacttgctgcccagcagttccaacgaatccgacgaggagggcgaggagatcatcgaggaggatgatggtacggacggaccctccgacagctcctcgccacatggtgatggcaactcgaagagaaagaagaaaaccagaactgtattctcgcgcgcccaggtcttccagctggagtccacgttcgatctgaagcgctaccttagctcctcggaacgagcaggtctggccgcctcgctccggctgaccgagacgcaggtgaagatctggttccagaatcgccgcaataagtggaaacgccagctggccgccgaactggaggcggccaatatggccaacatggcgcatgcagcacagagattggtgcgtgtgccggtgctctaccacgatggcacaacggccggatttgtgccaccgccgccgccgcaccaccaccccatgcagtactatgcggcggcacgcaacaccagccccccgagacccccgctctcgtcgctggtatagggagtggggtgcctggcgacggcgcccatgtcgctgctgaagccgcccaattccatggcacatccgccccatccgcagccaccgccgccggcgccgctccacatgcaacaacgctccttcctgggctgcgagcagctgacggagacggacatggactccgattcggagcaggagcgcagccatatgatggacgacgaggatgccgccatcgatgtggaggccgacgaggagcaggagtccgcatcgccagttccatcggccacgccccccaagagcagcctttgcctggaaagcaaggagagtggtggccagcacaaggagctagcgcaaggagctgctccggctgtggacaagtccggcaaccagaaggcctactgagcccaattcagtcaagtggatgcacggagaagaagtccttccaacgttgtatgctttaatttttcacatatggaaaatatacatactgaatacaacgattggggtcatgtaatagaaactgtgtttgagcacgctgaaatgttttgaaaattccacagaattccaatatcctacattccaggattgagaaatttccgtatcagtaacctcattcagatagtgtttctccactccgtgccggaccacatcaattggtttcaagttattatgatagtttgttcctaaaatccactgtaaatacgaacaactcaagctccttgtacatttggatgtctcttgctcaataagtttaggattttagaaataaccccacactatgtgtacataaacataaatatatatatatatatttatatatatatatattctgatcacaagcggattgggtggggcgcttggctcatcgtgtcgtttttgtgtttggcttttgaatctttaaattgctggtcaagtgtaggctaagttcgatatgctaagccgatttggtccctatgggcgatttgggcaattattgttagtctagtgctattcgtaagctgtgtgtcaagcaattaccaaataa

SEQ ID NO: 12335 - DNA, 792 bp, DROSOPHILA
atgagcccgaacaacaataataacaacagcaacaccactgccagctcgaaccaagccagcaaatcgccctctcaccacccactgcaccccctgtaccatcccctcggctcgcaacagcagcagcaacaacagcagcagcaccaacagcatccacagcagcaacagcatccacagcagcagcagcagcagcatcctcaccagcccaccacgcccaccagcagcagcagcagcggaggcggcagcagtctgacccaccatccgcatccgcatctgaccggctcacatggcggatacttgctgcccagcagttccaacgaatccgacgaggagggcgaggagatcatcgaggaggatgatggtacggacggaccctccgacagctcctcgccacatggtgatggcaactcgaagagaaagaagaaaaccagaactgtattctcgcgcgcccaggtcttccagctggagtccacgttcgatctgaagcgctaccttagctcctcggaacgagcaggtctggccgcctcgctccggctgaccgagacgcaggtgaagatctggttccagaatcgccgcaataagtggaaacgccagctggccgccgaactggaggcggccaatatggccaacatggcgcatgcagcacagagattggtgcgtgtgccggtgctctaccacgatggcacaacggccggatttgtgccaccgccgccgccgcaccaccaccccatgcagtactatgcggcggcacgcaacaccagccccccgagacccccgctctcgtcgctggtatag

SEQ ID NO: 12336 - protein, 263 aa, DROSOPHILA
MSPNNNNNNSNTTASSNQASKSPSHHPLHPLYHPLGSQQQQQQQQQHQQHPQQQQHPQQQQQQHPHQPTTPTSSSSSGGGSSLTHHPHPHLTGSHGGYLLPSSSNESDEEGEEIIEEDDGTDGPSDSSSPHGDGNSKRKKKTRTVFSRAQVFQLESTFDLKRYLSSSERAGLAASLRLTETQVKIWFQNRRNKWKRQLAAELEAANMANMAHAAQRLVRVPVLYHDGTTAGFVPPPPPHHHPMQYYAAARNTSPPRPPLSSLV

SEQ ID NO: 12337 - DNA, 7428 bp, DROSOPHILA
accgaaggctagactaaacgagtgatctagatgatctagactgaaagacaggtgcatttaactaagctacttcccttaagttttgttcaactcttccaatattaattttgtcaaaagaaacttacctttttttaaaacagccttttgttgcaactcttatttgttttggcaaatcatttggttattcatgtttcttgtaaatgcaaaactagactgaacttacctaaagcattttgtacgttatatttcaaagttcatacatatatgtatatgtactcttcccattttccgcggacattcaaagattttcgtttacttttcgattttaatttgtatatagtccatatagacgtaagctattcatgtaaatcttacaaccctaggatcggaagtcgatacaaatatatgtatatgcttacttattaaaatagttgtattttcttagtgataaacccgtttgctaatagttgttagagcctaagagaacagcgcaaatatattgtgtatcaaaataaagacaagttcatccaaacaaagaaagagttacgttcttatattattttaccaaaaaactgtaaaatgtgtatattttattatacagaggtggtcaaaagtatttacacaacatgctttcttttcatttgtcaactaaatatgcgtttttggttggcatcaacagttgatataattgttatattatcatttaattatgaatactgagaatcctacctactattcaaggccttttttatgaagttgatagtcttatttcaatatgaccttgaatacatttaaatacctattattttgtgtggtttttttgaacacgtgaatttttagaaaaatacaaataacacttaaagcattttacgttgaatagatagtgattaatatcaatcgttggtcaatgaatagcttgaatactatcataatccaaataaccatgcgcttggaagatacagtccatgtgggattaattcacgaatgccgattcaaagcatcatctatggatggcctgttggtcatctgtctccaacgccgaggacatgaaggagaagtacagtcgaagctcggccagaggaaagtggggtagctcctttcgtacctttgcgaagtcggtgccgtattgctcgaaggccttggtaagacggatgagatcctcggccttccagcgatggtagcgacatcctcgagctgtctcagtcttctccagacgtcgatgtgccaggggcaggtcgtatccgtgacgccgcaggatgaacagcgcctgctcctcctcgatatcatagagactggccgcatagtcaaggtattcgcgaacagccttgtcatcttggtcctgcagttgcggcgaccacaggatcgaggctcgatgttgcagctgctgcaaatcctgttcccgcttccacggcggcacaaaatccggcaaggtggctgcctgttttcgccagtaatgtatgtctcgtttctccttgcgtgccgacatccttcgttcaaaacaaaaagaaaaaaataaataatctacatgaagatagcaccgtgggcaaaaaatccagtgttgtgttttgacgtctagtttcagtgttgactacacttacgaagaaaatatcccatagaatataggaaatataataaatggatcgggtcactgtctaaattctaaaattataaactcattcaaaaaataaacataatattttgttgtatgaattttaatttatctcaaaacctatcggcacagaatttaaattatcacttataacattgggttccttaatttacctacataacccattcctgggtttacctaagatcaaattgacaatacaaactcaaatagtaactgaaacttaactcgtagagaaatttagtttggtttttaaagtgaacttagaaagcaaagtaattgacaaccctaaaatgctgttaatcttcatataggttcgagtccatttcgcagtattccacccctggctcgatgaagtcctctggggtggaactgaactcactgctctcagaatcggagtagctctttgttttcttgtgcgtcaagtacccttcccaaaggaccaaaccaaatgatggtggaggtccatgggaacgctccgaatcgtagatcagccagtgagcatgtttttgaacatagagcgagttgagaagagttggccagtggaagagtagacccaccttggtcaatttgatatgtaggtaataaccgtgttgcttcaccgagtcgatcctcacctctcccagcagatttaggataaatcgttgtggaggtgtcgtctcattaaccttgtattctaatgtatttccatctagaccaagcttatactccaacatctgttgttcaacaacaagttcgatatgggttagtgtctggtgccatttaaccataggatatactgattccctagattttgttgcgcagtttaggtactgtagaaaaagttcctttggaggatcttggggaccaaccactatcgttttatcttgttttaaagaattggtagaggaggatatttcatgatggattgactgagtctcatcttcatgtactatgttttttatgaattcttgtgtattctttttctttgtcggacttttagtgttaagctcgtgaatcaaagtgtttattaaggcagtggaactgtctagtggtgaagcgtcttggacgtgttctatctccacggatttgttaaaatcatttaattcgtcaattttattttgaactttatctgacacgtgctttctttcctccagagtttcattgctattgggtgatgctattattaagggagtttcaaccggattgaggtcttcttcttttcccgaagaacacgtcgcttgtttgttttgcagagaagttattttgctgtcacgattatccaaatcagttgagctacatacaatgttttctttgttggctcttagttcttccatttcttgtttccattgttcatggattgctcggagctctaggatgcttgtgctgtcaattttggcgaatccttgtcggagcagttccttgcgcaaaaacgttttgtagacactcgtcagcattgttgggcactcctctatcaaagctatttccttgacgtaggccacatccagaactccaaaatcgacggttatttgcatgatctcttcgttgatgtcagcaaacctgtcctgcacccattgaatggaatccgttgaccacatcccaccttgtcctgatccagccaatcccgacaaacgaatatccatagccagttgttgcaggtctctaaactgctccggacactccagcagctgactggccttgacctgcagtagctcagttccataatccatcaactgaacagtgacttgaggtctggcaggattgtcaacaatcctaacccggcttaaaagttccttatgttgcacaaagcacacatcgtttattttgcacgggttgtgtacctttcgtggcacaccgaagctcatcttgaagactaatgtcgatggatatgaaggataaggcacatcgatccaaatggttgagtctttggacttatacttcatgggcatgacagccatatgagcggggtcataggctttgaggaacttgcaacgaatcagggtacccggttggaggagaggatttccaatcttcggaagatcagtcttaagaaagtgatggcgcttgttgcactggtttcgattgcaattaccattactcagtttgtatgggcagtagggaagagtgttatccaattgctgctcactgtcgggcatagactgggtggtcaaaccgtgatcctgcaagaacttcatgatacgaggccattccttggcgttattctcatccatcaatatgtaagtaattaaatcttgccctcttccaattggctttgtgaataaattccggatgttgtctgccattgtgtggaatcgcctcgaaaatcttaaccacgattccgggagactaaaatggataagcagctgaatgtttctcactggcaactgtttccggacctggctatcgtcgacaagcatcaaccgattagggctctgaaagagtttggtcgaatttttggattaatattttagccaatatgttctgtattgattttgtacctgattttgtgcttttgaaatatccacacattgaagtccggcttctattaagatcgcacttagttcttccagctccatctgatttttgcagtagatcaatgtgcgctttttcgaaccatcctgttctgccaggatatcgagaagctgccgtgccttcaaagcggaactgcgaagagttacattaaatttgagacctccgtaaagggcggcctctaagaagtccccaaatagtatcaatggcttcgttgtacgatttaaaagcttctgaaatctctcggagtgccattgttgagctacgagaactaactgctttgataggccaccgatgctattaactttctgaaacacttccttcaggagttccgcgttatccagtcgcttgcgatcgtaatcatcgaagattatgaactctaatctagttggatttactaatggcaattcgttggacaatatattgtttaagtgcgccaatgttgtcactaaaacaccgcacgaattgagtagcatcatgtacacatccatcatggaatgagcatgtgtattgaccaccttaagattttgggtattaaaatctttcattaggaattcgcaatgggaagccaacttcttggcgttctctacagaatccactatcagtatggccagtggacccggtgcaatccgagtatcgaggtttgaagttacattttcaaaggagctcaaaactgaagagcaaatcacaggaagatagctccaagagcgacccgttccggagggattgaccagcaccagggatccgcggttcacgagatgcggccaggcgtaaatttgagtgggcaaaggtgtttggaagtttaagtcatccatggcgttcaggatagtattgcccaaaggtaactccttgtaactagtgacaggattcactggctcgggactatgggccagcactagatgcttcaaacaaacacttggcttcctatcacccatgttttctgagcggcatacgtgcatcttttctacacatctttttgttgttgaaacattagaatttggcatctggcttcgatttttttgtacacttctttcggatgggtttttaccaagcatgtcattaaatatttgttccattttatccattgaaaatactactgttcgattattcgactggttagtacaattttcggttaaaggtacggataacgaagtagttaagtgtgctcctgatgatttaaataatgtcatcgatttgcgaacattggagtttgaatttgtagatgaagaggctagatttcttggtccactcaaggttgatgaatcggtattcttttgctgatatgatgaaagcttgacttttgataaacattctgataaattttcagattctaggtattttacctccttttttctattatcttctgattgattggctttatggggtaattctttgctaatttgttttgatctattagccagagcagtttgcatcgaactttcgctgatactttgaaccttgctcaggagttttacggagtttggtataagataggtctcgtggctctgtagcagggcatctagctttttctgttgaattgcagaaggggttggtgtcgattctttagcattctccgacaataagactactagttcaagtattcttcttagacgcggacgtgtatcgatcgccatgtcgttgatctcagccttttcaaagcttatatcctcgtaagggatggccatggttaaggtttccttgcagcgtccttggtcctgctttattagaaagtttgcagcatcctcagtctggcatgatgatctgaacttaagcagcccgaaattccgattcgatttgccacgatgtacgacttgaaatgtgagctgattggcatcctctagctgtttgtccaaggactcaatggcggatcgggaccagacactgccagaatgcggagcaatcaaggccacaccaccctctttaaagtcgcataaactgcgactcaaatggtcaggcagcggccacaaatcccacacagaacagcagaggttaaatccgtaatccaggatccagaccaggtactcctcgttctgccgcctgcgcaccacacccctcacgagcttgggtggactccatcgctggtagcgcacaataactctctcatcctccacgtaaacctgttttgtcctttcactgctgcagtaatccttcaaatcctgctctatttggcgaaccaacattgctgagttctccacatctatgcatctcacatagctgaattggtggggatttacgaaatgcgttatcagaatggattcttcctggtcaggatccagttggtgttccatattttctacgtttgtaatggatgggaattggttttaattataagtttttaaaatgttggaaaaattgattcaaatacattttttttggtaaattgagcagcaaaaattaactgtttaaatatacacacatagttgagtttaaagtccgcctaacttttccctgttcactcatgtggaaatttctgcgcgtcagaaaactttgcccaaagcgagccaaaaatttgtgaagccagccacaggattaaatttgcggattgggattgtgatttagtagggagtgaattagctaatttaagttgtgcaaaagcgaaagcaagtgcggcaattgcgacggcatctgcagctttcaaatgggaaaacaaagcaactggctaagccgcaagtaagaaggtccttgtgcctatttgctgtttgtttgcgctgcactagatgctgctgcagtgcctccaccccacagcctccttgtggtgtggcaagtggtgctccacaaacggcactggagcgtgctgctagttgttgttctatcaacactttaattgcccgagatgttctctaaggcctctaaataagtaaatgctctgcattatttgagttcctttaacatgtgcgcaagtgaatagggtattaattgtctaagcaattggatcgatacgatccaccccaaattatcccttgataaagtgagtggttttcataaaaaaaaatcaaggataatgcaggaaaataatatgataatcggatcacttggaatctactcactcgaatcggaattggatgtagcgccgttgtacatcgcctcagttgaacagctgcaaagatattttaatagtattacgtacaattttatattatgtttacaataatataccaagttaagggtcttcaatccaaaatgcaatccagtccaatattttctgaaagtcaaatcaaatgtaaattagcaaacataattttagttagaaataaatacatattactaaaatcctacgttccaactttcaatat

SEQ ID NO: 12338 - DNA, 4880 bp, DROSOPHILA
aaaatatggaacaccaactggatcctgaccaggaagaatccattctgataacgcatttcgtaaatccccaccaattcagctatgtgagatgcatagatgtggagaactcagcaatgttggttcgccaaatagagcaggatttgaaggattactgcagcagtgaaaggacaaaacaggtttacgtggaggatgagagagttattgtgcgctaccagcgatggagtccacccaagctcgtgaggggtgtggtgcgcaggcggcagaacgaggagtacctggtctggatcctggattacggatttaacctctgctgttctgtgtgggatttgtggccgctgcctgaccatttgagtcgcagtttatgcgactttaaagagggtggtgtggccttgattgctccgcattctggcagtgtctggtcccgatccgccattgagtccttggacaaacagctagaggatgccaatcagctcacatttcaagtcgtacatcgtggcaaatcgaatcggaatttcgggctgcttaagttcagatcatcatgccagactgaggatgctgcaaactttctaataaagcaggaccaaggacgctgcaaggaaaccttaaccatggccatcccttacgaggatataagctttgaaaaggctgagatcaacgacatggcgatcgatacacgtccgcgtctaagaagaatacttgaactagtagtcttattgtcggagaatgctaaagaatcgacaccaaccccttctgcaattcaacagaaaaagctagatgccctgctacagagccacgagacctatcttataccaaactccgtaaaactcctgagcaaggttcaaagtatcagcgaaagttcgatgcaaactgctctggctaatagatcaaaacaaattagcaaagaattaccccataaagccaatcaatcagaagataatagaaaaaaggaggtaaaatacctagaatctgaaaatttatcagaatgtttatcaaaagtcaagctttcatcatatcagcaaaagaataccgattcatcaaccttgagtggaccaagaaatctagcctcttcatctacaaattcaaactccaatgttcgcaaatcgatgacattatttaaatcatcaggagcacacttaactacttcgttatccgtacctttaaccgaaaattgtactaaccagtcgaataatcgaacagtagtattttcaatggataaaatggaacaaatatttaatgacatgcttggtaaaaacccatccgaaagaagtgtacaaaaaaatcgaagccagatgccaaattctaatgtttcaacaacaaaaagatgtgtagaaaagatgcacgtatgccgctcagaaaacatgggtgataggaagccaagtgtttgtttgaagcatctagtgctggcccatagtcccgagccagtgaatcctgtcactagttacaaggagttacctttgggcaatactatcctgaacgccatggatgacttaaacttccaaacacctttgcccactcaaatttacgcctggccgcatctcgtgaaccgcggatccctggtgctggtcaatccctccggaacgggtcgctcttggagctatcttcctgtgatttgctcttcagttttgagctcctttgaaaatgtaacttcaaacctcgatactcggattgcaccgggtccactggccatactgatagtggattctgtagagaacgccaagaagttggcttcccattgcgaattcctaatgaaagattttaatacccaaaatcttaaggtggtcaatacacatgctcattccatgatggatgtgtacatgatgctactcaattcgtgcggtgttttagtgacaacattggcgcacttaaacaatatattgtccaacgaattgccattagtaaatccaactagattagagttcataatcttcgatgattacgatcgcaagcgactggataacgcggaactcctgaaggaagtgtttcagaaagttaatagcatcggtggcctatcaaagcagttagttctcgtagctcaacaatggcactccgagagatttcagaagcttttaaatcgtacaacgaagccattgatactatttggggacttcttagaggccgccctttacggaggtctcaaatttaatgtaactcttcgcagttccgctttgaaggcacggcagcttctcgatatcctggcagaacaggatggttcgaaaaagcgcacattgatctactgcaaaaatcagatggagctggaagaactaagtgcgatcttaatagaagccggacttcaatgtgtggatatttcaaaagcacaaaatcagagccctaatcggttgatgcttgtcgacgatagccaggtccggaaacagttgccagtgagaaacattcagctgcttatccattttagtctcccggaatcgtggttaagattttcgaggcgattccacacaatggcagacaacatccggaatttattcacaaagccaattggaagagggcaagatttaattacttacatattgatggatgagaataacgccaaggaatggcctcgtatcatgaagttcttgcaggatcacggtttgaccacccagtctatgcccgacagtgagcagcaattggataacactcttccctactgcccatacaaactgagtaatggtaattgcaatcgaaaccagtgcaacaagcgccatcactttcttaagactgatcttccgaagattggaaatcctctcctccaaccgggtaccctgattcgttgcaagttcctcaaagcctatgaccccgctcatatggctgtcatgcccatgaagtataagtccaaagactcaaccatttggatcgatgtgccttatccttcatatccatcgacattagtcttcaagatgagcttcggtgtgccacgaaaggtacacaacccgtgcaaaataaacgatgtgtgctttgtgcaacataaggaacttttaagccgggttaggattgttgacaatcctgccagacctcaagtcactgttcagttgatggattatggaactgagctactgcaggtcaaggccagtcagctgctggagtgtccggagcagtttagagacctgcaacaactggctatggatattcgtttgtcgggattggctggatcaggacaaggtgggatgtggtcaacggattccattcaatgggtgcaggacaggtttgctgacatcaacgaagagatcatgcaaataaccgtcgattttggagttctggatgtggcctacgtcaaggaaatagctttgatagaggagtgcccaacaatgctgacgagtgtctacaaaacgtttttgcgcaaggaactgctccgacaaggattcgccaaaattgacagcacaagcatcctagagctccgagcaatccatgaacaatggaaacaagaaatggaagaactaagagccaacaaagaaaacattgtatgtagctcaactgatttggataatcgtgacagcaaaataacttctctgcaaaacaaacaagcgacgtgttcttcgggaaaagaagaagacctcaatccggttgaaactcccttaataatagcatcacccaatagcaatgaaactctggaggaaagaaagcacgtgtcagataaagttcaaaataaaattgacgaattaaatgattttaacaaatccgtggagatagaacacgtccaagacgcttcaccactagacagttccactgccttaataaacactttgattcacgagcttaacactaaaagtccgacaaagaaaaagaatacacaagaattcataaaaaacatagtacatgaagatgagactcagtcaatccatcatgaaatatcctcctctaccaattctttaaaacaagataaaacgatagtggttggtccccaagatcctccaaaggaactttttctacagtacctaaactgcgcaacaaaatctagggaatcagtatatcctatggttaaatggcaccagacactaacccatatcgaacttgttgttgaacaacagatgttggagtataagcttggtctagatggaaatacattagaatacaaggttaatgagacgacacctccacaacgatttatcctaaatctgctgggagaggtgaggatcgactcggtgaagcaacacggttattacctacatatcaaattgaccaaggtgggtctactcttccactggccaactcttctcaactcgctctatgttcaaaaacatgctcactggctgatctacgattcggagcgttcccatggacctccaccatcatttggtttggtcctttgggaagggtacttgacgcacaagaaaacaaagagctactccgattctgagagcagtgagttcagttccaccccagaggacttcatcgagccagggatgtcggcacgcaaggagaaacgagacatacattactggcgaaaacaggcagccaccttgccggattttgtgccgccgtggaagcgggaacaggatttgcagcagctgcaacatcgagcctcgatcctgtggtcgccgcaactgcaggaccaagatgacaaggctgttcgcgaataccttgactatgcggccagtctctatgatatcgaggaggagcaggcgctgttcatcctgcggcgtcacggatacgacctgcccctggcacatcgacgtctggagaagactgagacagctcgaggatgtcgctaccatcgctggaaggccgaggatctcatccgtcttaccaaggccttcgagcaatacggcaccgacttcgcaaaggtacgaaaggagctaccccactttcctctggccgagcttcgactgtacttctccttcatgtcctcggcgttggagacagatgaccaacaggccatccatagatga

SEQ ID NO: 12339 - protein, 1624 aa, DROSOPHILA
MEHQLDPDQEESILITHFVNPHQFSYVRCIDVENSAMLVRQIEQDLKDYCSSERTKQVYVEDERVIVRYQRWSPPKLVRGVVRRRQNEEYLVWILDYGFNLCCSVWDLWPLPDHLSRSLCDFKEGGVALIAPHSGSVWSRSAIESLDKQLEDANQLTFQVVHRGKSNRNFGLLKFRSSCQTEDAANFLIKQDQGRCKETLTMAIPYEDISFEKAEINDMAIDTRPRLRRILELVVLLSENAKESTPTPSAIQQKKLDALLQSHETYLIPNSVKLLSKVQSISESSMQTALANRSKQISKELPHKANQSEDNRKKEVKYLESENLSECLSKVKLSSYQQKNTDSSTLSGPRNLASSSTNSNSNVRKSMTLFKSSGAHLTTSLSVPLTENCTNQSNNRTVVFSMDKMEQIFNDMLGKNPSERSVQKNRSQMPNSNVSTTKRCVEKMHVCRSENMGDRKPSVCLKHLVLAHSPEPVNPVTSYKELPLGNTILNAMDDLNFQTPLPTQIYAWPHLVNRGSLVLVNPSGTGRSWSYLPVICSSVLSSFENVTSNLDTRIAPGPLAILIVDSVENAKKLASHCEFLMKDFNTQNLKVVNTHAHSMMDVYMMLLNSCGVLVTTLAHLNNILSNELPLVNPTRLEFIIFDDYDRKRLDNAELLKEVFQKVNSIGGLSKQLVLVAQQWHSERFQKLLNRTTKPLILFGDFLEAALYGGLKFNVTLRSSALKARQLLDILAEQDGSKKRTLIYCKNQMELEELSAILIEAGLQCVDISKAQNQSPNRLMLVDDSQVRKQLPVRNIQLLIHFSLPESWLRFSRRFHTMADNIRNLFTKPIGRGQDLITYILMDENNAKEWPRIMKFLQDHGLTTQSMPDSEQQLDNTLPYCPYKLSNGNCNRNQCNKRHHFLKTDLPKIGNPLLQPGTLIRCKFLKAYDPAHMAVMPMKYKSKDSTIWIDVPYPSYPSTLVFKMSFGVPRKVHNPCKINDVCFVQHKELLSRVRIVDNPARPQVTVQLMDYGTELLQVKASQLLECPEQFRDLQQLAMDIRLSGLAGSGQGGMWSTDSIQWVQDRFADINEEIMQITVDFGVLDVAYVKEIALIEECPTMLTSVYKTFLRKELLRQGFAKIDSTSILELRAIHEQWKQEMEELRANKENIVCSSTDLDNRDSKITSLQNKQATCSSGKEEDLNPVETPLIIASPNSNETLEERKHVSDKVQNKIDELNDFNKSVEIEHVQDASPLDSSTALINTLIHELNTKSPTKKKNTQEFIKNIVHEDETQSIHHEISSSTNSLKQDKTIVVGPQDPPKELFLQYLNCATKSRESVYPMVKWHQTLTHIELVVEQQMLEYKLGLDGNTLEYKVNETTPPQRFILNLLGEVRIDSVKQHGYYLHIKLTKVGLLFHWPTLLNSLYVQKHAHWLIYDSERSHGPPPSFGLVLWEGYLTHKKTKSYSDSESSEFSSTPEDFIEPGMSARKEKRDIHYWRKQAATLPDFVPPWKREQDLQQLQHRASILWSPQLQDQDDKAVREYLDYAASLYDIEEEQALFILRRHGYDLPLAHRRLEKTETARGCRYHRWKAEDLIRLTKAFEQYGTDFAKVRKELPHFPLAELRLYFSFMSSALETDDQQAIHR

SEQ ID NO: 12340 - DNA, 11270 bp, DROSOPHILA
aaatattaatttcgattccaggaggagcaccttcttctccagccacctgacctcgtgctcctcgcctttgcagttggagtcggagtcgcagtggccgtcgtgcattgttgacttttaatttccttcccaagaaggcggtgggatggcaggaggatgccaacaggtttgggaattgttttccatgaattttccgtttggctgccacgaaaactaaatgtaaattatttgctttgttgtccaccgaactggcggctgtttggcttgaggtatataatatggaatggtaacgacttgcagacgacacgctaatttgttttgatgatgattacggatttttgccctggccgtgattattatttgaaaagtcagcgcgcgaatagagaaagaagctggaaaatcggtgattgccacaccgcatataattacaacttaagggttttcattcgctagtttaagccgctgggatttcgcatcctttaaatgggtaggtatggcatcggtgggtgggtggcatggattgtggactgtgggtgtggaaaactcgtttgtgcttcgattgcccggcgccgtttttcccattttccttatatcatgcaacactctttgttattacttttccgagcaactggggctgtatgtttggttttggttttcgggttgctttgctttcagcttggctttccttcattttacttgtttatttattttggcgtaattaaatttcacgctttggttcccttttctcttgttccctttctcgctttccccttatttcttccagtgtagccttctctcaaaggctttgttttatagggccgcaaaacactgatgtattcaaatgcaccacagctcgctttttcgtggccatttaaatatataattgttagtctgcatttaacattttcttttttttacttctttttacttttccttaggcattggtataaataaaagacgtggctcttacatagatggaatttcacttcttctttcatgctgtttaatttttaattatatatttggtattacttaccaccggcagcattttcatgaatcccagcaaatagatgagcatcacactggacgtggacacacagaactgcatcttgaggaacgtgaccgcgcacttgcgattgcaccagatgggcaccaggatgagcagggcggatccgcactggaggaggcagcaggcgcagctggctatcacgaagatggggcgacggggcgcgttgtggggcgtggcctggaaatgcaattgtcgaaaggcggaaaacaattagcaattcaaacgagcagcgaaacgaaacgaaacgatggccaaagtcggccaaatgctggcgccaaaaaagcgaccgaatactaatccaaacaggattgcagctacaatggtctgaaaagcttcaagtcgaaaatgtagttgctcctagatatattgctttaaattcccaacatcatcacagtacctgtattaatattatttaaatatacaaaatagcttaaaaactacgcagctgaaaaatgccaccgaaatatgaatggaaaatcccccagtttaaggaccaagtattgtccacaaatgaaacccctcggttattcaaaccccgatttaaagtatttccgccatgactgactgaatacagccagcacaatacagaatactgaattcagaagcgggggaccagaaaacccgagtgcatttgcagcaagttcatggcagcaaaggccaagttgttgattgcgagccagggaagcggaaatgcggaaatgcggaaatgctgggtctctgctgactggggaacagcacaaagggtgagccggctgcccaggtggaggccactaaatggcaggtactaaaagtgccataaatcaaagctggggctcttccactttggtacacgtgaatcgcatgaattggacagctggatgccatggcaatccatggatggcaatccatggcatgccgaatggccttggcgaccttggtgaccctggcttacatttggctgacgcttggtgagcatcaccacgtaggttccagacagcgggcagatgcacctggtgatgttcgccatcaggtgcttggtgatgcacagatccgatcgccacgtcgagtcgaaggaggccttgtagtcgtgactgtgcgtaaagtgagagcgattaaataaatagtgcgttattaactgaaaatcaaaaagaaaactcacccacaaaccgccacccaatcgcctttcttcggcacactctcgtgctggaagattatctccacgtgacccgcctcgaagggcaggtcgagtggctcccgaaagttgtcgttggagcgattcgactgaaacagccaggtttggatgatcctggaggctagcacgtagtccgagtcacggggatcgctgtcaaagcaaagataatatatatttattaaaaatacattgctttctattattttacttatatttgcaattcgaaacttcgatatgtttattaaaaccgaaatgaaatgcatacaatctcagctaatcaaatccagcatttttcccatctcttatgggcaataatcaagataagatggcaactgcgttggcatttccatgtaactcgaaacacacttttggccattttagtttttttttttttacttttcctcattgtgctggcagctgcatatttgcattttgtttacagttggggaattacactggtagctgtggtattgttgccagtgttttccagctgcttgtaatacgcttaagccaaggagccatcctgccatcctgccatcatcctgccatcttgttggcacaaccgaaaggactaaggaggctcggagtgacagcagttggcattacacatatttgaggagcaggcaaacatggcttacgaattatacatcggtggccataagccgggctttagccaagacaactctcttggttggaatgcactaaatcggagaattaaacatgtgcagtggcgcatttatctagtgagatcgtttaaactcagcaactttcttaaactttcgcccgacttttacaactaattagcggcaattgaacgaagattctcgccaggattgactcacctgccacgtgtgtagtacgttttgggtaggaaactttttagattcttgtacgagatgaccgaagcgaatatcgttgagttggccattatgtgcagcagacggctggataggccaatgtccatgtacagctggtcggaaaacaaatcctccctgaaaacaaaaggggaaaaatgtggaaaaatgatggtaagtaaattgcatgggccgccgtaaatcaggaaaattgtagccgcctgcacttaaggctattaattagctaaattagacacttgaaagccgtggagcgaagcatgagatggaaatacctgtcctgaaacgacaaggtcgccttgcctcttcgtcctgcactgacttcgtcctggaagtcctgctccacttttatgagccattcttcatgccggcagctcgccagttttatgcattttttatttatgtttgctcataaaataaattttccattaggagcgccactggcagtgggtgggttggcattgggttggaaatcgcttttccttcgtcgcatatattaatcaaggggccgtaaaatgaagttaactgtttactcgggttgcaaatttgcatccaccgctcgtaattagaaattatagccccagtgctgggtgcgtttgaaaatcagacgtgtgtctgatttcatttaaaagctcatttatctgtttttgtttgaacttgcaactcacccgtaaatgcgtaaattaaacggcagcgttttcaccgacgtcatgtaaatgcgcagcgagttgagtctgtccagtgaaagggtgtcctcatcgactgtcaaaatgctggaggctccaccaggaccacctcctgctcctccggctctggttgcctgcagactgcccgctggagcggcggacatctcacctgccgtgactcctgacccgctgccatcatcaccacgggtcgaactgtcacctggcaacggctgactgctcccgctggtcgaggttgccaattgggaggccgcgatggtctcccgattcaacgccgccgactgcgttagctgctgcagctttttaatttgctgaaaggataaataaaaggacaccatcacatcgcaaggcggttaaatgatgacattcatcgattcattggccaattgtttggccatttaaatgccagccagctggcatttagtttacgaagaagaaaaaatgtttaagtctcttatttgaatctagcttatttaattattttaatgggtcccacttaaattgtactcaaataaactccataaatacagccattataaaattattttattgcacatatttgatttaatttttacaatttaaggcttttagtttaaaattctttggttaagacaaatgccatttgatttgccaatcgtttagccttatttaaagcaatataaaagtcattggcttagcacggaaatttaatgtaaattccttcggcaattccaatgggaaaatcaaaatatatttttgagctaaaaataataataacttttgcctcagtccagcataaatatttcaatataaataagatttttctgcacctcaaaagttgtcacatgtttattttctcctcccaaatgatgaggaccatttttgcaagtgctgttgaaattcaatatgaaggataggtaatgcagataatatacccatggcctcccatatgccatgtttacatttactccacacactgccacagaattcgagtcgaacaacagggaggaatcggatggaattgaagtccagcgatgaactttgggcgaaatcaatgccacagagggatgcgatggatggcagtggggatgagagagggagagagagagggggaaggcaggacgaaaccaggacgaagccaggacgaagtcgtcctgccgccggccatgtggcatattttcaggttgccagagcatcgagagcagaaagcgcagtcaatgaacccggccataaaaatcataaattgctacgttctcgagtgcagttacaaaagccataaaccgaggccaataagcaggcggacccaaactataatgttcgattttcacaattggtaatccgaaagccatgttggccattacatcgatgcctcgctctatgcgataggatttttggccatttctaattcatagccggttggtgcacggatttttggctagcagaaatgggcaagaagtttggcattttccatgcacaaatcaaaaatatcatcatacgatttttacataagatacacaagcattctgtgtgtttcgggccaactaatcgaaagcaaaaacaattcgaattggaaaagtttgtataatggtactttttttctgttttttttttttttggagcacaaaacgaaaaacttcagcatcatcagaacattaagctttgccgccataagtaccagtgccacgcccccaaccacgccccatccacgatgcaaagcctattcaaatgtgtggcattcgtatgatttctttaaaagcagctgaaaagaaactctcgaaattgtggcagggagcaaagagatgaaaagcgaaaagaaaagaggaaagcacaaagttttccatgtgcaaatttcacttgactttcgacctagccacgtttagcagtttaccggcaaatcacttggccagcccagcgcccccaagccgtaccaccggaaaaaggggcgtggccgtgtgtgagataaacttttggggcaaaaaagttgtgccgttggacttaggatcacgtttgcagcgaatactttttggctaagtgattcgtcgtgatttgatttgaatggcaagcgcttttggcccactttttagcgtcctgcgatcgaaaacttgcagcctggtcatacagaatgaaaaaaatgagaagaacaaaattgggtcagttcagagttaactttgctggtcaatatagccaacttatgcttagacaaattccaactgcgtgtgtagaagtgttttaatcaacttttcagatgcgtcccctttcgctttgcacttatcccaaaaaaatgagcatgagcacttttccattcgccaaaaactttttcaattgccatttccacagaggaaaaccacaaatggctcgcgatctgtccactgggcgtgaatggatggatattggtttttggcaaatgaaataatgcaatgccatcgtatgaatttccatgcgaaattattattatctatcaacatattgattgaggcttagttaggctggccgcatattaaaatcgatatatgccagtcgacatttttgttcgatgcatttaagtggcattatgccatcgatgcattgcaatgcgttgaactttaactttaaaactcactgtgcagttcgctttgagccgtaaatgtggatggccttggacattgggggcgtattggctgattactttggcggatttcctcggatcgcctcgattcactaattaaacttgattgcgcgcaaaaaaattcgataaacttgccggccggtggtgcggattcggactcagtccattaaactttttgctcagtcaataaaaacgatgcaaaactatttgtgcaacttcgggaaagttcttcgaatgggcgaatgccaacgctttttaatcgacccaattatgctgccaagtttttcagactgcgtcagctaataaaaatttaacataaattgttctttcgtgtttcggccagcgactttcgggctcacatggtgcattccattgaaatgccatagctcaggcgaactcttgcgaaactaaattaatttatgcgcattaaaaagttcgttcatccaactctgaggtaactatgagcatagcggatataccttgttagcggcaggagcaagttctgcgatcttaaaggttgaatatttaggatttaagccaatggagctgctggctaatagattatgctggcggtgtccaaagaggcagtcttccaattatcctcacgtcgtgacaggtcgtcccggttcgaggaagtgccatattcaaacagttgcaatcaacactctcataaatttgcataccaaaaaagccagcctcatcctgcccgtgtccttttccttcgcttttatgccgcacgccaagtacgcaaaatttgcccacggaataatgcatgagcagtggagtgacttcgcccccctcccacaaaaaacaagtcccctttcgaaatcctcagttgagccggaaacaatggaaaccacaatctcgagtggagatgtacacaagcatactaccacggagaaataaaaaggatacccatttttcagcgccatttggaggctcgagattggccaaaagtgtctgcctttttgccaggtgataaggaagtggttatccttattgtcctgcggagggtcgcgggtaaattgtttgattgcgcctcattagcggcaccttttgaggtccttctctattagctgttctgcgaaatagagcgtagatacacaaagaacatttgaaagcggaacaaaaagagatcagatgttctcgtatttcagaaatctatagtacacggtagaaaattcttgcaatattcagaaattactaaaaagaacggctcttttttttatgtgctaaaaaagatttaaattacgcagacgtgatattaaaacgccgaaatattttcatagccatccaattatcactgcagtaaaatcggcacgtctaggacgaagctatccgatcaggatatcacataattcagctcacacaggacatggggtaaagccacagacaaaccagaaaaatgcacaagctcatgcatttcgaaaaaggtattcattaccaggccggctggctcatcaattctccggctgctttggaaatccgtacacggtttggggaacgggtagacaaatgtccgtatgcaaattgctggagcccagtgacaggccaactacaagctaaataaaagctggaatgtgcccaccttttggcccagttcgatgtattcgatgtattcggtgtgctcgatgtttcgggcgtaataaataaacggccaggatgggtaggaaacccgtgctggcaaatattgaatatggctgcaggatataaattatggcgctctgccttttcagtacacggtagtatggagtatggagtacactgggcataatttatgcgggattgcacggagagcatcccagcatcccggcatcctagcaaactggcacttacctgttgactgttcaaggattgggcattctgcatgactttatccaggatgcgcaatataatctccgcggccatctcgcgctccagttgtgtgcctttcaattgcaggtaggtgtcgagctgtgaagtggccaaggaaacagagttgagacaacataatacaagtggcaaggattccgaacccctcgcctcttaagggccaccatggatggaggaagctcctcctcaaagcaattcgttagtcggaaaatttgtgtgcgcattaaaatgaaaaattgttgctaggagaccccaaaaaaaaagaaataaagaaaaataaaagaaaagaggcaaaggagacggctggaacttttctttgactgcagttgggcaaccgaaaattgtgtgaaaaatggcaagccgcccggctcagcagatttttgcattcatttgtgtgtaaaaatagtttctgccccatcttctcaagtggtcggcagccagggatccaaggagccaggtggagcttaaatgtattaagggttttgcggacggagcagacggaccgtataaatgcccccgcaaaaacggagttcccaatcggaaactgagtgtctgcggcaacaggaaattttcgggcaatgggaattgcaattccgattttgattaggccaatttaaccaaatatgtcacaattcgggaatgccattccctattgccattaccctgatggcctttacactttaatctgggatgagtacgatatcagttttagcctgattggcaatcatcagttgggtacatacatttgattgatgtacaagtttaagtctttaagcggaattaataatggaaactttaatatccttgatatcctttctataccaactggatccttacctcatgcagcatatcgatgaggaagctggcctcgcccggcaggaaactatgccttctctgcagtgtgaattcgaagcaggccttcagaatgttggaggagttcgtctgttggaatcccgcactcagtgcaaggaaacggttgtagatgagcagcagttcatccctgacgcagccggagaaatccggtagtagccaggtggaattgcccgtatccctctgttcgcatatgcgtttgagatgtccctcgaatccccgcgggcaatcggtgattataggcgagccgggtgcactggttggccaatggacgccataagtggactccgccgggcagacgtggacggcattccgttcgatgacattgatgtaaacgctgcgggatacgggacgcacactgttggagaccaggcaggcgtactccgctgacttctgaatattgttgatcttcaggatgctgccgtcgggatagaggtcctcccacatggcggtggccgcgtccgactggaaaagcacgccatttcgggtccagctgtagcccagttgggcataccgtttgatgtcatcgttaccgggtgacagacatctcacccgcagggagtcacctcgctgcagggtcacactcgccggatccacccgcagacggggcggggacttgatgtggatgtgcagggagcggcactgctctacgccccagtcggttacctggtggaggaggaggcggtggaggaggagaacataaggtggtggttagtcgagctcatttaacaaagtcccgtcaaagggaaaggccacaaggagcgcctgtcagcggcataccataatgccatcggttttggttactcatatcaacagaaagacacagtcgtggtcaggaaaacaatgacaagccatagccacgactgtaagtggaaataatatctacagtagctttagttacttatttagttactctctactgcttataattgaattgatttatatattactagtgaaatacatatgtatactttaaactattattacagccgctattgtaattggattgaaagccatgtgctcgatggccgagaaccaactggccacacatcagcagccttgccgaagagcatgatggcacacatcctgctggatgaacagagggggcatggccatgtccttttcacgcatgtcggcatggacaagggaagcagttgtggccagctactgtttctcgaactgggacggctgtcagccgtcgccgggacttccaaggatttgtttaatagacttatttgctagtcagcaggacctcattgtatgctgattggatatgacgagtcctgatttgcttgagtttgccattcggctttgtggaaatgtgatatgtgctgctgggcagtcataatcaaacggccaatggacaacgggtctcgtatattagtttatgaaatgtaatttaaaggcttaacagaccgaacggaatgcaaatcatatttgttgttgcaaaatagggcattgagatggggattagtatttgctcagggaactcgaacggtaagtcagacgatgtccagtcagctagcactctgccagcttccaaggactcttgaagctccacacgagccaaagtatttacgagcacttgcttggccaagatggctacttaaggccttagtaggattgtgtgggttcgaggcaacattctgcatttatttatttatttccacgcggatggctagcaaacgaattgtaaacttgctttgttgcttgatgctgccgttgttgcacattcctcccttgggaaagcatcgagtgctacactcggcaaaaaatgttttaatatatacttgcattcaagaaatacccctatggataaatagttctatatacttgctactttaagttccaaataaaatgaaataaattgatctattttaacataagttaagttattcttccagcaaggatattagcattattactttgtgcccccttacatagttatttcaagtgggagaacctagacgtcgccacgcgtcaacgatgatgatgatgatgatgggcagatgctcagcccacttccgtttcaaatttaaaaaaaaaaaagaaaaagaaaaatgtgaataaaacgatacagctaacgaggaggcggcatcattgtcaccgaggtgaaggtatcgcgcactgg

SEQ ID NO: 12341 - DNA, 1926 bp, DROSOPHILA
atgcgtgaaaaggacatggccatgccccctctgttcatccagcaggatgtaaccgactggggcgtagagcagtgccgctccctgcacatccacatcaagtccccgccccgtctgcgggtggatccggcgagtgtgaccctgcagcgaggtgactccctgcgggtgagatgtctgtcacccggtaacgatgacatcaaacggtatgcccaactgggctacagctggacccgaaatggcgtgcttttccagtcggacgcggccaccgccatgtgggaggacctctatcccgacggcagcatcctgaagatcaacaatattcagaagtcagcggagtacgcctgcctggtctccaacagtgtgcgtcccgtatcccgcagcgtttacatcaatgtcatcgaacggaatgccgtccacgtctgcccggcggagtccacttatggcgtccattggccaaccagtgcacccggctcgcctataatcaccgattgcccgcggggattcgagggacatctcaaacgcatatgcgaacagagggatacgggcaattccacctggctactaccggatttctccggctgcgtcagggatgaactgctgctcatctacaaccgtttccttgcactgagtgcgggattccaacagacgaactcctccaacattctgaaggcctgcttcgaattcacactgcagagaaggcatagtttcctgccgggcgaggccagcttcctcatcgatatgctgcatgagctcgacacctacctgcaattgaaaggcacacaactggagcgcgagatggccgcggagattatattgcgcatcctggataaagtcatgcagaatgcccaatccttgaacagtcaacagcaaattaaaaagctgcagcagctaacgcagtcggcggcgttgaatcgggagaccatcgcggcctcccaattggcaacctcgaccagcgggagcagtcagccgttgccaggtgacagttcgacccgtggtgatgatggcagcgggtcaggagtcacggcaggtgagatgtccgccgctccagcgggcagtctgcaggcaaccagagccggaggagcaggaggtggtcctggtggagcctccagcattttgacagtcgatgaggacaccctttcactggacagactcaactcgctgcgcatttacatgacgtcggtgaaaacgctgccgtttaatttacgcatttacggggaggatttgttttccgaccagctgtacatggacattggcctatccagccgtctgctgcacataatggccaactcaacgatattcgcttcggtcatctcgtacaagaatctaaaaagtttcctacccaaaacgtactacacacgtggcagcgatccccgtgactcggactacgtgctagcctccaggatcatccaaacctggctgtttcagtcgaatcgctccaacgacaactttcgggagccactcgacctgcccttcgaggcgggtcacgtggagataatcttccagcacgagagtgtgccgaagaaaggcgattgggtggcggtttgtggtcacgactacaaggcctccttcgactcgacgtggcgatcggatctgtgcatcaccaagcacctgatggcgaacatcaccaggtgcatctgcccgctgtctggaacctacgtggtgatgctcaccaagcgtcagccaaatgccacgccccacaacgcgccccgtcgccccatcttcgtgatagccagctgcgcctgctgcctcctccagtgcggatccgccctgctcatcctggtgcccatctggtgcaatcgcaagtgcgcggtcacgttcctcaagatgcagttctgtgtgtccacgtccagtgtgatgctcatctatttgctgggattcatgaaaatgctgccggtggtaagtaataccaaatatataattaaaaattaa

SEQ ID NO: 12342 - protein, 552 aa, DROSOPHILA
MWEDLYPDGSILKINNIQKSAEYACLVSNSVRPVSRSVYINVIERNAVHVCPAESTYGVHWPTSAPGSPIITDCPRGFEGHLKRICEQRDTGNSTWLLPDFSGCVRDELLLIYNRFLALSAGFQQTNSSNILKACFEFTLQRRHSFLPGEASFLIDMLHELDTYLQLKGTQLEREMAAEIILRILDKVMQNAQSLNSQQQIKKLQQLTQSAALNRETIAASQLATSTSGSSQPLPGDSSTRGDDGSGSGVTAGEMSAAPAGSLQATRAGGAGGGPGGASSILTVDEDTLSLDRLNSLRIYMTSVKTLPFNLRIYGEDLFSDQLYMDIGLSSRLLHIMANSTIFASVISYKNLKSFLPKTYYTRGSDPRDSDYVLASRIIQTWLFQSNRSNDNFREPLDLPFEAGHVEIIFQHESVPKKGDWVAVCGHDYKASFDSTWRSDLCITKHLMANITRCICPLSGTYVVMLTKRQPNATPHNAPRRPIFVIASCACCLLQCGSALLILVPIWCNRKCAVTFLKMQFCVSTSSVMLIYLLGFMKMLPVVSNTKYIIKN

SEQ ID NO: 12343 - DNA, 7080 bp, DROSOPHILA
accaccactccataccctacaatacaccatatccatatactatgccatatccatacctataccgctctgatccttaagatcaaagccgccggccgcccgcacgctcaatcctcctcctccaccaaaaggaaaaggtccgagatgcagtcacttgccgcctaacggtcgatcgatgggctcgtaatgtgcgtgcaagatggattttcgggcaccgtgggtgtggcttattttaaagcaattaggcccatagtgaagaagcgtgtctgctgatgtctctgatgtacgaggacacttttcactattgtccgtgccggcctttcatctcgcccgctaacagatcatttgagtccggccatttcgggccattaaactgattagttgcggccaatgggggacgcttggaaattactcaaatctgtgattgatactttacggtggcaattatacatgctgtttaggcagcaaggattttaattaccaaacgcggctctagttttctgatggatgaaatgattttcgttaaactaaggtaagcttagacacccatcccaataatattataaaataaaactgaaagtcaactcaatcttattttcacagaaaaaatttaagttagttatcatcaaaatcggaacgttatttataagagggctgtctgttaaatgttgaatatagttaaatagagttgttataaatccttgcagaattgtttatgaaaacaaataggagcatatttttgtagtcaaaattacgattaagtagcttaagtagtttactaaactaaagtagttttactcgtgtatctacattagctgtaaagtaaaatatcgtgtagaaactacaaatgttagaaaccgttatattggtaacattcaatcgctacatttttgcggcaactcttcgcactttttccactgtgcggcatagagtgaccagagttcagcaactgcacttgaaatttcctgcgtaacgtcacactgttaatctatcgcaccgcatgagatctatcgcttgcgcgactacggtcacattcttcggtggttgtaaaaattccgtgagtgtttagcagcgactccgattttaaacgtgaattacccaacgaaagagtgcagtataccgtggaaagcgaagtccacccgcccagcgaccttgcggagtggtaaaatgtcttgtgcggccaccctctcgtcggccaaggactccaccaatgcaaatgccagtggtggtggtggtggtggtggaggaggaggagcaccgacaaacagcaataccaacactaacaccaacacacagtccacagctgtgggtgtggtagtgagcagtgcagcaggcacaggtgttggtgttggtgggggaggaggtgggggtggttcccttcccggtggcaccacctcctcgtcctccgcctcagccgccggtggcgttgcagcgggcggcggcggcaattcggcagcggccctcgtccgaagattctccatggagggcgtgggtgccagggtgatccgcggaccggactggaaatggaacaaacaggtgggcagggtgaagggggtgtcccagctggttttgctttaacttccagtgaaaaaagaactctccccgttctcaattgaccgatcaattaatttaattgcacacctcaactcgattcttgacatctggccaaactagtcaagtttctcttttcgcattactaaccagaatcccaatggggacacatgtgatcctagaaagtgggtataaagtcctacttcggtgcactgagaaaatccagttcatagatttaaatatttatcgttgttacattgatagcattgcaatttaagtgagatcaaagtgcacgaccaaaaagtatttcaatttactcaaaaatgatagcgtatgtatattttgagcatgttcagttaacactttaaattattcgtgtactcaattcttcttttcccaagcttacatttacatttaatatgtgtaacctttggctggctaattatgtcttaacaaatggcttgtgagtcatatctcatacatacatcataactctgatgcaagctttgaaagtctgtttgctttagcccggaaaaacgatttgaaagtgcagaaagatacaaaaaaggcaagattaaagtatagacatttccgcacacaatttctttaactgattcgatgaagatttaccagcatgatgaaatatccaagcccataatcagtggcattatttgactaatcataatgcagataaaaatttaagtggatttacaatatgctgcagcatttcaacattcaagtattaacagtattagttgtttagcaaaatattagttcaaataagttataaaatgttaaaccgaaattttttcaatgagctgcttgcaatcgctgaacaaatagaaccctattacatagaaatggaggttaagcaaaccctcattccctttatttatatttatttattttacgactcgttgatcgcatttagagatagccaaacgaatttgtagcgactacctaccttaacacttagttagttgctattatgcacttcggctatagctttcgcatcctaatcagcgtgggttacgaaatggaaaatcgaaagatggactgagtcactacaaatataatattttttcgtttcgattctcttcaggacggcggcgaaggacacgtgggcaccgttcgcaatttcgaatccgccgaggaggtggtcgtggtctgggacaatggaacagctgccaactatcgctgcgccggagcctatgatctgcgcatcctggacagtgcacccactggagtaaagcacgagggcaccatgtgcgacacttgccgccagcaaccgatctttggcatccgctggaagtgtgccgagtgcattaattacgatttgtgctccatctgctaccacggagataaacatcatctgaggcaccgtttctacaggatcaccacgccgggaggtgaacgaaccatgctggaaccgcgtcgtaagtccaagaaagtgctcgccagaggcatctttccgggagctcgtgtcgttcgcggcgtggattggcagtgggaggatcaggacggaggcgttggtcggcgtggcaaggtcaacgagatccaggactggtcttcggcctcgccaagatcggcagcctacgtgatttgggacaatggctccaagaatctgtaccgcgttggatttgagggcatggcagatcttaaggtcgttaacgatgccaagggtagtaatgtttaccgggatcatctgccactattgggcgaaaacggacccggaaaaggaccgcatggctttcagattggcgacaaggttacagtggatctagatctagaaatcgttcagtctctgcagcatggacatggcggctggaccgatggcatgttcgagtgcctaagcaacgcaggaatggtcgtgggcatcgatgaggatcacgacattgtggtggcctacaattccggcaatcgctggactttcaatccagctgtccttacaaaagtatcctcgccaaccactgctccgcccgagtttcaggtgggcgacattgtcaagatctgttccgatgtggagagcatcaagattttgcagcgaggacacggcgagtgggctgacgccatgcaattgactctgggaaagatcggccgcgtgcaacaggtctatcatgataacgaccttaaagtggaggtgggcaatacttcgtggacctacaatccgctggccgtttgcaaggtggcttcttcaactgcctccgatgggagctgcgctccagttatcccgagtagtgaacgtctttcggccattctcaaaaaactgttcgaaccaaatgtctccggcgatgccactgaggaatttgtcaaggcagcagccaatggatttgcagtaagtacaagaaaatacgtttagcacttgatatcaaataaattgaaccgcatttccaggcacgttgtgaggagtacttggctggcgcagctcaaccctcgacctccagtgcctcgcccagttctggaccggatgtcaatgtgaatggtgtgtttgccggacatactgctctgcaagcagccagccagaatggccatattgaggtgatacaggtactactccggcacgccgtcgacgtagaaattgaggacaaggacggagatcgcgctgtccaccatgccgcctttggtgatgaggcggcggtgattgagatattggccaaagccggggcagacttaaatgcgcgcaataagcgcaggcagacgtctctgcacattgctgtcaataagggccatttgaacgtagtgaagacgcttctaacgctaggttgccatcctagtttgcaagattccgagggcgatacacccctacacgatgccatatctaaggagcacgacgagatgctgtccctgttgctggacttcggggccgacatcacgctaaacaacaataatggattcaatgcattgcatcatgctgctctcaagggtaatcctagtgccatgaagatcctgctgaccaagacgaaccgtccttggattgtggaagagaagaaggatgatggctacacagctctgcacttggcagcacttaacaaccacgttgaaattgctgagctactagtgcatatgggtaaggccaatatggataggcaaaatgtgaatctccagacggctttgcatcttgcggtggagcgtcagcatgtgcaaatcgtcaagctgctggtgcaggatggggcagatcttaacatacccgacaaagacggggatactccgctgcatgaagcgttgcgacatcacactctgtcgcagctgaagcaactgcaagatgtggaaggatttggtaagctcttgatgggcctgagaaatgctaataacaagaaggcctctgcttcgattgcatgcttcttggctgccaatggagctgatttgaccttaaagaatcgcaagcagcagaccccactggacctgtgcccagatcccaatctctgcaagaccctggtcaagtgctacaacgaaaggaagaccgacgactctgagttgcccggaaatgtagctggaacgagttcgagtgccagggcaagagcagccagtggtagcttaaatcagtcctcctcagtcaatatgccgctttccagcctagctgcctcatccactttcccagctgcctcatcatcttccatatttgccctcaacggcatcgccaacgaaatgagccagtccctgcacgaggatcctccgaaatcgtcagccagtcttgatgagtgtttggtttgctcggatgccaagcgggatacggtctttaagccctgtggccatgtcagttgctgcgagacctgcgctccgagggtgaagaaatgcctcatctgtcgggagaccgtctcctcgcgcgaaaagatcgacgagtgtctggtgtgctcggatcgcagggcagccgtcttcttccgcccctgtggccatatggtcgcatgtgagcactgcagtgctttgatgaaaaagtgcgtcctgtgtcgcacgcaaatcgatgagatattatcgttcagcctttgctgcggaggtagtggacgaccggagaaggtgtccgtggcagctggagcgatggcaacagtgggcttgccactgcccgacgatcgtttcatggaagctgcagcagcggcagcttgtgccaatgcctccggccatagcgtggccatgaacaacaccgtggttactccagtggcgggcagcagcaatcagttgaatagccagaataatctcctggccgctgcagcagcctcttcgaatgtctcgaatctgtcagcagctggaaacgcgatggtggctccttccaatgtcaacaacttccagatggatgatgtccaaaagttgaagcagcagttgcaggacatcaaggaacaggtgagctcaaataagattgaaaatatgttcagtgactgatcctcaaatttatcttatagactatgtgtcctgtctgctttgaccgcataaagaacatggtcttcctatgtggccacggcacgtgccagatgtgtggcgaccagattgaggggtgtcccatttgccgcaagaccgtggaaaaacgcatcctgctcttctgaagcccgttcccggttcacacattccgcgcacagtctgcacagccttcgaagtattaggatatttaaaggactcacattcttatacacacatatatacacacacaatatcatatatataactatatatcggattggtcttataaagcaaaaatatatttttaacaaatattcaaacaaaaacattaagcagaaatacttttgcttggctccttgctaatcagatccctcagaatgtccttcttggcctggaaatagtcacggaaccagaaaatgtgatccttcttctcctgggcagtcaagtagggattcttggacaagccgacgcagacgagctccatgaaatggcgaataggccccttgctaggacaccaatcctcgagatgttgttccagaaaaatgtgttccgagaagtccacgttatgctcgtcctcccaatcctgctcattgttgatgggaaagcgccacaccttcttttgatccgtccacaggaccatttgctcgaagtagtttgccgggggatgggaagcttgtaaactaagctcccgctcactcagctgtgaccaggttgaaaggatgtcgttggaaatcggcagctgggtatccttgaagatacccaacggttccccgccgtacaaattgacactgcccgtaaaggattcagcctctcgtttggtttgcctctgtgaccgctgataagccccatctcgattctgtggcttgaatctggaagccagcgagcggcgaacgtactcgccgcgggtctgctccacctgctgcggctgctgacgacgatcgatcttcatgcccacgataatatcactgttgtgtaaggaaaataaattttattagattatccattaatgcgagaaaatcatttttacacacctcagattgagttccttatcaccagaaggagatcccgaaacatccgccgtctgattttctccggtcgctgctgaagaggactcgcttccatggccaaggagtttggccaatagct

SEQ ID NO: 12344 - DNA, 3809 bp, DROSOPHILA
agatctatcgcttgcgcgactacggtcacattcttcggtggttgtaaaaattccgtgagtgtttagcagcgactccgattttaaacgtgaattacccaacgaaagagtgcagtataccgtggaaagcgaagtccacccgcccagcgaccttgcggagtggtaaaatgtcttgtgcggccaccctctcgtcggccaaggactccaccaatgcaaatgccagtggtggtggtggtggtggtggaggaggaggagcaccgacaaacagcaataccaacactaacaccaacacacagtccacagctgtgggtgtggtagtgagcagtgcagcaggcacaggtgttggtgttggtgggggaggaggtgggggtggttcccttcccggtggcaccacctcctcgtcctccgcctcagccgccggtggcgttgcagcgggcggcggcggcaattcggcagcggccctcgtccgaagattctccatggagggcgtgggtgccagggtgatccgcggaccggactggaaatggaacaaacaggtgggcagggacggcggcgaaggacacgtgggcaccgttcgcaatttcgaatccgccgaggaggtggtcgtggtctgggacaatggaacagctgccaactatcgctgcgccggagcctatgatctgcgcatcctggacagtgcacccactggagtaaagcacgagggcaccatgtgcgacacttgccgccagcaaccgatctttggcatccgctggaagtgtgccgagtgcattaattacgatttgtgctccatctgctaccacggagataaacatcatctgaggcaccgtttctacaggatcaccacgccgggaggtgaacgaaccatgctggaaccgcgtcgtaagtccaagaaagtgctcgccagaggcatctttccgggagctcgtgtcgttcgcggcgtggattggcagtgggaggatcaggacggaggcgttggtcggcgtggcaaggtcaacgagatccaggactggtcttcggcctcgccaagatcggcagcctacgtgatttgggacaatggctccaagaatctgtaccgcgttggatttgagggcatggcagatcttaaggtcgttaacgatgccaagggtagtaatgtttaccgggatcatctgccactattgggcgaaaacggacccggaaaaggaccgcatggctttcagattggcgacaaggttacagtggatctagatctagaaatcgttcagtctctgcagcatggacatggcggctggaccgatggcatgttcgagtgcctaagcaacgcaggaatggtcgtgggcatcgatgaggatcacgacattgtggtggcctacaattccggcaatcgctggactttcaatccagctgtccttacaaaagtatcctcgccaaccactgctccgcccgagtttcaggtgggcgacattgtcaagatctgttccgatgtggagagcatcaagattttgcagcgaggacacggcgagtgggctgacgccatgcaattgactctgggaaagatcggccgcgtgcaacaggtctatcatgataacgaccttaaagtggaggtgggcaatacttcgtggacctacaatccgctggccgtttgcaaggtggcttcttcaactgcctccgatgggagctgcgctccagttatcccgagtagtgaacgtctttcggccattctcaaaaaactgttcgaaccaaatgtctccggcgatgccactgaggaatttgtcaaggcagcagccaatggatttgcagcacgttgtgaggagtacttggctggcgcagctcaaccctcgacctccagtgcctcgcccagttctggaccggatgtcaatgtgaatggtgtgtttgccggacatactgctctgcaagcagccagccagaatggccatattgaggtgatacaggtactactccggcacgccgtcgacgtagaaattgaggacaaggacggagatcgcgctgtccaccatgccgcctttggtgatgaggcggcggtgattgagatattggccaaagccggggcagacttaaatgcgcgcaataagcgcaggcagacgtctctgcacattgctgtcaataagggccatttgaacgtagtgaagacgcttctaacgctaggttgccatcctagtttgcaagattccgagggcgatacacccctacacgatgccatatctaaggagcacgacgagatgctgtccctgttgctggacttcggggccgacatcacgctaaacaacaataatggattcaatgcattgcatcatgctgctctcaagggtaatcctagtgccatgaagatcctgctgaccaagacgaaccgtccttggattgtggaagagaagaaggatgatggctacacagctctgcacttggcagcacttaacaaccacgttgaaattgctgagctactagtgcatatgggtaaggccaatatggataggcaaaatgtgaatctccagacggctttgcatcttgcggtggagcgtcagcatgtgcaaatcgtcaagctgctggtgcaggatggggcagatcttaacatacccgacaaagacggggatactccgctgcatgaagcgttgcgacatcacactctgtcgcagctgaagcaactgcaagatgtggaaggatttggtaagctcttgatgggcctgagaaatgctaataacaagaaggcctctgcttcgattgcatgcttcttggctgccaatggagctgatttgaccttaaagaatcgcaagcagcagaccccactggacctgtgcccagatcccaatctctgcaagaccctggtcaagtgctacaacgaaaggaagaccgacgactctgagttgcccggaaatgtagctggaacgagttcgagtgccagggcaagagcagccagtggtagcttaaatcagtcctcctcagtcaatatgccgctttccagcctagctgcctcatccactttcccagctgcctcatcatcttccatatttgccctcaacggcatcgccaacgaaatgagccagtccctgcacgaggatcctccgaaatcgtcagccagtcttgatgagtgtttggtttgctcggatgccaagcgggatacggtctttaagccctgtggccatgtcagttgctgcgagacctgcgctccgagggtgaagaaatgcctcatctgtcgggagaccgtctcctcgcgcgaaaagatcgacgagtgtctggtgtgctcggatcgcagggcagccgtcttcttccgcccctgtggccatatggtcgcatgtgagcactgcagtgctttgatgaaaaacctttgctgcggaggtagtggacgaccggagaaggtgtccgtggcagctggagcgatggcaacagtgggcttgccactgcccgacgatcgtttcatggaagctgcagcagcggcagcttgtgccaatgcctccggccatagcgtggccatgaacaacaccgtggttactccagtggcgggcagcagcaatcagttgaatagccagaataatctcctggccgctgcagcagcctcttcgaatgtctcgaatctgtcagcagctggaaacgcgatggtggctccttccaatgtcaacaacttccagatggatgatgtccaaaagttgaagcagcagttgcaggacatcaaggaacagactatgtgtcctgtctgctttgaccgcataaagaacatggtcttcctatgtggccacggcacgtgccagatgtgtggcgaccagattgaggggtgtcccatttgccgcaagaccgtggaaaaacgcatcctgctcttctga

SEQ ID NO: 12345 - protein, 1214 aa, DROSOPHILA
MSCAATLSSAKDSTNANASGGGGGGGGGGAPTNSNTNTNTNTQSTAVGVVVSSAAGTGVGVGGGGGGGGSLPGGTTSSSSASAAGGVAAGGGGNSAAALVRRFSMEGVGARVIRGPDWKWNKQVGRDGGEGHVGTVRNFESAEEVVVVWDNGTAANYRCAGAYDLRILDSAPTGVKHEGTMCDTCRQQPIFGIRWKCAECINYDLCSICYHGDKHHLRHRFYRITTPGGERTMLEPRRKSKKVLARGIFPGARVVRGVDWQWEDQDGGVGRRGKVNEIQDWSSASPRSAAYVIWDNGSKNLYRVGFEGMADLKVVNDAKGSNVYRDHLPLLGENGPGKGPHGFQIGDKVTVDLDLEIVQSLQHGHGGWTDGMFECLSNAGMVVGIDEDHDIVVAYNSGNRWTFNPAVLTKVSSPTTAPPEFQVGDIVKICSDVESIKILQRGHGEWADAMQLTLGKIGRVQQVYHDNDLKVEVGNTSWTYNPLAVCKVASSTASDGSCAPVIPSSERLSAILKKLFEPNVSGDATEEFVKAAANGFAARCEEYLAGAAQPSTSSASPSSGPDVNVNGVFAGHTALQAASQNGHIEVIQVLLRHAVDVEIEDKDGDRAVHHAAFGDEAAVIEILAKAGADLNARNKRRQTSLHIAVNKGHLNVVKTLLTLGCHPSLQDSEGDTPLHDAISKEHDEMLSLLLDFGADITLNNNNGFNALHHAALKGNPSAMKILLTKTNRPWIVEEKKDDGYTALHLAALNNHVEIAELLVHMGKANMDRQNVNLQTALHLAVERQHVQIVKLLVQDGADLNIPDKDGDTPLHEALRHHTLSQLKQLQDVEGFGKLLMGLRNANNKKASASIACFLAANGADLTLKNRKQQTPLDLCPDPNLCKTLVKCYNERKTDDSELPGNVAGTSSSARARAASGSLNQSSSVNMPLSSLAASSTFPAASSSSIFALNGIANEMSQSLHEDPPKSSASLDECLVCSDAKRDTVFKPCGHVSCCETCAPRVKKCLICRETVSSREKIDECLVCSDRRAAVFFRPCGHMVACEHCSALMKNLCCGGSGRPEKVSVAAGAMATVGLPLPDDRFMEAAAAAACANASGHSVAMNNTVVTPVAGSSNQLNSQNNLLAAAAASSNVSNLSAAGNAMVAPSNVNNFQMDDVQKLKQQLQDIKEQTMCPVCFDRIKNMVFLCGHGTCQMCGDQIEGCPICRKTVEKRILLF

SEQ ID NO: 12346 - DNA, 9889 bp, DROSOPHILA
gtcctcaaggagtcctaaaggaggcgactagggtgttgcgcagtgcgttacgaatagtagatatgtataggtgaccagacatttggtctaactaggtatcacataagtacaggcttaattacgaataaattaatttttttcaaaacaaaacaatcgagtcaattcattcaacagccaagagcttttcaacacattctaaattaactacagacgttatcgatttgtctgaaacgcctccgtggggaattgataagcaagtataaaacacaaaagtcatcgataataaaaacccgatcaaatgactataacttttttacgcaaagactagtaattatttctgggtatttctggccattaaaaagcaatttgaaaaatttataacaattttggacattcaataagtcgtataaaaatatacaaaactgaacaaagccattacttaagtttgttagtttttgtacaatgattactgaatattaaagcatacaaatttgatatatttaaaatgtagcacctcgtaaaattaattgatacttattagcgtttttcacgagtatttatgactgttttgattatagcactataacaacttgcattttttcgtactttcaaatacttagtcgtcccagacgaagccataattcaaaaatttactgctcctaatgatgaaactaataataggaatttgattaacaaaaaagtaatgttatcctgctttattttgataagcgttacgctactgaataattaaaatgttaccgaggggattttttacactatagagtaccatcttcaaaactctcgtagactaattgttttacagcccaatcatacttcacatttgacttgtcccagtgcactctgggccaataaccgtggctttgccacgttttatcgagaattgcgcaacaatctttatggcgatcgatgttgaggattagatatggccaagtccataaaaatgccgtgttcaagcggcggccgctcaataacaaagtgtcttttaccgagcagccaacatggcacggtggctgcttaactcgttttcgctgatcctgctcctggcagtgtgcagcctacaggcgcgcctgatccttcccttatccctggacgatggacagctggagaccaagggagcagccctctttgccacctcccgcgtggatgataatagtgccggcaattaccgactgccaaatacaacggaaccggagtcctacaacgtggaactctggaccaatgtccataatggcgataccgaattcaatggcaccgtcaatatcgatatccgggttttgaacgagacatcgaatattacgcttcactatcgccagacgtcgaattttgaagcgacgattatcagccgggatgtggccacgcccacggcaattccactcactgtaacccccgagttgcagcgcgaattcctcgtccttacgcagaccaccgctggtgaggcatttggagccaacaccaactggaccatcaccatcaactacactggcatccaccgatctgatatgggcggtttctatatctccagttatacggacgatgatggcgaacagcagtaagttgatattttacgaagactatacaaaataataccattattttattatgagcttgcacagcctttacccttttacctttatagaaaattatacttaggttagccttctaatggatgagggaataaattgcaaaagtacaaaagcttatcgtgctattaattacaattgtacctgattgagtacttgcggctagtttcatttcttatcaagagacacaatttggcttatctttataatctgttattagtacgatgatacgcgcttaccaaataaagattaattatcggtttaactgagtcgttaatgtatataacaatttctttcagcttcttggccaccacgcaattcgagagcacaaacgcccgtcacgcgtttccctgttacgatgagcctgcccgtagagctaactttacgattaccatccaccatgatccctcctacactgccatcagcaatatgccagtaaacaccgctgccaccaggtatgatttacgaatatatatacaagcatagaggaaacattactcattcgcagtgttgacaatgctagatacaattgcaatcgatacttttcatgtaagaaatgctaacatactgacggtttcgccttccagctcgggagtcactgctttccagacgacgccaaagatgtccacctacctggtggccttcatcgtctccgattttgagtccaccaccggagaactgaatggcatccgccagcgggttttctcgcgcaagggaaagcaggatcagcaggaatgggccctttggtccggattgcttgtggagtccagtctggctagctactttggggttcccttcgccctgcccaagctagatcaagctggaataccggacttctctgccggtgccatggagaactggggtctggccacctatcgtgagcagtacatgtggtggaacaagcagaactccacgatcaacctgaagacgaacattgccaatattattggacacgagtacgcgcacatgtggttcggcgatttggtatctatcaaatggtggacctatctgtggctcaaggagggctttgctactctcttctcgtacgaatcgaacgacattgctttcccactgtgggacacctatcagatcttccacgtgaacgactacaacagcgctctgcttaacgacgccctggcctcggccgttcccatgacgcactacgttcagacaccatcggagatctccaacaggtataacaccttctcgtacgccaagcccgccagtgttctgtacatgttcaagaacgcttggacggacaaggtattccgcactggattgaacaaatacctgaccaagaagtgagtaccaagccattacttaaatgacctaatatatgaacttctaatgtatagagtatagaattttgattaatcaaaagatctaaaatatttcaagaacttaaaaagctaactttatgatatactcgtatatactgggcttaagagccctcattttaatttgaacagtaatctcacattggaattattttgtttcgctcagccaatatacatcttgcgacgaatgggatctatttgcgtccttccaggaatcggccgacgagctgggctttacgctgcccgccagtgtggacgacatcttcagtagctggtcccaccaggctggttatcccctgctcacagtgacccgtaattacaatgccggcactataacgatcacccagaagcgttatgtggcgaacaaaactgatacaaatagcgcaacttggtatgtgccacttaactttgccactgccaacaagtacgattatcgtgacacgagcgccacacattacttgctaaatgtgacggagaccgtgatctcagatgtcgaggcttccagcgatgactggataatcgtgaatatccagaactccggctattaccgcaccctgtacgatacgcagaactatggtctaattacggcagctctgaagtctcagccctggaggttccatcctcgtaacagggcacaactgctgtacgatacgtacatctttgtcagcaccgatcgcctgagccacagcatcctgctggagctgctgggttacctgactaatgagcagcagtatgctccttggtccactgccaacactattctgaccgtctacgatcgttacttgcgtggcgatgattcttactacaacttccaagatttcgtgaagcgcctgatcgatcccatcttcgataaaatcggtgtaaacgagattcccggcgagcattatctgaacaactatctgcgcatcgtgctggtcagcttggcctgccaggtgggatccgatgattgctataaccagtcggccaataaattatccgagtacctatacaatggcacagccattgaggccactctaaagactcaagcctactgtgctggtctccgatcgactaccaatgaaatctatagcagagtgcagtccgatttgctcagttcctcagattccaccgatcgcagcctgttcatctcctcgttgggctgctctggaagtacgagccagctgcttgatttcttgagactatccctggacaccaacaatagcttgagctactcggagcgcacttcccttctaaactcggcctattcccgcagtgaaatcggtcttaccgctagtttggaattcctggagagcaactgggaggcatatgccaacctttcagactctgcaaagcccctggatgctgccctgcgtggcattgccacctatgtggtcagtgagaagcaaaagacgagggtacgttttttttttttaatttataattcaaagcagacttttaatttactatttattaattatatgacagcttaacgctttggtggatgttgtggaggctgatggaccgagttatatcaatgatgatctgagcaccaccattgactccagaatcacatccaacttcgcttggttggaagttaatcgtgatccagtgctcaactggatcgaggattccttaaaagagaacggcagtccctctctgacctcatccatcaccacgatcctggtcagtgcgatggctctgttgctattcaggctatattaagataactcacgtggtcaagtattaaacataaattcagtaaagtgacgtaaatcaacaataaagattgtgtgctcatcatagatcgaaaatagaactgattatactgtggaattttcgggctgaatggagtcccctggtgagaaaagttcaaagttccgcggttgggaaacttaactgatcggtttatagcttggttgacacacatttgcattggtcaatctaatcgcgattctaggaatggcatcgataaagcactgatagttgagcttagtacgaaattcgattatcaagtggatatttacaatggcctgaatggtttatgaagttcacgtgatcatatcagattgtgattggcaactttcaagaacaataagccattttatggttttcagtttcttaatcaatttcaatggttttaccatttattagaagatgtctagctgttgcatagtatcgcacatattgcttagtaattccgtatggattaatgggccttttcttatctcaagagcgaacttgaacagtctattataccataatagttaacaggcgtgtatatttcgctatcatatcagcacatatgataagtacacgagaacttcagtttcaattattattgttcaagatcttgtttcgtatagaaattattgctgttttcataattagataatatgctgtcattccttttcattaattatagtaatagtgttaaataatttttagaggtgagagaaacaattcttttataatcagctaaacaatcagatcaaggtcagtgcacttgagatttttatcagggcgtctatcttgaaatgcccacacttattcgacattatcttagacgtgattgttactaaccctgcagaaaatacaaattcatcaaaggctagtaccatacttgatttactacccaatggagtttataccacagttcttggctggtaacggtcattctgggtaacaagattggggtaatctttatgtctgctcccagataagatggactgcctcgcttaaaagtggctccccgaactttggcagtttagtctttccgcgtttttcgccatgagttgcgttcaggtcgggggcatgtcagtattcttggtccttttgctggccatttccgccacccaggcggctgtggttcgccaatatccgatccttgatcacctgcaacatctggagaatcccatgcagcgattggtggttcctctcgccgacgaggataactaccgtctgccctacgatacgatcccgagtcattatgccgtgtccttgagcacaaatgtgcacacgggagacaccgtgttcaatggtaccgtggccatcaccttaagcgttttgaacaccaccacaaaaattgtggtccacgcccgccagctggagaactttacagcctccattattcagcagggagtcactgaagccgtggcccaggaattggtatacgaatatgaagcagagcgcgagtttcttaccttcagcaagacgggactgactttccccgaagacaccacatggattctgacaatcaactaccagggacatctgcgcacagacaacggaggattctacctatccacatatacggatgaggaggggaacaccaagtatctggccaccacccagtttgagtccactgacgcacggcacgccttcccctgctacgatgaaccctcgaagagggcggagttcactatcaccattaagcacgatccaagctacaatgccatcagcaatatgccagtcgattcgagcaggttggtgatttcttttccataacatagttaagttcaagtgtattatttttaaatcgttttggtttctcaactttaaaatctttataattattaaagtatgccactttgtctttctcgccataatttaatgacaaagatacggtgtaatcagtgctttacaagcacaatgtctttaatggatgcataaattaattgttattttttatagcacctctggagtcaccgtcttccaaaagaccgtaaatatgccatcctacctggtcgcctttattgtgtccgagtttgtcttctcggagggtgagctaaatggcttgccacagcgcgtcttctcccgcaatggaaccgaacatgagcaggagtgggctctaaccaccggaatgctggtggagaagcgtctgtccggctactttgatgttcccttcgccctgcccaagctagatcaggctggtatcccggactttgccgccggtgccatggagaactggggtctggccacgtaccgtgaggagtacctgttgtacaacacggaaaactcaaccaccagcacgcagaccaacatagctaccattgaggcgcacgaggatgcccacatgtggtttggtgatctggtggccatcgaatggtggagcttcctttggctaaaggaaggtttcgccacccttttcgagaacttggctgtggacttggtaggtttattatcgaaaaactctcgattatttatctaatttgtaatttcgattacaggcctatcccgagtgggacattttccagaccttccacgctggatcgtaccagagcgctctggtgaatgatgccagcgctaatgcccgccccatgagccactttgtccagaagccctcggagattgccctgctctatgactccgtttcgtatgctaaggccggatccgttcttgacatgtggcgccatgccctgactaacaccgttttccaacgcggcctacacaactatctggtcgacaagtaggtttcaagttttggagcctacatcaatgtctaatatcgaatttttattctaaccagtcaattcactgctgccaatcccagcaagcttttcgaggccattgccaaggctgccgtggaggagaactatgaagtgaaagcaaccgtgcccgatatgatgggtagctggacaaaccagggaggagttcctttactgaccgtgactcgtaactacgacaacggaagcttcacagttaagcagtcggtgtacaccaacgataaggactatacgaatgacaagttgtggtatgtgcccattaactacgccgaatcgaaaaatcccgacttccgcaacaccgaggctactcattatctgcttaaccaatccgagattaccatctattccgacttggaccagaccaactggttgattctgaacaaaaaatccactggttactaccgcgtgctctatgatgcccaaaactatcaactgatcaccagcgcattgatcactcgtccccacaagatcgatcctaggaaccgagcccagttgattaacgacttgtaccgctttgcaaccagtggccgtgtgccccatgccactttgctggagctgttgacctacttgccccaggaggatcagtactctccctggtccgctaccaacacagtgattaccctgctcaaccgctacctgagcggagatgcggattatggcaacttccagttctacgtccgtgaactggtgagcctgcagttcgacaagttcggagtgaatgataacaaaggtgaccaccatttggtaccattcacccgcaatgtgctaattaaccttgcttgtctggcgggtctggagaattgtctgacggagaccacggccaagttgacggctctcgtggaggagggaactaagatcgagccgaatctacagtcgcaggtgtactgcaacggcctgaagcaggccgatgacaaaacctttgactttgtgttcaacaagctgctgaactccaccgatcaggccgagcgtcgtcttctgatctccgccctgggctgctcccagaacactgcccagctagagaagttcgtgtacagcagcattgagccagagggtttgagggatcaggaaaggatcacggtgctgagtccggtctactcccgcggcgaggtgggtctgctggtcgccattgagttcctgcagaagaactgggaaaagtatggtcagctaaattccggctttggtggcgtaaatcctctgtacagcgacattgtgggtatttccgcctataccgtcaacgacaagcagaaggatgccttgcaagagttggtggacactgtcaagggttctgagtatgtgcccagcactctgcaggatagcgtggatagcaacgtgaatgccaactacgcgtggctggcttccaacagggatcccctgatgacctgggtcgccggattccgcagcggcagctccgccctgaacgcctccattttggcaatccttgcctgccttctggccgccaagctattctaaaacgtagatcctaagttagttatagatttccattgtgcgcccaataaattccattaatttcctaaaactattgtttgcttttgctgggaatttacaattcccttcataggtttatggtcgtgaattgccagatcgaagtggtcagataagcgtgagtatttcataaatttcctcttttgaaaagtaaaaaactctgttcttacgaccacagttgagccataaatacatgggtaatcagccttggcaactaatttcataagtgtgaacgaaatcatgttagcctttagtttcacaaatggtcgaatataaatataataaaaggaattaaacaaagactgaaatttcttgaggggtttttatgactttaataacttggtggatacagttttataatcggcggtttttgcaaatttaacaaactactgggggcggtgtgcagatatattttcttgtttatcattcatatgcttgacaaatgtgttttttcaatagctttgatactctattgtgccgtaaataagcgtttgccgtcaatttttgatttgctttggccactaatcaatcaataatactcattaaatgcttcatagcaggaagaagttcctttaagagtacaatacacttaacataatgtggttcatatgttgataagccattttgcgatagcgttagttaatccaaacgaatacaaggtaaaatgtacggaccgacaattctttggatgctcatataaaaaattcagacaaacctattcatgtttgtttcattatttacgaagtatcttgtaatcaaccaacattagcaacaacttggcagttaaaagctttcccctttggaagactgcaaatcacgctcgataagattgggtgcaatgcaccataaagtctcaaagaagcagtgcaacggacagcaaatgttatgccatcgtctggcaatcttcaaaaaaatattgtcagcttggattggtagccaatggcggagtgtgtaaatcacgacccct

SEQ ID NO: 12347 - DNA, 5656 bp, DROSOPHILA
cttttaccgagcagccaacatggcacggtggctgcttaactcgttttcgctgatcctgctcctggcagtgtgcagcctacaggcgcgcctgatccttcccttatccctggacgatggacagctggagaccaagggagcagccctctttgccacctcccgcgtggatgataatagtgccggcaattaccgactgccaaatacaacggaaccggagtcctacaacgtggaactctggaccaatgtccataatggcgataccgaattcaatggcaccgtcaatatcgatatccgggttttgaacgagacatcgaatattacgcttcactatcgccagacgtcgaattttgaagcgacgattatcagccgggatgtggccacgcccacggcaattccactcactgtaacccccgagttgcagcgcgaattcctcgtccttacgcagaccaccgctggtgaggcatttggagccaacaccaactggaccatcaccatcaactacactggcatccaccgatctgatatgggcggtttctatatctccagttatacggacgatgatggcgaacagcacttcttggccaccacgcaattcgagagcacaaacgcccgtcacgcgtttccctgttacgatgagcctgcccgtagagctaactttacgattaccatccaccatgatccctcctacactgccatcagcaatatgccagtaaacaccgctgccaccagctcgggagtcactgctttccagacgacgccaaagatgtccacctacctggtggccttcatcgtctccgattttgagtccaccaccggagaactgaatggcatccgccagcgggttttctcgcgcaagggaaagcaggatcagcaggaatgggccctttggtccggattgcttgtggagtccagtctggctagctactttggggttcccttcgccctgcccaagctagatcaagctggaataccggacttctctgccggtgccatggagaactggggtctggccacctatcgtgagcagtacatgtggtggaacaagcagaactccacgatcaacctgaagacgaacattgccaatattattggacacgagtacgcgcacatgtggttcggcgatttggtatctatcaaatggtggacctatctgtggctcaaggagggctttgctactctcttctcgtacgaatcgaacgacattgctttcccactgtgggacacctatcagatcttccacgtgaacgactacaacagcgctctgcttaacgacgccctggcctcggccgttcccatgacgcactacgttcagacaccatcggagatctccaacaggtataacaccttctcgtacgccaagcccgccagtgttctgtacatgttcaagaacgcttggacggacaaggtattccgcactggattgaacaaatacctgaccaagaaccaatatacatcttgcgacgaatgggatctatttgcgtccttccaggaatcggccgacgagctgggctttacgctgcccgccagtgtggacgacatcttcagtagctggtcccaccaggctggttatcccctgctcacagtgacccgtaattacaatgccggcactataacgatcacccagaagcgttatgtggcgaacaaaactgatacaaatagcgcaacttggtatgtgccacttaactttgccactgccaacaagtacgattatcgtgacacgagcgccacacattacttgctaaatgtgacggagaccgtgatctcagatgtcgaggcttccagcgatgactggataatcgtgaatatccagaactccggctattaccgcaccctgtacgatacgcagaactatggtctaattacggcagctctgaagtctcagccctggaggttccatcctcgtaacagggcacaactgctgtacgatacgtacatctttgtcagcaccgatcgcctgagccacagcatcctgctggagctgctgggttacctgactaatgagcagcagtatgctccttggtccactgccaacactattctgaccgtctacgatcgttacttgcgtggcgatgattcttactacaacttccaagatttcgtgaagcgcctgatcgatcccatcttcgataaaatcggtgtaaacgagattcccggcgagcattatctgaacaactatctgcgcatcgtgctggtcagcttggcctgccaggtgggatccgatgattgctataaccagtcggccaataaattatccgagtacctatacaatggcacagccattgaggccactctaaagactcaagcctactgtgctggtctccgatcgactaccaatgaaatctatagcagagtgcagtccgatttgctcagttcctcagattccaccgatcgcagcctgttcatctcctcgttgggctgctctggaagtacgagccagctgcttgatttcttgagactatccctggacaccaacaatagcttgagctactcggagcgcacttcccttctaaactcggcctattcccgcagtgaaatcggtcttaccgctagtttggaattcctggagagcaactgggaggcatatgccaacctttcagactctgcaaagcccctggatgctgccctgcgtggcattgccacctatgtggtcagtgagaagcaaaagacgaggcttaacgctttggtggatgttgtggaggctgatggaccgagttatatcaatgatgatctgagcaccaccattgactccagaatcacatccaacttcgcttggttggaagttaatcgtgatccagtgctcaactggatcgaggattccttaaaagagaacggcagtccctctctgacctcatccatcaccacgatcctggcggctgtggttcgccaatatccgatccttgatcacctgcaacatctggagaatcccatgcagcgattggtggttcctctcgccgacgaggataactaccgtctgccctacgatacgatcccgagtcattatgccgtgtccttgagcacaaatgtgcacacgggagacaccgtgttcaatggtaccgtggccatcaccttaagcgttttgaacaccaccacaaaaattgtggtccacgcccgccagctggagaactttacagcctccattattcagcagggagtcactgaagccgtggcccaggaattggtatacgaatatgaagcagagcgcgagtttcttaccttcagcaagacgggactgactttccccgaagacaccacatggattctgacaatcaactaccagggacatctgcgcacagacaacggaggattctacctatccacatatacggatgaggaggggaacaccaagtatctggccaccacccagtttgagtccactgacgcacggcacgccttcccctgctacgatgaaccctcgaagagggcggagttcactatcaccattaagcacgatccaagctacaatgccatcagcaatatgccagtcgattcgagcagcacctctggagtcaccgtcttccaaaagaccgtaaatatgccatcctacctggtcgcctttattgtgtccgagtttgtcttctcggagggtgagctaaatggcttgccacagcgcgtcttctcccgcaatggaaccgaacatgagcaggagtgggctctaaccaccggaatgctggtggagaagcgtctgtccggctactttgatgttcccttcgccctgcccaagctagatcaggctggtatcccggactttgccgccggtgccatggagaactggggtctggccacgtaccgtgaggagtacctgttgtacaacacggaaaactcaaccaccagcacgcagaccaacatagctaccattgaggcgcacgaggatgcccacatgtggtttggtgatctggtggccatcgaatggtggagcttcctttggctaaaggaaggtttcgccacccttttcgagaacttggctgtggacttggcctatcccgagtgggacattttccagaccttccacgctggatcgtaccagagcgctctggtgaatgatgccagcgctaatgcccgccccatgagccactttgtccagaagccctcggagattgccctgctctatgactccgtttcgtatgctaaggccggatccgttcttgacatgtggcgccatgccctgactaacaccgttttccaacgcggcctacacaactatctggtcgacaatcaattcactgctgccaatcccagcaagcttttcgaggccattgccaaggctgccgtggaggagaactatgaagtgaaagcaaccgtgcccgatatgatgggtagctggacaaaccagggaggagttcctttactgaccgtgactcgtaactacgacaacggaagcttcacagttaagcagtcggtgtacaccaacgataaggactatacgaatgacaagttgtggtatgtgcccattaactacgccgaatcgaaaaatcccgacttccgcaacaccgaggctactcattatctgcttaaccaatccgagattaccatctattccgacttggaccagaccaactggttgattctgaacaaaaaatccactggttactaccgcgtgctctatgatgcccaaaactatcaactgatcaccagcgcattgatcactcgtccccacaagatcgatcctaggaaccgagcccagttgattaacgacttgtaccgctttgcaaccagtggccgtgtgccccatgccactttgctggagctgttgacctacttgccccaggaggatcagtactctccctggtccgctaccaacacagtgattaccctgctcaaccgctacctgagcggagatgcggattatggcaacttccagttctacgtccgtgaactggtgagcctgcagttcgacaagttcggagtgaatgataacaaaggtgaccaccatttggtaccattcacccgcaatgtgctaattaaccttgcttgtctggcgggtctggagaattgtctgacggagaccacggccaagttgacggctctcgtggaggagggaactaagatcgagccgaatctacagtcgcaggtgtactgcaacggcctgaagcaggccgatgacaaaacctttgactttgtgttcaacaagctgctgaactccaccgatcaggccgagcgtcgtcttctgatctccgccctgggctgctcccagaacactgcccagctagagaagttcgtgtacagcagcattgagccagagggtttgagggatcaggaaaggatcacggtgctgagtccggtctactcccgcggcgaggtgggtctgctggtcgccattgagttcctgcagaagaactgggaaaagtatggtcagctaaattccggctttggtggcgtaaatcctctgtacagcgacattgtgggtatttccgcctataccgtcaacgacaagcagaaggatgccttgcaagagttggtggacactgtcaagggttctgagtatgtgcccagcactctgcaggatagcgtggatagcaacgtgaatgccaactacgcgtggctggcttccaacagggatcccctgatgacctgggtcgccggattccgcagcggcagctccgccctgaacgcctccattttggcaatccttgcctgccttctggccgccaagctattctaa

SEQ ID NO: 12348 - protein, 1878 aa, DROSOPHILA
MARWLLNSFSLILLLAVCSLQARLILPLSLDDGQLETKGAALFATSRVDDNSAGNYRLPNTTEPESYNVELWTNVHNGDTEFNGTVNIDIRVLNETSNITLHYRQTSNFEATIISRDVATPTAIPLTVTPELQREFLVLTQTTAGEAFGANTNWTITINYTGIHRSDMGGFYISSYTDDDGEQHFLATTQFESTNARHAFPCYDEPARRANFTITIHHDPSYTAISNMPVNTAATSSGVTAFQTTPKMSTYLVAFIVSDFESTTGELNGIRQRVFSRKGKQDQQEWALWSGLLVESSLASYFGVPFALPKLDQAGIPDFSAGAMENWGLATYREQYMWWNKQNSTINLKTNIANIIGHEYAHMWFGDLVSIKWWTYLWLKEGFATLFSYESNDIAFPLWDTYQIFHVNDYNSALLNDALASAVPMTHYVQTPSEISNRYNTFSYAKPASVLYMFKNAWTDKVFRTGLNKYLTKNQYTSCDEWDLFASFQESADELGFTLPASVDDIFSSWSHQAGYPLLTVTRNYNAGTITITQKRYVANKTDTNSATWYVPLNFATANKYDYRDTSATHYLLNVTETVISDVEASSDDWIIVNIQNSGYYRTLYDTQNYGLITAALKSQPWRFHPRNRAQLLYDTYIFVSTDRLSHSILLELLGYLTNEQQYAPWSTANTILTVYDRYLRGDDSYYNFQDFVKRLIDPIFDKIGVNEIPGEHYLNNYLRIVLVSLACQVGSDDCYNQSANKLSEYLYNGTAIEATLKTQAYCAGLRSTTNEIYSRVQSDLLSSSDSTDRSLFISSLGCSGSTSQLLDFLRLSLDTNNSLSYSERTSLLNSAYSRSEIGLTASLEFLESNWEAYANLSDSAKPLDAALRGIATYVVSEKQKTRLNALVDVVEADGPSYINDDLSTTIDSRITSNFAWLEVNRDPVLNWIEDSLKENGSPSLTSSITTILAAVVRQYPILDHLQHLENPMQRLVVPLADEDNYRLPYDTIPSHYAVSLSTNVHTGDTVFNGTVAITLSVLNTTTKIVVHARQLENFTASIIQQGVTEAVAQELVYEYEAEREFLTFSKTGLTFPEDTTWILTINYQGHLRTDNGGFYLSTYTDEEGNTKYLATTQFESTDARHAFPCYDEPSKRAEFTITIKHDPSYNAISNMPVDSSSTSGVTVFQKTVNMPSYLVAFIVSEFVFSEGELNGLPQRVFSRNGTEHEQEWALTTGMLVEKRLSGYFDVPFALPKLDQAGIPDFAAGAMENWGLATYREEYLLYNTENSTTSTQTNIATIEAHEDAHMWFGDLVAIEWWSFLWLKEGFATLFENLAVDLAYPEWDIFQTFHAGSYQSALVNDASANARPMSHFVQKPSEIALLYDSVSYAKAGSVLDMWRHALTNTVFQRGLHNYLVDNQFTAANPSKLFEAIAKAAVEENYEVKATVPDMMGSWTNQGGVPLLTVTRNYDNGSFTVKQSVYTNDKDYTNDKLWYVPINYAESKNPDFRNTEATHYLLNQSEITIYSDLDQTNWLILNKKSTGYYRVLYDAQNYQLITSALITRPHKIDPRNRAQLINDLYRFATSGRVPHATLLELLTYLPQEDQYSPWSATNTVITLLNRYLSGDADYGNFQFYVRELVSLQFDKFGVNDNKGDHHLVPFTRNVLINLACLAGLENCLTETTAKLTALVEEGTKIEPNLQSQVYCNGLKQADDKTFDFVFNKLLNSTDQAERRLLISALGCSQNTAQLEKFVYSSIEPEGLRDQERITVLSPVYSRGEVGLLVAIEFLQKNWEKYGQLNSGFGGVNPLYSDIVGISAYTVNDKQKDALQELVDTVKGSEYVPSTLQDSVDSNVNANYAWLASNRDPLMTWVAGFRSGSSALNASILAILACLLAAKLF

SEQ ID NO: 12349 - DNA, 5219 bp, DROSOPHILA
ggttgaacttctccgctttctggttggagcgcacctgggacatcttttcggccaggtagcgggcattcatcacggactcggttagctgatcgccactcaagtgttttccaattcggttatccttgaagcgattggtcttgtgcttcacggcaaactgttgacccaatgtctgcgctcgtttctgcagagccttggcccgcgacacgcccggcattcccctgtcatgcttgcagatcctccccagaatcttgaacttctccttgttcacgtgcacatcgaagggattgccccgcttgctggactgtgccgtcgagttgtcgaagggattggccgacctggttgtctttttggcgtaaaccgcatctgcgctggccttctttcctttggccaccattgttttatatcgcgttctacggataaattaaaccgagttcatttagcaaaacaaaacacctcacacgtgcaacccaataacggactagcgcgtctacgaaatgccgaaatcagtgttggctaatcctgcgaatagtcacgtacaatggtaatgggatcagtttcaatttcaactgtaactacaaattaatcataatttactgtataacaatgtattttttccttgttaatgtaattgtaaatctacaagggcatttaaatattacacaattaaaatctttgttttggtatctacttcgaaaaactattgtatattacgaaacaccggtacatacgctgtatgatctgagtcatttaacacaacaattttaagggtagaccaagaaaacgatgcttcaatttgaaaattttgtaatcgaagcaatcaagttgtacatttttgaatgggtgactgaattagtagttatattgttatcacattctatttataatagctaaaatgttaaatcgataaatattagttttcggggaattccttggaaccttatccgctgaaatgtaacagttaccgctgctcatcactaatagcatgacttttccagcactgaaccacgtcgccattttcgtttcgttccttgccacaaaaattttcacacgcaacgccggatactgaaaaattggtttttaaagcgtgttaggagcttttataactttgcgtggctacagtcagtcagttcttggtgtgaaggtgctggaaaaagcatgagcgccacgccgccggacctactttcgttggcggcgtcccgagaagtctcggccgccgtcgcagtcgccgcctctgccaacggaggcagcggcagaagcgctgataaggagcgttcacgttccagagatcgtgggcgggacaaggataaggatcgggacaaggacaggaagaagaggtgcgtgcgttgcagggagaatgattttgtacccttgcccttttagcttcccctttttacttccttttccggtgtacacatttttcaacaatgtgcttttataaaagcagaacttttattaacgccatagcatatttatttggcacataataacctcttctcaactttgcagggacaaagacagtagggaccgcgacagtcgccggcgggacgatcgcggcgaccgagatcgtgaccgggaacgcgacagggattcccgctcgcaccgcagcaagtcgcgcaattacgacgacggagacagacgaagaaagcgatcgcgcagcagggatcgtgatcgtgaccgcaagcgggacagagatcgcgactcccgctccaggcgcagtagctcgcggggtggacgtgatgattatgaccggagtcgtcgacggcgctcacgcagtcgcagttacgagcgtcgacgcaatgatcgaggcagtcagagagatcaacgagaccagcattcgcaaagaagcagtcgggaacgcacacatgtgaaccccttcgacacatccaacagtcgaaactctctgaatcaggatcacgatcaatccagaatcccgtcgctcttcgaccgacagcagggattggaaaccatcagggaggaaggacgtgagcagcggtttgatcttactcagaccatccaggagctaatgggcaatgctggaggcaacaaaggattcgcctcgttctttaacagccagaacagcaacgactccaccagcaatggagcattcgataactcaggttggtattgacatagtgcagaaatgtatatcctttggctttgccgtgtacattttattaattgatgttacccgttgtagcggacagcgctgcggagcgaaagaggaagcggaagtctcgctggggcggcagtgaaaacgacaagaccttcattcctggaatgcccacaattctgccctccaccctggacccggcacagcaggaggcctacctaggtaatactatgtcccaaatctttgctgatcccgcaactaagttagcctttaagcacttcaactagctctaagtttaatgacaaactattaaggatgaatacagagagaaagccacacttcagaataagacgctggggacgtgaagctgtcgcagatatcgtaaaccaaacttaaatctgaaatcaacaaaaaacggcattgagcattatataataatctctcgttctctttttgaagggattccggcgtggcacacaaacgttacgaaacgatacgacatgagttgcataccaaatccaattcgcaaacagagcatttttatggccgttaagcttttatttatttttgcagaggttaatgcgcatttaaactaatcaaattaaatcccccacttaattaattaattaactcaattgtaacgctcacagcattttcagttagtttaggagtggacacactaagcgattctcaatagcctcaatatcacttgaccccctttccgcccatttaattattatctctccaattctctagaaaatcaacatgtgacgtttactaatgtcgaggttgcgctcgattttcttccttcttttctaacgccttctaattgcagttcaatttcaaatcgaggagattagtcgcaagctgcgaaccggcgatctgggcatcacgcagaatccggaagaaaggtttgatacagttctctctaccccactgagtctctcaatctaaggtctcgtccgtgtgaggccaatgaacgttaccagcgacccactgcagaacggcatctaccccaaaatgatggattccggtccggaatgatgcgccaatgtgtccaacaggtttcagtgtggcatgccgttgatttccggttgcacatgtatctcctttaccatttaagatccgttgagtggtgtatcactctcaattctgttgttagtacagtaaaagtcggttcgtctttgaaattaatttggtctatatagtagcttaacgattaaaatttattagtaaccgatatttactgtattgaacatcacatgaatttaaagttataaagttttgtccacttccgtgtaacgctctaactagttaaactgaagttaaacactcgtgcttggagtcgaaaaaaaggggaaaaaagactgtctggaggcaaaacgtatgatctgggtttcgtagctaatttgcttataaaaataattatttttaactaataacactcttcaagggtttctagaggcagcgatcatgtcagtgatcgattgaatgataccatccaaaaggggcaaccaataagtaagagcctgaagataaccggaatagattctacatcttcattaatgccaactcttcttttcttccactaagcgtcccgatagttcaggtttctcgcaaagaaactcagggtgcggcagaaacagaaacgatatagatacagctaccgaatcgaacgaattaatcaaaattcttcttttcttaattccccagcaataataattcttttccgctaatgctaatgctaatgaaaacttgattaatgaatttgatttgcaacttacagcatattcgattacagttactagttagtacgtacgttaagatcaataagtctagcgccaatagcatcctgccgcctagaagccccagatcagtctcaccaaaatcgcctcttccctctgctcctctcatccacagatcgccctcgccggagcccatttatagttctgatggcaagcggttgaacacccgtgaattccgctacaggaaaagactggaagagcagcgtcatcaactgatcgtcaaaatgcagacggtcaacccagagttcaagccaccagcggattacaagtaagtgctgtttatagttcgccgttggcattgtttgggaccacgtctaattgaattattgtttctttagaccgccagtcactcgtgtcagcgacaaagtgctgattccacaggagcagcaccctgacatcaattttgtgggcctgctcatcgggccgcgaggcaacacgctcaaggctatggagaaggatacgggcgccaagatcataattcgcggcaagggatcggtgaaggagggcaaagtgggccgaaaggatggccaaccgttgccgggcgaggatgaaccactgcatgctttcattaccgcccccaatccagaggcggtgcgcaaggcagtggacaaaatcaaagacgtcatccgtcagggtatcgaagtgcccgagggccataatgatctccgcagaatgcagttgcgagaactggctcagctgaatggaacacttcgagagaacgatatccaacgctgtacgtgcggctcaacggatcacaagtcctggcaatgtccggataagccgatcatcacgaacaccatagtgtgcacctcatgtggcggtaccggtcatttgaccaaggattgccgcaacaagcgtccaggatccggagtacccggcatggcctgcgaagattcccaggctaagattgacgaggagtatatgagtttgatggccgaattgggagaaggaccaccgccgccatccgcttctgctaagaccgatccgccggccagtaatggaccgcagttgcaccgggccagctatagcatttttgacaagaagccctcccagatgcaggccatccagtcgccaccgagctcctcgtcgcgagatcaccagcgcgacctgggcggatggggagcggcggcgcacgaacacggcatgggcatggagcacggtatgggattggaccagcacggtcacggtttggcagcgatggatcacggcatgagccttggcatggagcacgcaatggcggcctatgtgccggcaccgccgggcactcaagcaccgcctccgatgccgccgccgctgatgccgtg

SEQ ID NO: 12350 - DNA, 2275 bp, DROSOPHILA
aaccacgtcgccattttcgtttcgttccttgccacaaaaattttcacacgcaacgccggatactgaaaaattggtttttaaagcgtgttaggagcttttataactttgcgtggctacagtcagtcagttcttggtgtgaaggtgctggaaaaagcatgagcgccacgccgccggacctactttcgttggcggcgtcccgagaagtctcggccgccgtcgcagtcgccgcctctgccaacggaggcagcggcagaagcgctgataaggagcgttcacgttccagagatcgtgggcgggacaaggataaggatcgggacaaggacaggaagaagagggacaaagacagtagggaccgcgacagtcgccggcgggacgatcgcggcgaccgagatcgtgaccgggaacgcgacagggattcccgctcgcaccgcagcaagtcgcgcaattacgacgacggagacagacgaagaaagcgatcgcgcagcagggatcgtgatcgtgaccgcaagcgggacagagatcgcgactcccgctccaggcgcagtagctcgcggggtggacgtgatgattatgaccggagtcgtcgacggcgctcacgcagtcgcagttacgagcgtcgacgcaatgatcgaggcagtcagagagatcaacgagaccagcattcgcaaagaagcagtcgggaacgcacacatgtgaaccccttcgacacatccaacagtcgaaactctctgaatcaggatcacgatcaatccagaatcccgtcgctcttcgaccgacagcagggattggaaaccatcagggaggaaggacgtgagcagcggtttgatcttactcagaccatccaggagctaatgggcaatgctggaggcaacaaaggattcgcctcgttctttaacagccagaacagcaacgactccaccagcaatggagcattcgataactcagcggacagcgctgcggagcgaaagaggaagcggaagtctcgctggggcggcagtgaaaacgacaagaccttcattcctggaatgcccacaattctgccctccaccctggacccggcacagcaggaggcctacctagttcaatttcaaatcgaggagattagtcgcaagctgcgaaccggcgatctgggcatcacgcagaatccggaagaaagatcgccctcgccggagcccatttatagttctgatggcaagcggttgaacacccgtgaattccgctacaggaaaagactggaagagcagcgtcatcaactgatcgtcaaaatgcagacggtcaacccagagttcaagccaccagcggattacaaaccgccagtcactcgtgtcagcgacaaagtgctgattccacaggagcagcaccctgacatcaattttgtgggcctgctcatcgggccgcgaggcaacacgctcaaggctatggagaaggatacgggcgccaagatcataattcgcggcaagggatcggtgaaggagggcaaagtgggccgaaaggatggccaaccgttgccgggcgaggatgaaccactgcatgctttcattaccgcccccaatccagaggcggtgcgcaaggcagtggacaaaatcaaagacgtcatccgtcagggtatcgaagtgcccgagggccataatgatctccgcagaatgcagttgcgagaactggctcagctgaatggaacacttcgagagaacgatatccaacgctgtacgtgcggctcaacggatcacaagtcctggcaatgtccggataagccgatcatcacgaacaccatagtgtgcacctcatgtggcggtaccggtcatttgaccaaggattgccgcaacaagcgtccaggatccggagtacccggcatggcctgcgaagattcccaggctaagattgacgaggagtatatgagtttgatggccgaattgggagaaggaccaccgccgccatccgcttctgctaagaccgatccgccggccagtaatggaccgcagttgcaccgggccagctatagcatttttgacaagaagccctcccagatgcaggccatccagtcgccaccgagctcctcgtcgcgagatcaccagcgcgacctgggcggatggggagcggcggcgcacgaacacggcatgggcatggagcacggtatgggattggaccagcacggtcacggtttggcagcgatggatcacggcatgagccttggcatggagcacgcaatggcggcctatgtgccggcaccgccgggcactcaagcaccgcctccgatgccgccgccgctgatgccgtg

SEQ ID NO: 12351 - protein, 706 aa, DROSOPHILA
MSATPPDLLSLAASREVSAAVAVAASANGGSGRSADKERSRSRDRGRDKDKDRDKDRKKRDKDSRDRDSRRRDDRGDRDRDRERDRDSRSHRSKSRNYDDGDRRRKRSRSRDRDRDRKRDRDRDSRSRRSSSRGGRDDYDRSRRRRSRSRSYERRRNDRGSQRDQRDQHSQRSSRERTHVNPFDTSNSRNSLNQDHDQSRIPSLFDRQQGLETIREEGREQRFDLTQTIQELMGNAGGNKGFASFFNSQNSNDSTSNGAFDNSADSAAERKRKRKSRWGGSENDKTFIPGMPTILPSTLDPAQQEAYLVQFQIEEISRKLRTGDLGITQNPEERSPSPEPIYSSDGKRLNTREFRYRKRLEEQRHQLIVKMQTVNPEFKPPADYKPPVTRVSDKVLIPQEQHPDINFVGLLIGPRGNTLKAMEKDTGAKIIIRGKGSVKEGKVGRKDGQPLPGEDEPLHAFITAPNPEAVRKAVDKIKDVIRQGIEVPEGHNDLRRMQLRELAQLNGTLRENDIQRCTCGSTDHKSWQCPDKPIITNTIVCTSCGGTGHLTKDCRNKRPGSGVPGMACEDSQAKIDEEYMSLMAELGEGPPPPSASAKTDPPASNGPQLHRASYSIFDKKPSQMQAIQSPPSSSSRDHQRDLGGWGAAAHEHGMGMEHGMGLDQHGHGLAAMDHGMSLGMEHAMAAYVPAPPGTQAPPPMPPPLMP

SEQ ID NO: 12352 - DNA, 4968 bp, DROSOPHILA
acaatgagcagcgggaccacgatgatggcgaagatgacataggtgataatgagcagcgggcgtatccagatgcgccactcctcgaagaagcgtcttacgtccaagctgcacatctttgcctctggtgcactccttgggaatgctccttgaaatgtgctgttcaccggagtacctaatatccgggttgatatcgttgattcgttgacgtcgacgccgccgccccgattctgttttcacttgggtttccgctttcttccgctccgatccgctcttctccgccagaaattctctcacagcagattacaggacacggcggtggcacccacgctggaggcgcattttcagagatctcctgctggcagagcaagttcttcgatctattggtttcagtcctattggcagtaatatcgcggctttcgtgcccttcttttgtgaggaatccagttcgtgggtcgggtgcctacgtctaattggtgtgaccagccaatgcgaaatccgaaatgactaaaatacagacttcctcccggttttatattatttaaaatttttactatttgttttattttaaagtttaaaagctatcagtaaaaaaattaacttaattaaaaaacaaatgtcgaagattatttagattttgtttgtcgcagacgaaaaatatgaaaattttccgatgatttaaaaaagggaaatttcgagggctgcagagtaaaaaaataaaacatattttgaaaattaaagaaatatgtcaaatatataaagtagctaactccaaaccgactactaattgtttcgtagttcagaaatttttttaatactgaattaattgtaaaatatctaattttagttagttcaataaaacaattcacgaaagttagatgcattttatttatttataagattaaaatatcaattatgtacaactaagttaagtatttaattagttctcttgaaatggatataaggggatttacaagtgagcttgataagcgtgatattttttcgttatggatttattaaacaaatattcttagattatctgtttgatttgaatatatgatgtcaaaatgttcccttaacatttatacgtcgataacttaagatgttccgtgtacgtcccaaggctgtcttttggttaaaagtactgcggaatcgctattactatttgcctcgcccctggtagtcattttcatatacacaagatcggattacgttaaaagtaattaaaaagtatttgcattataagaaacagtagtcgccagtgcagactaattgttgtgatgatgaagaaagaggatggcgtcgatgtgactaccggtgagcatgaatcgcttgttgaagtcgtatatttggtctctcagcgccttcttgaagctgagcgtcaccacgccgggcacactatggtacaggctggccaaatcgcggagcgttccataaatgtgtcccatcttgagccaccactcgatgggcgactcatccagctgaacgaccacctcgttgcgatatcgcttaagatcggactccacgctgctgtccgcatctcgcttcggaggatttggtatctcgttactgtcaaacagcagtttcagacctacgggcattttcgtttagtccatggtttatgataatcgatttagttcgatgcacttacccaacttctttggtgcactgccgtccactactcttggttctgacttaatggccaccacgctggaggtagctgccacttcgttggattccccttcgcccactccaccaaagttaatgttatacttatgggtcagcatacgaacggttcgctctaggttgtcaatggtggtcaggcggtggaagcgtgggtccaacaatgcagcagcggtcagattgtcattggatataacgtgcgcctggaggacactggaaatggtccgcttcaaattcatcattaggggatcgtcctgctcggcgatgcccaacttcttgataagaatctttgaagtgattggcgaaagcatgctacacaagggaatgtcttcgccacgcagcgtgtccaaagcaatctaaaagatttcacacaataagaaaactgcttaaacgtctcatttagcttgatggcttaccaccagagcactcagggcctccgtcaccgtcttggctgatataaccaggtgatccatgtcctcggaccaagatatggactcggcaaagaacttcaatgtttcgtacagtgtccaggggaagtgctcgttgtacgtgggcatgggcacctcggacaccttggaggcaatctccgttgaatgacgctgcattaggtccttcacctgctccaataaagtggccacctcttcgatctcaaacacacgacgcaaacatttgtcaattaccgaaacgtagcacagcgaaatgggtatatctgcaataaaagattcatattcattaggaagtccaatatttgatatatattctatataaggtaaataattctgacttgctaatgcactcacttttctctcgcagataggtgtgcaaaaggtcctcttcctcgtcgtagtttatgatggccagtgtgcaattggccaaatagaagtcggtcagcagatcgtcaaagacgatgtagtcgttgtactccacggtggcatacagcataccgcgaactgagtgcgtctcctcgtccagaaagtgatggaagatgctaaggaagcgccgctgttcaacattcacccacatctcaaaggcgagagagaagggcttctcggaggtgaaatcgcgcgtgatttcgccaatctccagaaacttggaggcgtgcatctcattgatcaaagagtcgatcttgtgtggctcgggcatggctgccgaattgcctaggacttgacgcaggaattcaccaaaaccggcatcgtacagagaatccacattgcgcaaatccttaatcacaatgtccgtaagggcttcggccagattggcgatgttcgccacggcggcatagccgccttcctcgtgcttgatgacacgcccgtgcatcagggcactcgatggagtggccactttgcgtttgcgtccgtactttggttccataactaggcgctcctcctcctctaccagattttcggcctcgtcgtaggtgaagggcaccatggtctcgtacagcatggtttgcgaggaggcgtcctcctccgcctgcatggccgcagttgccacggctgcttcgtccagttcatcatcggaagcgttatcgtggttccggttattaatgaactccagtttgacccgccgcgaggaaacattccgcttggacagcggtggatgggatacattacgcggcgtcttgcgcggcggcacatggatgtcgtgctcctggcacagctccttgaacagatccttgtgtcggtgctggagatgcgcacgcaaattggtggtgttgccatggttggtcagcaccttgtgacacttaatgcagaccacattctgtttggtaatcacctcattattgtcgttcgaggggaatccaaagtagcgccagtatacgcttttcatcttgggcgagtacagtttggaaaaatttagctgcgacacatcctcgtacttgagttcgccaatggccacgggcgacgctggtaccccttcgctcatcttgtcttctgtgggggattgggatcttcttgtttgttttgaattagattcgacaacgattgctgtgcccaatgcgtgtattagcgcgcaatttctcgattatagatagacggttcaatagtcaatagttttttatctgtatcagaagtacagttcagagttgccacgcgacacgccgtcaatcgataaggcaataaaacgttgctaaatgcttcaaatgcactctcatttatttgagattatttttacagactgctcaaatatgagagtcaccgctttttaatttcaatacgtctgactgtcgtaaaaaatgcgatttgttgagtattctcgctaacactgattgcatcaccaatcgatagctggggaaatttctcgctcggccgggggaatttctctagggaaattttcgcttggcctacgacgtgaagttggttgcgatttcctttttaattcgttgttgggaagaaaaggtgtgtaaatttcgtgagcgtcacgaaattcaatgaaaataaaagataaacgaaatgcaaatcgagccatcgagtgtgccaagtgtggaggacacaagtgggcatcattgacacccgtaggcatgaagaagtgctcggaattacggcttaaacaaatcgaaattcgccagccacgtgggcctgcagcttggttatcccatatatacgagtttacaaagagacattgatgttattattgtgtttttgccctcgttgcagccaatctaaaccgccaagatgggtaagggtaacaatatgattccgaatcagcactaccacaagtggtggcagcggcatgtgaagacctggttcaaccagccggcccgcaaggtccgcaggcatgcgaaccgcgtcaagaaggctaaggccgtcttcccccgcccagccagcggtgccctgcgccctgtggttcgctgccccaccatccgctaccacaccaagctgcgtgccggccgtggtttcaccctggaggagctgaaggtaagtgaagccgaaaacattatcggaatccattggccactaacaaaatctctgtttacagggtgccggcattggcgccaacttcgccaagaccatcggcattgccgtcgacaggaggcgcaagaacaaatccctggagtcccgccagcgtaacatccagcgcctcaaggagtaccgcagcaagttgatcctgttccccatcaacgagaagaagatccgcgccggcgagtcctctctggaggagtgcaagctggctacccagcttaagggacccgtcctgcccatcaaaaatgagcagcccgccgtggtcgagttccgtgaggtgaccaaggatgagaagaagttcaaggccttcgccacgctgcgcaag

SEQ ID NO: 12353 - DNA, 2757 bp, DROSOPHILA
ctatcgattggtgatgcaatcagtgttagcgagaatactcaacaaatcgcattttttacgacagtcagacgtattgaaattaaaaagcggtgactctcatatttgagcagtctgtaaaaataatctcaaataaatgagagtgcatttgaagcatttagcaacgttttattgccttatcgattgacggcgtgtcgcgtggcaactctgaactgtacttctgatacagataaaaaactattgactattgaaccgtctatctataatcgagaaattgcgcgctaatacacgcattgggcacagcaatcgttgtcgaatctaattcaaaacaaacaagaagatcccaatcccccacagaagacaagatgagcgaaggggtaccagcgtcgcccgtggccattggcgaactcaagtacgaggatgtgtcgcagctaaatttttccaaactgtactcgcccaagatgaaaagcgtatactggcgctactttggattcccctcgaacgacaataatgaggtgattaccaaacagaatgtggtctgcattaagtgtcacaaggtgctgaccaaccatggcaacaccaccaatttgcgtgcgcatctccagcaccgacacaaggatctgttcaaggagctgtgccaggagcacgacatccatgtgccgccgcgcaagacgccgcgtaatgtatcccatccaccgctgtccaagcggaatgtttcctcgcggcgggtcaaactggagttcattaataaccggaaccacgataacgcttccgatgatgaactggacgaagcagccgtggcaactgcggccatgcaggcggaggaggacgcctcctcgcaaaccatgctgtacgagaccatggtgcccttcacctacgacgaggccgaaaatctggtagaggaggaggagcgcctagttatggaaccaaagtacggacgcaaacgcaaagtggccactccatcgagtgccctgatgcacgggcgtgtcatcaagcacgaggaaggcggctatgccgccgtggcgaacatcgccaatctggccgaagcccttacggacattgtgattaaggatttgcgcaatgtggattctctgtacgatgccggttttggtgaattcctgcgtcaagtcctaggcaattcggcagccatgcccgagccacacaagatcgactctttgatcaatgagatgcacgcctccaagtttctggagattggcgaaatcacgcgcgatttcacctccgagaagcccttctctctcgcctttgagatgtgggtgaatgttgaacagcggcgcttccttagcatcttccatcactttctggacgaggagacgcactcagttcgcggtatgctgtatgccaccgtggagtacaacgactacatcgtctttgacgatctgctgaccgacttctatttggccaattgcacactggccatcataaactacgacgaggaagaggaccttttgcacacctatctgcgagagaaaaatatacccatttcgctgtgctacgtttcggtaattgacaaatgtttgcgtcgtgtgtttgagatcgaagaggtggccactttattggagcaggtgaaggacctaatgcagcgtcattcaacggagattgcctccaaggtgtccgaggtgcccatgcccacgtacaacgagcacttcccctggacactgtacgaaacattgaagttctttgccgagtccatatcttggtccgaggacatggatcacctggttatatcagccaagacggtgacggaggccctgagtgctctggtgattgctttggacacgctgcgtggcgaagacattcccttgtgtagcatgctttcgccaatcacttcaaagattcttatcaagaagttgggcatcgccgagcaggacgatcccctaatgatgaatttgaagcggaccatttccagtgtcctccaggcgcacgttatatccaatgacaatctgaccgctgctgcattgttggacccacgcttccaccgcctgaccaccattgacaacctagagcgaaccgttcgtatgctgacccataagtataacattaactttggtggagtgggcgaaggggaatccaacgaagtggcagctacctccagcgtggtggccattaagtcagaaccaagagtagtggacggcagtgcaccaaagaagttgggtctgaaactgctgtttgacagtaacgagataccaaatcctccgaagcgagatgcggacagcagcgtggagtccgatcttaagcgatatcgcaacgaggtggtcgttcagctggatgagtcgcccatcgagtggtggctcaagatgggacacatttatggaacgctccgcgatttggccagcctgtaccatagtgtgcccggcgtggtgacgctcagcttcaagaaggcgctgagagaccaaatatacgacttcaacaagcgattcatgctcaccggtagtcacatcgacgccatcctctttcttcatcatcacaacaattagtctgcactggcgactactgtttcttataatgcaaatactttttaattacttttaacgtaatccgatcttgtgtatatgaaaatgactaccaggggcgaggcaaatagtaatagcgattccgcagtacttttaaccaaaagacagccttgggacgtacacggaacatcttaagttatcgacgtataaatgttaagggaacattttgacatcatatattcaaatcaaacagataatctaagaatatttgtttaataaatccataacg

SEQ ID NO: 12354 - protein, 709 aa, DROSOPHILA
MSEGVPASPVAIGELKYEDVSQLNFSKLYSPKMKSVYWRYFGFPSNDNNEVITKQNVVCIKCHKVLTNHGNTTNLRAHLQHRHKDLFKELCQEHDIHVPPRKTPRNVSHPPLSKRNVSSRRVKLEFINNRNHDNASDDELDEAAVATAAMQAEEDASSQTMLYETMVPFTYDEAENLVEEEERLVMEPKYGRKRKVATPSSALMHGRVIKHEEGGYAAVANIANLAEALTDIVIKDLRNVDSLYDAGFGEFLRQVLGNSAAMPEPHKIDSLINEMHASKFLEIGEITRDFTSEKPFSLAFEMWVNVEQRRFLSIFHHFLDEETHSVRGMLYATVEYNDYIVFDDLLTDFYLANCTLAIINYDEEEDLLHTYLREKNIPISLCYVSVIDKCLRRVFEIEEVATLLEQVKDLMQRHSTEIASKVSEVPMPTYNEHFPWTLYETLKFFAESISWSEDMDHLVISAKTVTEALSALVIALDTLRGEDIPLCSMLSPITSKILIKKLGIAEQDDPLMMNLKRTISSVLQAHVISNDNLTAAALLDPRFHRLTTIDNLERTVRMLTHKYNINFGGVGEGESNEVAATSSVVAIKSEPRVVDGSAPKKLGLKLLFDSNEIPNPPKRDADSSVESDLKRYRNEVVVQLDESPIEWWLKMGHIYGTLRDLASLYHSVPGVVTLSFKKALRDQIYDFNKRFMLTGSHIDAILFLHHHNN

SEQ ID NO: 12355 - DNA, 3120 bp, DROSOPHILA
tgaaaacagtaaatatagatcttttagttttagccgatttgctggactatcaaatacccgttacttaatgcgagatatgataaaaagaagaaagaactcttttcgaaaattgcttactaggcggtatctactttccaacgtatctagtatacccgggtatgtcccaaaatccctatggcaatattttgtaatatacaaagtaaatactttggttttctaatgtagccctttacaaataagcatgtgtatatcgcctctactgttatcacgctcacattgataacgattgttatctcttaaagtgcggaatgtttttgaaacttggtaagtaaggattgccaaagagtacagctatatagaaatttatagaaatggaatccaaaacacgaaagtggatcaacgcacgattacagggattacagggcatcggcatctcgcattaatttggacttcgtcacgccgattaatgggtgaatgagttgcggatgacagttgttctaaatgataaggaaatacaacggcgggcaaaatattagcaatcgcggcacttgaactgtattttaaactacatattatatataatcaatattatcaatcaatattataattgattgttatataagctgaaatcataataacttcactttaaataatgggttgtaatttatgatctattaaaaatttgtctctatcttaagtggattttaatgactatttttattcaaatataattcgattgtaaaacagcactattaatagtttaatgttttctttatttacaatgtgtgaaaagttcttagtatttattattattttgccccgctgtcgattgccgaacccacacataggaacctcaatgataagctcagatcgctgggtgtgttgttccctcaacgcaggggattgggagggggttggccgggcaagatttcttatcaatcctcgcgtctgtttttggtcaacgccggcggcgggcgcacagttgccgttccaccagcagaaagttcagtactcacagtccgcggactttttaacccattaactaatgtcggcaatcggaaagatcggattcctgggaggcgggaatatggccaaggctttggctaagggtttcctagcggccggtgagaaagccactaataaaatagatttgtagtctgacatactttgtgctagacaatagataagacacacttggatatgcaatatatatatgaactaacatcatcttataattagatacaaaaggataggacgttaaggatttcatcatataatcgccaaatttcctaattcatttcctaggcctggccaaacccaataccctgatagccagcgtccatccggcagataagctctccctgcagtcctttcaatccctgggagtggaaacagtgatcaagaatgcacccgttgtgcagcaatcggatgtggtcttcgtgtccgtgaaaccccaagtggttccctcggttttgtcggagattcagccattgagctcgggcaaactattcctttccgtggccatgggcatcactttgtccaccatcgagtccagtttatctccacaagctcgcgtcatccgtgtgatgcccaatctgccggctgtcgtgtgttccggttgttcggttttcgttcgcggatccaaggccacagatgcagatgcggatattacccagaagctgctgcagtccgtgggcacttgtgagccggtggatgagtcccagttggatgtggttactgctctgagcggaagtggaccggcctatgtattcgtgatgattgaggccttggcggatggagccgttcacatgggcatgcccagggatctggcctatcgtttggcatcgcaaacagtcctgggcgcaggtcacatggtgcgggacagtggtatgcatcccggacaactcaaggatggggtcacaagtccggcgggatcgacagcagcggcactcagacaactcgagctgtcaggtaagttgggatgatgacgccgatgacgcactcgcttatcgccgccacttcaacctttgatgtcgattgcaggttttcgggctgcggtgtctggagcggtggaacaggcgactctgcgatgccggcaaatctcgggaaagacgaagtaggcacataggattatcatatacatatacgtacattggggtgggtcaattttgttattaaagttatagtagttaaaggaagtcgttaaattttgttgcttcttgaagaaacatgtttttaatttggaaatgtatgttggtgctatagtgctttcaaagagcaatgatgagatgtttcattttaatcgacccacccttgtgcttaatctgggttagtagctttgcataactataaaaactgtgaaggccgatttcgtgatactaaaatataagcaacactgctatattctttactctcagctttgtttatagtctagctaaaaataactaattcaaagtcgagcctagaacttcttcttctttttggcccgggacagctcattgagctcgccctgttgcacggatgcctcctggtaaatgcgcttaaccttctcgtggcgctccttgtcactgtggatatgaaatacaatagattagaaaggaacggttaaattgtaaatggaacacaaacctttgcagggtctgtttgagcctaagcatctgaacgaaggacgtatctctgcgtatttctcgaatggcacccttcttctcgcgcttgatcttgtgcagcagtttggcccgctcttccttggccttggacatcttgggacgacgtttgtcatcgtaaaccgcctcgaatcgaggttccagcagcctaagagccttgggtttcttttccgccggagccaagggtttcattttctgcgcagctagcttctccgccagttcggtggcatccttgtggtgctgatgcacatgctcggggtaagactccagtggaaggcgggagagtagtgccaaaaagggttgggccaggtagcaggcacccacatgctcttccaccagttggagagcttccttgattagcaggagggaagtgtccagtgctcgaaccttgaaatctggagtgatcgtctgggtgaccaagtcagtaggctgcagctgttggggctccaacttcgtg

SEQ ID NO: 12356 - DNA, 867 bp, DROSOPHILA
aaagttcagtactcacagtccgcggactttttaacccattaactaatgtcggcaatcggaaagatcggattcctgggaggcgggaatatggccaaggctttggctaagggtttcctagcggccggcctggccaaacccaataccctgatagccagcgtccatccggcagataagctctccctgcagtcctttcaatccctgggagtggaaacagtgatcaagaatgcacccgttgtgcagcaatcggatgtggtcttcgtgtccgtgaaaccccaagtggttccctcggttttgtcggagattcagccattgagctcgggcaaactattcctttccgtggccatgggcatcactttgtccaccatcgagtccagtttatctccacaagctcgcgtcatccgtgtgatgcccaatctgccggctgtcgtgtgttccggttgttcggttttcgttcgcggatccaaggccacagatgcagatgcggatattacccagaagctgctgcagtccgtgggcacttgtgagccggtggatgagtcccagttggatgtggttactgctctgagcggaagtggaccggcctatgtattcgtgatgattgaggccttggcggatggagccgttcacatgggcatgcccagggatctggcctatcgtttggcatcgcaaacagtcctgggcgcaggtcacatggtgcgggacagtggtatgcatcccggacaactcaaggatggggtcacaagtccggcgggatcgacagcagcggcactcagacaactcgagctgtcaggttttcgggctgcggtgtctggagcggtggaacaggcgactctgcgatgccggcaaatctcgggaaagacgaagtag

SEQ ID NO: 12357 - protein, 273 aa, DROSOPHILA
MSAIGKIGFLGGGNMAKALAKGFLAAGLAKPNTLIASVHPADKLSLQSFQSLGVETVIKNAPVVQQSDVVFVSVKPQVVPSVLSEIQPLSSGKLFLSVAMGITLSTIESSLSPQARVIRVMPNLPAVVCSGCSVFVRGSKATDADADITQKLLQSVGTCEPVDESQLDVVTALSGSGPAYVFVMIEALADGAVHMGMPRDLAYRLASQTVLGAGHMVRDSGMHPGQLKDGVTSPAGSTAAALRQLELSGFRAAVSGAVEQATLRCRQISGKTK

SEQ ID NO: 12358 - DNA, 8846 bp, DROSOPHILA
tcctcttttgaaaagtaaaaaactctgttcttacgaccacagttgagccataaatacatgggtaatcagccttggcaactaatttcataagtgtgaacgaaatcatgttagcctttagtttcacaaatggtcgaatataaatataataaaaggaattaaacaaagactgaaatttcttgaggggtttttatgactttaataacttggtggatacagttttataatcggcggtttttgcaaatttaacaaactactgggggcggtgtgcagatatattttcttgtttatcattcatatgcttgacaaatgtgttttttcaatagctttgatactctattgtgccgtaaataagcgtttgccgtcaatttttgatttgctttggccactaatcaatcaataatactcattaaatgcttcatagcaggaagaagttcctttaagagtacaatacacttaacataatgtggttcatatgttgataagccattttgcgatagcgttagttaatccaaacgaatacaaggtaaaatgtacggaccgacaattctttggatgctcatataaaaaattcagacaaacctattcatgtttgtttcattatttacgaagtatcttgtaatcaaccaacattagcaacaacttggcagttaaaagctttcccctttggaagactgcaaatcacgctcgataagattgggtgcaatgcaccataaagtctcaaagaagcagtgcaacggacagcaaatgttatgccatcgtctggcaatcttcaaaaaaatattgtcagcttggattggtagccaatggcggagtgtgtaaatcacgaccccttatcgctatcgcagcttaatctatagaccaggcgaactttatctgggccgaaataaaacgttaaagtttgcagataagccgctgatactagcaaagtcgcaaaatggtttacattcaccatatataccgggcccaaagccaaaactcacttagttttcgaatcgaatcgctggccgagtggcgtgcgaaatactaattctagtccgaggttcgcgatcgaacccttgaaaagtgagtttaataagtgcttatataaatggggatttttcaagtaaaattggaacaatccttataaaagtgaaaaaaaaaactttaaattactagacacgtactagcgatgcgattaattaagtttttaatttgtatcccttttgatatttcattagtaggaagaatgtttgccccgcgagtggctgttctcctggtggcctgtgtgtccttggcctcggcaggaactcggcaactgtctgtggatgtccagccgccggcgacgctcgccaccgagctaaatgaataccgcctggccgagcacatcacgccggttaactacaacattacgctgcgtccctatttgctggagaccgatggcaacaagaggttcaccttcgatggcgaggtttggatcgaggtgatttccaaccagaccaccaacgacatctatctgcactcgaaaaacctcacatattcggtcagggaatactggcaaaagccaaccaccgaagtggccaatcctacggtcatccaaattagtgccaccaatacaacgaactatgatacggatattgtaaagctgacggcgtcaactgctttgaccgccaatacgacatatatactgcatttcgtgtacaccggtctgatggaggacgatatgcacggtttctatcgcagctcctatgtggacgataacaatgttaccaagtggctgggatccacccaattccaaacccatcacgctcgtcgcgccttccccagctttgatgagccccagttcaaggccaccttcgatgtcacgctgaagcgacacaggaccttcaactcggtcagtaacacccgtctgatctcatcgtatcccagcactgaagagtaagaacttccaccactttattgttaatctgtaagccttccattggttaagaaattcaactatctagtgagaatttaatcgattaacgagaaagttgttatttcttgatctgaatattatgttttatttcacccaattattagaggtattttctcggacgtgtacaagacgacgcccaaaatgtccacctatctgctggctttcataatttccgagttcgtggcccgtaaggatgacgatttcggagtttacgcacgtcccgagtactatgctcagacccagtacccctacaatgtgggtatccagattttggaggagatgggccagtacctggataaggactactactctatgggcaacgacaagatggatatggccgccattccggatttctcggccggagcaatggagaactggggtctgttgacctacagggagcgttccctgctggtggacgagtcggctactaccttggcctcccgccagtccattgccgccgtggtggctcacgaacaggcgcacatgtggttcggcgatctggtcacctgcaagtggtggagctacacctggcttaacgagggattcgctcgctatttccaatacttcggcaccgccatggtcgaggacaaatgggagctggagaagcagtttgtggttgaccaggtgcagtcggtcatggccatggactcgaccaatgccaccaatccgctgagcgatgagaacacctacacgcccgcccatctgagccgcatgtttaacagcatctcctacaacaagggagccaccttcatccgtatgatcaagcacaccatgggcgagcaacaattccagaagtccctgcaggaatacctgaagaaatagtgagtagtggggaaattaaatatgtgacttgtatttcaagggtttttcttgcttacagcgagtatcagtcgtctttgcctgaatatctcttgggagcctggcaagccaattggcccaactccagttacaatgaaagctccaaagatatattcaagagcttcaccgagcaggtgggctatccactgatcaatgtaactgttggcaacagtcaggtcagcttcacgcagaagcgtttcctgctgaaggagagcgatggatccgactcatctttgaaatatactgtgcccatttcctacactaccagtgagacaaataactttttgaacaccacgccaaagtttattctgaaacccaacgtaactacgacggttcaattcaactcaacaataaaatggattgtggtcaatattcagcagaccggatattaccgtgtcacctactccgacgacaattggcatgccatccaccacgctctgatcacagccaactggggaggaattcacgagaacaatcgcgcccagatcgtggatgatctgttcaatctggccagggctggatatgttacctacaaccttaccttggatgtgatcgagtatttgcagacggagaccaactacatcccctggacatccgccttcaacggcttcaactacttgactatccgcctcggaaacgacacggccgatttcaattactatatccagaccctgaccaacaaggcctacaatcagctgggcttcaatgaagcatcgaatgatacagccttggacatttacctacgcactaagatcctctcctgggcctgtcgctatggcagctccgattgcatcagccaggcccagggctacttccaatcgttggccaccgtgcccaagaacatacgcgccactgtctactgcgtgggtctgcgtgaaggtggtgaggccgagttccaggctctttacaacaagttcaagaacgagaccgtggccaccgaggagaccctgctgcagaactcattcggttgcgtcaagacccagtctctaatcgagaaggtgttcgatctgatcatcagcgatgagattcgacgacaggacaagtcatccgtgctggccactctctacacggagaacaacgagaatgtcagtccggtgtttgcactggtcactcagaaatacgaggaattggctgaggcgtaagtatatcctattatttggtttggcttgcattttataattcacttctttctgcagcatgggcggctactccgctgtggccacggtgatttccaatatcgccgcccgtttcaccacaaatcagcagttaactgatctggagaacttcaacaaggctaatggcgccaagttcggcagctcgcaggccactttgaccgccgccgaggcaaccgttaaggagaacttggagtgggctacggccaagctgggcgttttccgcagctatctggccaactatcgtagtggaagcgccatggtcaacgccttcagcgccatcagccttttgatggtggccctggtcaccatgctgcgtaactaagcagggattagctcctactggagtcaggtgcgatcgagtcacgagtgctccttaggccataaagtatttgtacgcaagagcacccaataaagtaacacctttttgtagataagccgctgttttagtttattattactcgtgctagcaaaatcgatcatgaaatgggcttaaatgacacccatggcgacaattaatttacaatctgattagcgacaatattgccgggtgattcagttcgggatcttgaggggattttataaaactacggttcaatcgatcactatttggccataaatttgttgaagggcaataaacgatttttttttaagttttaccgaaatttccggcgaaaaggtgttttatttattttttattagattgtattagccattaatttaagtctggcgcgtaataaatcaaaccatattaagccattagggtttttttttttaatttgtgtgctttaattttgatgcaattaaaaaaaaagacaaggaatatcgctgaaacttaaactgaccgacataagtaataaattactatctttattgctagctcttttacaatattgtcttgcagatatcgatcttaccacctattctggctaactaagttgattcacttttcgtggaacccaatcgaaaacataatccttatcgcatcttatcaattgtagtattgagtgccgcattggactttccaccataatggtgaatggatagcagagggacttttttttagagtttaatctatacaaatcactaataatggtatgacaaatattttaaggagaatgtacaatattatcttttaaaaataattttcaaaacaccaatagctttcctgactaaaactcattaagcagctgtcgttggcaattaaaatgataattggcattccatttagcatttaataaatgcccaatggcacgctgataagaatatttcagtgagagaagtgtgacgacatcttgtattattgttgaatattccgctatctaatcacctgcgaacgacacctgttttgcgggggggacttttatttgattttctgattctgattccggcgatctacaagagtgtgtccgaatccaacgctccagtaatcgagtttcggtcgccatgagcagttcgatatttcgggccttttggctactttgttcactgctgatctgtgtcacgaatgccgctgattatcgactggaaggtagcgtcgtaccatcgcactacaacctgaccatcggtgttttgcggaactcagtcgagcccactattttcgatggcgaagtgagcattaccttgcgggtggtcggaactttggaggtgcaacaaatcattctacacgctgatacgctcgacattacggaatgttggcttttggatgcggcaggtgcgcaggtggaggccatcgatatcagcaggttgatttatgaggccgccacccaacaggtgagagttccgctgacggaggccgcgcagccaggcaaaaattatacgctcgggttcaagtacaccgggcacatacgaacggatatggccggcttcttctccgccagctatgtggagagggataccaatgtgaccaggtggttggctctcacccagatgcagcgcatcaacgcccgtttggtcctgccctgcttcgatgagcccgccctgaaggcacagttccaactgcagattgttcggcccaacgggtatcagtcgattgccaacaccaagctaaaagaaactaaagctttaaggtacattacactttatataatataaaataaataatgttaactaatcaccgtttttccatgatttcagccaagatcgttttgtcgatcacttcaaggagacccctgtaatgtccacatatctgctggccttcatggtggccaattattctgcacgtggaaatgagagtgagttcgcagtgctcactcgtccggagttttatgataacacagagttcagctaccatgtgggtcagcaggtggtttcagcatacggggagttgttccagagtccatatgctgaactgggcaacgatgtgctgcagtatgccagttcgcccaggttcccgcacaacggcatggaaaactggggcctcataatctacaggtgagtacgaaaagtattgccaaatatacatataaacgaaagtaaaatatagaatatgatttcattatgttttgttgttactttaaagcgacgatgtccttatacaggaacctggatactcggatgattggtcggataaggagttcgccatacgcatcatcgcccatgagacctcacacatgtggttcggggatagcgtgaccttctcctggtggagctacttttggctcaatgaggcctttgcccgctactacgagtacttcatggctcatcaggtaggatgagaattcgaatacatatttttgccagtattgttacataatcgattcagctctatccagattatcacttggacgagcagtttgtggtgcgccaaatgcagctgatatttggaacggatgcccagaacggcactcaacccatgacaagtccggagtcggagattcaaacaccctcccagattgcctacaagttcagcgggatcgcctatgccaagggagcttgcattgtaaggatgtggcgaaatctcatgggagccgaaaactttgacacagccatcaggagttacctgcagcaatagtaagtaaggtatatttttggttagaggcgaaaacatttatcttgaaggtgtcataacctatatttagtgaagaggttcttaattttgataagggaattatacaattatcattctttttccagccacttgaccaatacagtaccttataacttattttaccatctcttcgagcattggccaaagaatcaggatgtggatctggttgactttcttaccgattacaccgagcaggttggttatcccatgataattgtaaaggctttacagggtaacaaggtcgttactgtggagcagtcgcgattcctccttaacaaagacgatggcagtaatgctacactgaaatacacagtaccaataactttcaccactaatctggaacgcgatttctacaaccttacgccatataaatacctacacaaaacagttaacgttctgtggctggattttaccagtccaattgattggattttatttaacctgaggcagtcgaactaccaacgagtgttctatgacgacactttaagggaaggtcttctgttagccatctcggcaacgaatcacagtggaataccggttgagaaccgtgctcaaattattgatgatctcttcaatttcgcgcaagctcaatatgtggattatgctgatgtattcaggttcctggaatacctggcgaaggaggtggagtacgtgccctggtatgccgtctatgagaacttgaatacggtggcaaagcgattgacacctgaacagctgcccgacttccggatatatctttccagcatcacagcagctgtttttgaaaaactaggagttggctggaacgcccaggatactcctgtagttaattagaattccaatacttctgatgtagttaataaagtctcaaaacgcagttggtcattttatctttatttggtttttattaagcgagcgtacattccagatctattcctgatttataactgatcttagtgtggtctacaggcagatctcttgtgacagccaagtgctgacactagcaaattctgcaatatgtaagtatgtagttcatactcgataaccaatgggagtcgagtgcgacccctaaaggcgtacatgctgaattcgcatatttagtattagggtgtatctaaagatctactagggtgaccctaaggaattagggtggtcctaagtttacttattagtcgacttattattatgattcatattataattattattaatattattattattattggtattattattggtattatgttcgtatatactacatctccctccttttgaaaaataacgtaataacatgaagttattttcaagtatataataatttttttttttttttaaatgtacattaatatttgaaatgaatgattaaagagatattaaaaaaaatatatatattttcattatattttgcaaagtaaaagttttgtattataatgtttttattggtttttattttatttgtggtttttttatttgtggttggccaaccaaacaaaatgtattatgaattaaaaatttttaacctatctttatggactatctgttttttatttttatttcctataattgtaatgttgtcattatctcctatttctgaaactaaatatggtcctaaataattattgtcaagtttatgacccgtttcgtttttaagtaatatcttatctcctatctttaattcaaagttactaatatttctatcatattttatctttctatcggcttttgccttgtctaacatatttttagctcttctatatgctatttctaatcgtagcttaacttcttttgaatagtcatccatgttgtaaataggatctattctgtctatcct

SEQ ID NO: 12359 - DNA, 5011 bp, DROSOPHILA
ctggccgagtggcgtgcgaaatactaattctagtccgaggttcgcgatcgaacccttgaaaataggaagaatgtttgccccgcgagtggctgttctcctggtggcctgtgtgtccttggcctcggcaggaactcggcaactgtctgtggatgtccagccgccggcgacgctcgccaccgagctaaatgaataccgcctggccgagcacatcacgccggttaactacaacattacgctgcgtccctatttgctggagaccgatggcaacaagaggttcaccttcgatggcgaggtttggatcgaggtgatttccaaccagaccaccaacgacatctatctgcactcgaaaaacctcacatattcggtcagggaatactggcaaaagccaaccaccgaagtggccaatcctacggtcatccaaattagtgccaccaatacaacgaactatgatacggatattgtaaagctgacggcgtcaactgctttgaccgccaatacgacatatatactgcatttcgtgtacaccggtctgatggaggacgatatgcacggtttctatcgcagctcctatgtggacgataacaatgttaccaagtggctgggatccacccaattccaaacccatcacgctcgtcgcgccttccccagctttgatgagccccagttcaaggccaccttcgatgtcacgctgaagcgacacaggaccttcaactcggtcagtaacacccgtctgatctcatcgtatcccagcactgaagaaggtattttctcggacgtgtacaagacgacgcccaaaatgtccacctatctgctggctttcataatttccgagttcgtggcccgtaaggatgacgatttcggagtttacgcacgtcccgagtactatgctcagacccagtacccctacaatgtgggtatccagattttggaggagatgggccagtacctggataaggactactactctatgggcaacgacaagatggatatggccgccattccggatttctcggccggagcaatggagaactggggtctgttgacctacagggagcgttccctgctggtggacgagtcggctactaccttggcctcccgccagtccattgccgccgtggtggctcacgaacaggcgcacatgtggttcggcgatctggtcacctgcaagtggtggagctacacctggcttaacgagggattcgctcgctatttccaatacttcggcaccgccatggtcgaggacaaatgggagctggagaagcagtttgtggttgaccaggtgcagtcggtcatggccatggactcgaccaatgccaccaatccgctgagcgatgagaacacctacacgcccgcccatctgagccgcatgtttaacagcatctcctacaacaagggagccaccttcatccgtatgatcaagcacaccatgggcgagcaacaattccagaagtccctgcaggaatacctgaagaaatacgagtatcagtcgtctttgcctgaatatctcttgggagcctggcaagccaattggcccaactccagttacaatgaaagctccaaagatatattcaagagcttcaccgagcaggtgggctatccactgatcaatgtaactgttggcaacagtcaggtcagcttcacgcagaagcgtttcctgctgaaggagagcgatggatccgactcatctttgaaatatactgtgcccatttcctacactaccagtgagacaaataactttttgaacaccacgccaaagtttattctgaaacccaacgtaactacgacggttcaattcaactcaacaataaaatggattgtggtcaatattcagcagaccggatattaccgtgtcacctactccgacgacaattggcatgccatccaccacgctctgatcacagccaactggggaggaattcacgagaacaatcgcgcccagatcgtggatgatctgttcaatctggccagggctggatatgttacctacaaccttaccttggatgtgatcgagtatttgcagacggagaccaactacatcccctggacatccgccttcaacggcttcaactacttgactatccgcctcggaaacgacacggccgatttcaattactatatccagaccctgaccaacaaggcctacaatcagctgggcttcaatgaagcatcgaatgatacagccttggacatttacctacgcactaagatcctctcctgggcctgtcgctatggcagctccgattgcatcagccaggcccagggctacttccaatcgttggccaccgtgcccaagaacatacgcgccactgtctactgcgtgggtctgcgtgaaggtggtgaggccgagttccaggctctttacaacaagttcaagaacgagaccgtggccaccgaggagaccctgctgcagaactcattcggttgcgtcaagacccagtctctaatcgagaaggtgttcgatctgatcatcagcgatgagattcgacgacaggacaagtcatccgtgctggccactctctacacggagaacaacgagaatgtcagtccggtgtttgcactggtcactcagaaatacgaggaattggctgaggccatgggcggctactccgctgtggccacggtgatttccaatatcgccgcccgtttcaccacaaatcagcagttaactgatctggagaacttcaacaaggctaatggcgccaagttcggcagctcgcaggccactttgaccgccgccgaggcaaccgttaaggagaacttggagtgggctacggccaagctgggcgttttccgcagctatctggccaactatcgtagtggaagcgccatggtcaacgccttcagcgccatcagccttttgatggtggccctggtcaccatgctgcagtgtgtccgaatccaacgctccagtaatcgagtttcggtcgccatgagcagttcgatatttcgggccttttggctactttgttcactgctgatctgtgtcacgaatgccgctgattatcgactggaaggtagcgtcgtaccatcgcactacaacctgaccatcggtgttttgcggaactcagtcgagcccactattttcgatggcgaagtgagcattaccttgcgggtggtcggaactttggaggtgcaacaaatcattctacacgctgatacgctcgacattacggaatgttggcttttggatgcggcaggtgcgcaggtggaggccatcgatatcagcaggttgatttatgaggccgccacccaacaggtgagagttccgctgacggaggccgcgcagccaggcaaaaattatacgctcgggttcaagtacaccgggcacatacgaacggatatggccggcttcttctccgccagctatgtggagagggataccaatgtgaccaggtggttggctctcacccagatgcagcgcatcaacgcccgtttggtcctgccctgcttcgatgagcccgccctgaaggcacagttccaactgcagattgttcggcccaacgggtatcagtcgattgccaacaccaagctaaaagaaactaaagctttaagccaagatcgttttgtcgatcacttcaaggagacccctgtaatgtccacatatctgctggccttcatggtggccaattattctgcacgtggaaatgagagtgagttcgcagtgctcactcgtccggagttttatgataacacagagttcagctaccatgtgggtcagcaggtggtttcagcatacggggagttgttccagagtccatatgctgaactgggcaacgatgtgctgcagtatgccagttcgcccaggttcccgcacaacggcatggaaaactggggcctcataatctacagcgacgatgtccttatacaggaacctggatactcggatgattggtcggataaggagttcgccatacgcatcatcgcccatgagacctcacacatgtggttcggggatagcgtgaccttctcctggtggagctacttttggctcaatgaggcctttgcccgctactacgagtacttcatggctcatcagctctatccagattatcacttggacgagcagtttgtggtgcgccaaatgcagctgatatttggaacggatgcccagaacggcactcaacccatgacaagtccggagtcggagattcaaacaccctcccagattgcctacaagttcagcgggatcgcctatgccaagggagcttgcattgtaaggatgtggcgaaatctcatgggagccgaaaactttgacacagccatcaggagttacctgcagcaataccacttgaccaatacagtaccttataacttattttaccatctcttcgagcattggccaaagaatcaggatgtggatctggttgactttcttaccgattacaccgagcaggttggttatcccatgataattgtaaaggctttacagggtaacaaggtcgttactgtggagcagtcgcgattcctccttaacaaagacgatggcagtaatgctacactgaaatacacagtaccaataactttcaccactaatctggaacgcgatttctacaaccttacgccatataaatacctacacaaaacagttaacgttctgtggctggattttaccagtccaattgattggattttatttaacctgaggcagtcgaactaccaacgagtgttctatgacgacactttaagggaaggtcttctgttagccatctcggcaacgaatcacagtggaataccggttgagaaccgtgctcaaattattgatgatctcttcaatttcgcgcaagctcaatatgtggattatgctgatgtattcaggttcctggaatacctggcgaaggaggtggagtacgtgccctggtatgccgtctatgagaacttgaatacggtggcaaagcgattgacacctgaacagctgcccgacttccggatatatctttccagcatcacagcagctgtttttgaaaaactaggagttggctggaacgcccaggatactcctgtagttaattag

SEQ ID NO: 12360 - protein, 1646 aa, DROSOPHILA
MFAPRVAVLLVACVSLASAGTRQLSVDVQPPATLATELNEYRLAEHITPVNYNITLRPYLLETDGNKRFTFDGEVWIEVISNQTTNDIYLHSKNLTYSVREYWQKPTTEVANPTVIQISATNTTNYDTDIVKLTASTALTANTTYILHFVYTGLMEDDMHGFYRSSYVDDNNVTKWLGSTQFQTHHARRAFPSFDEPQFKATFDVTLKRHRTFNSVSNTRLISSYPSTEEGIFSDVYKTTPKMSTYLLAFIISEFVARKDDDFGVYARPEYYAQTQYPYNVGIQILEEMGQYLDKDYYSMGNDKMDMAAIPDFSAGAMENWGLLTYRERSLLVDESATTLASRQSIAAVVAHEQAHMWFGDLVTCKWWSYTWLNEGFARYFQYFGTAMVEDKWELEKQFVVDQVQSVMAMDSTNATNPLSDENTYTPAHLSRMFNSISYNKGATFIRMIKHTMGEQQFQKSLQEYLKKYEYQSSLPEYLLGAWQANWPNSSYNESSKDIFKSFTEQVGYPLINVTVGNSQVSFTQKRFLLKESDGSDSSLKYTVPISYTTSETNNFLNTTPKFILKPNVTTTVQFNSTIKWIVVNIQQTGYYRVTYSDDNWHAIHHALITANWGGIHENNRAQIVDDLFNLARAGYVTYNLTLDVIEYLQTETNYIPWTSAFNGFNYLTIRLGNDTADFNYYIQTLTNKAYNQLGFNEASNDTALDIYLRTKILSWACRYGSSDCISQAQGYFQSLATVPKNIRATVYCVGLREGGEAEFQALYNKFKNETVATEETLLQNSFGCVKTQSLIEKVFDLIISDEIRRQDKSSVLATLYTENNENVSPVFALVTQKYEELAEAMGGYSAVATVISNIAARFTTNQQLTDLENFNKANGAKFGSSQATLTAAEATVKENLEWATAKLGVFRSYLANYRSGSAMVNAFSAISLLMVALVTMLQCVRIQRSSNRVSVAMSSSIFRAFWLLCSLLICVTNAADYRLEGSVVPSHYNLTIGVLRNSVEPTIFDGEVSITLRVVGTLEVQQIILHADTLDITECWLLDAAGAQVEAIDISRLIYEAATQQVRVPLTEAAQPGKNYTLGFKYTGHIRTDMAGFFSASYVERDTNVTRWLALTQMQRINARLVLPCFDEPALKAQFQLQIVRPNGYQSIANTKLKETKALSQDRFVDHFKETPVMSTYLLAFMVANYSARGNESEFAVLTRPEFYDNTEFSYHVGQQVVSAYGELFQSPYAELGNDVLQYASSPRFPHNGMENWGLIIYSDDVLIQEPGYSDDWSDKEFAIRIIAHETSHMWFGDSVTFSWWSYFWLNEAFARYYEYFMAHQLYPDYHLDEQFVVRQMQLIFGTDAQNGTQPMTSPESEIQTPSQIAYKFSGIAYAKGACIVRMWRNLMGAENFDTAIRSYLQQYHLTNTVPYNLFYHLFEHWPKNQDVDLVDFLTDYTEQVGYPMIIVKALQGNKVVTVEQSRFLLNKDDGSNATLKYTVPITFTTNLERDFYNLTPYKYLHKTVNVLWLDFTSPIDWILFNLRQSNYQRVFYDDTLREGLLLAISATNHSGIPVENRAQIIDDLFNFAQAQYVDYADVFRFLEYLAKEVEYVPWYAVYENLNTVAKRLTPEQLPDFRIYLSSITAAVFEKLGVGWNAQDTPVVN

SEQ ID NO: 12361 - DNA, 9370 bp, DROSOPHILA
ccccccccaaaaggtcaaatggcatatggtacacgggcgtggtgtggacgtgcttgtggggcgacctttgatccttgattcgtcgttccatcccatcatcgtcactatcgctcccttcccacccctccttcgcacgactacaggtcccgcggttaatcaccacctaaacttaacgcctgcactatacgtggatcagctttactgccctcgcggaactcctccagcgtcagtcgatcgtcgtggttcttgtccatctgatcgaagatcttgtccacccgcttctgcggcgtgttctcgtcctccgtctgcggctgttgtccctgcaagcaagtgtttactgtagccttggcatatagctgtacggatgcagtgatacttactaccatctggtagatggcgtccactatgttgtacatctcctcgcgtgttatatagccatcgttgtccacgtcgtacaaacggaaagcccctggaaaaagtcaaatagaaaacgttagctatgctatgagggattatgatctatcatggaaggaatattatctatctttatgctaattaaaacaattactgttcctgacctaaaaagtggtaacataattccaatgtactattttaccataacaggcaaataaaagtctcacaactatgcaacatttcccagctaatgctatagaatattcatttaatcaaatcgaaaacttacagtgcagcttctcgtccagatttccgcgtgatgtgatggacagggcccgaatgaactcctcgaactcaatggcgccatcctgcggattcgcacagatgtgcagatatgtagataagatatttatatatatatatagtcacacgtcagcatatcagcgtactcacattattctcatcgaagacacgaaagaccagggaggcaaatttgctggggtctccgtcggggaagaattgcttatagattttgatgaagccctgcgaagggagatagcgagagggcacgagaaacagacagagaggggagatggcaaaggagagcggttagacaagtaaatgtttgctattgccgtcgactctggggttcagtgttgagtaagcaagtcagaactagacacataaaatagcattagagtgaaaatttcgaaattctccagttaagtgaaataaacgactcgcacgaatgggtgggtggtgcatttcgatttcatatggttttgggttcttcgccggcgcaaaggtatgcgttcgtaaacatacatatatcggaatgtaagtgtaagtgttagctgggtgtaggggaaatttatgtggcaactgttccttctcttctgggggacgaaaatgcagtttatttgctgacgttgcagctgtgaatcgaacgacttgaaaatgtcaaatcgatgaatggattaccccgccttcggatgtccacagtacgaagtccggtactgcggacacatgaatgtatggtacaacttgtatttattttattcaagccacaaaagtcagccacaaaaaagcaccgaacgttgaaaataaagacaaaccgcatttcaggattttggggcagagtgtggcttaaatatattgtataaatgtgtgtaaaatatacgaatatatgcacatacatatgtatgtgcatataagtatgtatgcagtttgccgggtatgacccgaaataagaggattccgtttgtggtcgcttatgatgaaagccaggcaaatggttggataatggttgatgatgatggtgatgatgatggcgacggcgacgatggaggggggataaaattggaggggtactcacttgttcggtcagcaagccattcggacagtctttgagaaagcccttgtgccttcgatgtgtcagaggtcagagatcgggatagcggatagcatagcacacagagatcacaggaagagacagcgggtttatagagagacggagcgagataaacagattagcataaaggagagagagagagaaagggaggtggcagttagatagggagagagagagatgggggacagtgcggtacccagaaataatataattcagaaattaaattaaaaaccaataattgaggcagcacacaacaaatgaaagataaatattggctccggaaaatgtttacctccgggaaatcactcgcactcgcactcccacacgcgcacgcttttgcatttcgcatttcgcattttaaattctatttacattttatttcgtgctgccattaatttcaacttttcccaatgcaaccgcagacagcgagctgaaatttgctgcaattccaccattaattatagccacacaaaacgcatcggaaaacgaaacatttaagtcctgggcgctcgtaatcgaattgaaagagtaaatgaaaatgaaaatgaaaataccgaaactcatagggattcgaatcgaatacgcaaatagagaaaagcccgggctgtgtagtgcgaaaaatccatggacatgcttaccattgacgaatttccttttcagtgactgcaacgagaggcaaaagggagaattttcagattagttgagcaattgcagagggaacaataaagcggcgggctaaacggccgcacttagttgcgcctcaagggtcccgaggccatcattcttaatatcaacatcgagcccaccaacacaccgatatcaatcccccccaaatcgccatccaaaaccagccttagcagtcccaaaacaccatcccaccctcttatccagcactcaagtgcctttgctgagccgctgagttatggcggcttaagttcgtctaaggctaggctgcccttggagattgatggcgttcacttgacaggcttagcggacacgtcccccccttcttctcatacccatccacatccgcattcccatcaacattcgcatccgcatttgtgtttttgctgatgttgctgctgatactcgcgccacgctgcgtatgagtaatatgcaagcacaatttacgaccagctgaaagggaagtgcatcagccatggtgagtgcacaactcatttaataaatcatttaattaattacaacctttcagtgttacctttgcatggaggtgtctatagagtggtgtaaactccatatcaaatatttagtttaaacgtacatacatttaactatttggttatctaatagatacgccaaagcggctgtgaaccgcttaaagttttaataaatatgcataattaaatgacacaactaagcccagccagacaataatcgaaaaagtaagctttaaacaaaccattttagttatttatataaattaagagaaactaataggtttttccagagtttagtataattttcttggtaaatatttttgtaaattcaactaaaaatttgattggtttttattcactcacatgtattattatttttattttttgtttaccccacaattatagagctctcttgggcgcaagtatggcccatagtgagagatgtgggctaaaaccactttgaaaatgaaaaacaaagcggtattggactgctgatgatgatggagacgaacaggtctggtgatggggcgtttgggcaagggccctccaataggtgaacctttttattccggttgaatgtgccccacgttgggcgccaaatacagcttcagctgcttcacgcagcaatggaaattggccacagcctaggcccatagcatatacacgagcatatctagatacatttatttatgcctgtgtacgtgtgtatctgaataacccagagattgccccgcaggcttgttaaaagtctgcgcacgccaacgcgtcggctaagtaagctccaaggagcgttatccttgtcgctgtcgatgtcggccgacgacttttactgcggctacatgaataatacatatcgctggctgatgtgctggtgtttgtgttgcgccggcagctgtaaaacaaattagtacgtagtcccactttccaggacagcgggggctgtgcgggtcctgggaaaaattatttcgatttaaatgtttatttgcacaaggcggcactcgttttttttttcgaagcaagctgtttgtggcccgcagcgtttattcaatcttatttatattttttttttgaggtgcacaaaaagagccgaaaatgccgccagcctggcctttttgtatttacttaatttaatttttaaactgatttaatttcaacttttcacaagcaccacacacacgcacacacggagtgtaaaaggatggtgacacagcaaggacctcccgctgggtgtggccacatgctaattaatgaatggctggcaaaggccccacgccccttctcccttttccctttccattttccctttctcctttcccctcgtgcctctctcgaaagagaaaagtgctgggggaaaatgagtagtgaactttaaatgagctgctagctgcatgcgggccacatacacacacacacatactcgcacacgcacacagggaaaatcacaaggaccgtgcgtgttttttggccaccaactcaactcaacttaactcaacaaccttgcagccggtgctccacatccacaaggatgtgcgtcgtccccagttcggctcaaatatttaccaaacttgattagatcccagcgattccgaggcggggcaacaagtgacctcgccactaggcttaaccctgagcacagccacatcgcatgtctgtggttaaccccttggtggcctcgcacgcaactgaaacgcaaccgctcacctggggcggggttacgcccccattgtcccagccacatagaccgaccgacccatacttatagacgcagtcatagtcacagtactttcacacaccccgagcatgaacaaattggcctggcaactggtgcgcaaccagacacagatccaatctcaaattggttctcggaacagggcccagatgccggtgcattcacctactaattaatcatgatcctatctaaaattagttcttcgaatatgtattcaaggaggcacttcacattgcagaagataactctaaaaatatctacggttttgttgacactagcgaaggtggctaaaattatgcaacaatttagtttgaaaacgttgacatgtgtattaattgcaatactagtgatttgtgattttagaactgtattgatattttccatgttccttgtttccattttaatgttaccaattggattggaaagcatatgtccctgatacttttaggccttatttcgataacccttttacaatgtgcgcctaattgggctggctcttttgtattaatggcctgctgcaatgcaatgcaaccctatcgtatggaatggcatattagcagttcagtttccattgattcgattcattgccttgattgggtttgcctgctcattgcatccccactcattgttcctgcaatgctaaaacatcgctgccagctaaagttgactcaaagcacatcataatttcccatcgattggcaattttctaatgtcgttatagggcaatacgcccactttcgtacccacttccctcacccgccgtttccctagcgaatcgctttctgtttgttgctttatcaatttgcgtctataaacgagcagcagccagggaatggcagtaacagagtggagcctagtggaactgaacagtgctgaaccgaataactgactcaatgaatggtcgactgatgcaagcggcatatgggggtctgagtgggggaaggttctaaggttgaggaggtggttggtttgtcgatagggttataggttgcccaatgccggcgccattagcaaattatacacaacatgtgtgcacaacattggccctgggctaaaagaaccaacaagccgggaaatgcagactggctatcagcccatttccacaacccttcgatcgtcttctgatttttttcccttacactcaactaaatctggatcactattataaaaaaaaatgcattacatttggcattgtcaaacgaatgatatgtataagaaaactaaccaagtcgcaaaccccagattcagttcccttggcagtgtccttttcgctcagtgtatgctcttgccgttctgttatgttatgttcagctgtgcttgttgcttgtacacatttgatttccactgctaaatgccagacaaaatgtcaggacaagctgagtgctccctcaactaaccgcccactcagtccaatctcgtgcagggaactgggtgctggggacagggaacacaacaagtgcaataataatttcaacattgaagtgaattttgagtgtcagccaatgcgtgcgaaatcagctgggaggtgccaacagggcggatgtggaatgggcatgggcgtggacatgagattggtgcggtgggcgccagaggacatagaatctttttgccatcctcgacagcaaaccgactgggatgttctgtctgtttgcatagcgaaatgcatgtgccaaagccaaatgaaggcggttccgaatgctattgcaatatgacattgctgcagcgtgtcgtaagccatgggtgtggaagccatggaagaggtcggatcaggggggtccatttacccatgtcccttggcaagggtcgtgcattttagttttataagcgatttggccccaagtttcgccataccgtcatagcgccattgcgccccatactgcgactgtttgtcgaagcgtaaaacaaacagaaattgacatgaaagccatgtgtgcggggtgcaaaagaagggctaaagaagggttgcagccaggggtgaagaagggctaaataaatggaaacccatgtggcgagctaaggggcggcgaaaagtaatcaaatgttgcacacatttccacttgttattctttcgcccgccattcactgaactattgcactctaatgcgtctctatgccctacgcctgtccctcagtcgcccctttttctctcattcactcgattcaattaagaattttatgacagaacaatcaaaatgtggtcttaagtgtaagtaaagttcagcgaattagcaggaagtgtgtcggattggtagaggagtttatttacatttagaatacaaggctccactgcgtagccccgatctggctgtacggaatacagatctggggtatcgcagcaaaatccaactacaaccgcattcaggtattgcaaaatcgtgccatgcgtgcaattacagactgcccatactatgtacgtggcactacccttcaccgtgatctgaatcttcatacagtggaagagcagatctccaggcacaccagcagatatagtgatagactaagacgacaccacagtatacttgctagacgcttactccctgctaggcctctaaggagattaaaaaggaagggtttcgccaaaacacttggacaaccctaaagaccccctcgaaatatgagacaaagttgtaagtcctcacatgattagtgagaggtttggttttatcttttatatgttaattgcgctgttatgttactgttattgcattgtattgattcatcgcttctaaataaataaatatataaaaaaaaaagaatacaaggcaaaccataatgctttatagtgtagtacattaattcaacaagtatacccattagtctgccaaatttagagcatataaattagatgtattatttaattcgagcgctcattttgaacacacatgccacattaatgaaccgccaaacagctaaatgagtgtttaggccaacactgcgttgctccgcaatttatgggcattaaatatgcactcaactgaccgctaatcgaaaactaagccgttcaataaaatttcgcataatatcaaaatgccgtatgacgacttaaagcgcaacgaataaaaggttgccgctccaaactcacatatggcagtcgtatcgcataaaaggaatggagaaaagaaaggcggcaaaaagtattgcctacttatgggggcacttgaggcaataaacaataaaagaaaactcttaaagctcatacagccaagcgcttaaactgcaatcgaagcgcaatgggccaatggaggagcctcctccaatgaagaaacctccattgcaggactcgcgccaggacgacttggcacacacacataccaacatatgcacacacacatacatgtagtcgttgttggcccctcagggcgctctggcatgtgcaactattagaaaatataaaactgtatgctacgtcggtgctcggtgggttcttcacacacacattcacacatacacgcatgcggatgtccaagagaaattacataaaaaattaaatggaacacaagccttgaggggccttagcctgcataaaaagaaaaaaaaatgcaacggaatcgaaaagtgttcaacgacgaacgtctaaaatggtctggaagcaaccaattttgcaacattttgtggcaactaaacaaattacaagtccacagtattgcctgccacattttaaagctgacaaatttgcctttttccggaatttgtgttacttccgtgatcagttttaattcccatttggtaatgcttattaaagtttttttttttttatattcccacggctaaaattatttaatttcttaactacgaatatgttggcgatactacaacattctatgttttaagttaaaccgtataattgctaccagctcgttccttttcaacctcttgaaatattacacaaatatgttaattttaaacaaccatttgaacattcccactgctgttagcatatttaaccattaaggatttgttggccatccacagctaagtgaaatggaatttgctgaccaaatcccagaaatcccagaaataatgaatggccagttgcggggcaaatgagcagttgaaaggattgcgctttagtcgagaaatgcgagcactgtgagaacttttccactgatatatgatggtcgtgccgtggtgcagtgggcatgggacattatcggagctgccaaaaaggctttcaggcaacgactcgtaactcattccggggagttcaaggctgccaacgcacccagccgtgatttgtggccagaatacgcaaccagatggagatatatatattacagataccaaatgcacgcaattcgagatgtacggctacttacagtatgtgtctgttgtcagccgatcgatggtgtcctgcttcaattttgaattcttcttgcccatggtaaaggttcgccctgtttccgatgacgatacgtctacttttcctctttggcggataaggcttctgcttctgcttctgcttctgcttcttgagctaactggccaagtgggcggtcagtgacaggtaattgggtgagcgtgtcttatcccaaataggtctcagttcgatctgcaagtacaagcacaagtagcggcattggattagagatagtcacccgaaaactgaacgctgtcaaggcgaaggcatcgctcatcggt

SEQ ID NO: 12362 - DNA, 743 bp, DROSOPHILA
cttgcagatcgaactgagacctatttgggataagacacgctcacccaattacctgtcactgaccgcccacttggccagttagctcaagaagcagaagcagaagcagaagcagaagccttatccgccaaagaggaaaagtagacgtatcgtcatcggaaacagggcgaacctttaccatgggcaagaagaattcaaaattgaagcaggacaccatcgatcggctgacaacagacacatacttcactgaaaaggaaattcgtcaatggcacaagggctttctcaaagactgtccgaatggcttgctgaccgaacaaggcttcatcaaaatctataagcaattcttccccgacggagaccccagcaaatttgcctccctggtctttcgtgtcttcgatgagaataatgatggcgccattgagttcgaggagttcattcgggccctgtccatcacatcacgcggaaatctggacgagaagctgcactgggctttccgtttgtacgacgtggacaacgatggctatataacacgcgaggagatgtacaacatagtggacgccatctaccagatggtaggacaacagccgcagacggaggacgagaacacgccgcagaagcgggtggacaagatcttcgatcagatggacaagaaccacgacgatcgactgacgctggaggagttccgcgagggcagtaaagctgatccacgtatagtgcaggcgttaagtttaggtggtgattaaccg

SEQ ID NO: 12363 - protein, 187 aa, DROSOPHILA
MGKKNSKLKQDTIDRLTTDTYFTEKEIRQWHKGFLKDCPNGLLTEQGFIKIYKQFFPDGDPSKFASLVFRVFDENNDGAIEFEEFIRALSITSRGNLDEKLHWAFRLYDVDNDGYITREEMYNIVDAIYQMVGQQPQTEDENTPQKRVDKIFDQMDKNHDDRLTLEEFREGSKADPRIVQALSLGGD

SEQ ID NO: 12364 - DNA, 10432 bp, DROSOPHILA
ttctataacctaaaagcgaatcaaaaagctgacattttagaagacatagaagaaattgactcaaaataaggcattgcaattgaagttgtaaatcttgttctttagtttttggtataaggacggattcatcattaattcatcatcattagattgacacttctagtgtctttggtttaacctgaatcaggctagtacgggaccgagtacgggacagagcctgcactttgagatgttctcttaattttgttttttgttttgctcttttccatacatagctttttgcatagccgatttgtttaaagctggcactccgccagccaagccgtatcattaaaagcattttttcgtttaaaaaaataatgatcggaattcgaaggcataataatctaccttttttgatatgtggactttgtgaaagttccagctgctccttcctcctcgccacaatgaaggagagacagacagacagagtgagagagagtgagagagaggtggaaatgcggtgcattgacacgcgcgcggcgcatgctcttcgctctcttgcaggaggataaaaatcaatgatcctggctgcggtgtctgcgagtgcgaaagggatagccatacaggcaacagtagtacgtctattacgatttacgtattaatactagtcgtagtacaacaaaattatgcacttgcatttgtccatttttattaattgttcaacttgcccacaataaaaagccagactgtttgattctaaacaacgtttatgggccccgccttcactaaaagtggctaaataaagtttcagtaatagcaagaaaattaaaagtgcggaaggccgaatgaacaactgcattgaacattccactcaccaaagctaggcagctgagagagggtgtctgtctacctctctcgttggcagttctgaaaaaaataaccttaaatgtttacagaattagcgtgaagccgagggattcgaaatcgacttcggcagcgctcgtctcgttgcttcgtttcagttgaatgtcgaatctcggcccgtatagacacaatggacaactcgctttgagcgctgtctcgatttaaatttatacatttaaagtacaaaaaaagtattccacggtactgaatgtgatagttggctttgtaattgtaggcgatatagcagcagcaacaacaaaagcaaatacagagcgtaggagataacagaaaacgtgttattgtgtttttccgttcgtgttcacggaaaatcaatagtgattgtgaaagcgcattatttacacgattaacaaatcgtcaaatctcaacgcaacggaaattttccagtgcaaacttgagtttttcaagaaaaagagaaaagccgtcaaggtgagccccagttttataatctagtatggtattttgtgtaccccaagcgaaaaataaccccaaattaacgaaaacgtgtcatcagaaggcaaaggcaacagctaaaatatattttgtttgctttgcttgtatctttactcgcacactcacacacacactatatatcagtaaaaaaaaaaccacacaggcgcacacgatcatacgagtgcccacaagacaaagttgtcacatgtggtttaactgcatttacgtttccatttgttattaataaaacgagtatacatacttttgcatcagtatacatacttctgcatacataaatgtaaattaccagtaaggggtttaaatttaaattccttttaaatcgaaaacgttttattatttttcgtcgggtgtgcttcgttttcttttgtgtttttttgtgcttgcataaaaagatggcgaccgtagagttgctgaatactcgctctcttatttcattttaaattatttacggaattacaaacttgtgtttacccagtgaattcggcgaatttttcggtaatggttaacaacaattcaaaatgacacacgtttgtttgcacgtcttttctggccatatggtaaccctgttttcacatcgagtggtttcatccaaaattccgcaccccgcacttgccccttgatcatcaatgctgctttaaaaacaacatactcaattggattggatgatgtggatggagaaaaataaggggcggtcattgtaccatacaatgctataattttatatattcgcccaaagttgggactacgcaatacacagtattcgtctacgcttaaattaagcgatgactacatacatatagcatccaaaatataccagtttagcggattcgaaggtcattttatgtgtcatcctaccatcaatagagagctttataatgttctaaataaatttaattgttttcgagaggaaaaatgctattatattattgtgaatcctataaacgagtagtttgctaaaacaagtaaaacaacagtttaaaatataatttcttaacagtattttttaccgtgcattcgcataaacagatgacgcgtcagttttctgggtatatacacatacacatacagtactccatttgctatatacgattacaatgtgtgtaacgtacttcctcttttacgcacacactcataatccggcccaacccaccaccaccaccatcgtcatcggaggcaccaccaattccggactatggagcattagcttctttgtggaacatccgctgccaacggaagtggtgcactcatgcgtgtttttcactctgcagaaaaggacagaaaataagtcgaaagacaacacattaccattgccatagaaacggactctgaaatgcgtttgaggagcattcatttttgcacactggtgactcttttttttgcttcattactttcaacttatgtgttcgtttttcgccgaacaaagagaaagtctctcagtagctcaattcgagctgagtctgagcttcggcttacagctcaataaagtccgacttttgtaaatagagctggacttctcttatctgaacttatggtaaccatagcaatcgcaatatcatgttcttgaaaccgttgtatcagtactaaactggtgttatatgctcgtagtttttaatactgctcataggattttattattattattccattttgatgttaagaaaatgtattaatactttaaggtataaatgtgttttaaccgaacgaagaaacttattaaaaaagcctgaacaagctgttgtttccttgtagggatttcaagttttgacctgtttttcgatggcgacgtcgcagggcaaacttcttcaacttccattatccccgcacccacacatcatcgatggtggtccctgtgcccaccttttcccactcccacgaaacggatttcgagaggagtcgagacaattcgttaataaaacgatagataaggtgcttaagacacaacaaacagttctcacgtagacaaatgctgggagtagtatttttttcgaaaagcagaataggatctattgtttgttcgtctgggttccatttgttatcgccagcagacgcaacggcaatcagcacatgaatggaaatggaccagtccaccgcggcccttgaaagagaatcccggaaaagaccaggcataagatgagaataattacaattcggaattcccggaattttcgatgctcgcccagctgaatcatcgcgtcgcctccacgacctttgagcgtggaccgcgtgaaaaacgacctttcaaccattatatccactaacgaggggacatcccccacccctccctcccctctccactaaccacgcctgatcttcatctcacttcttttccatgagatcgtacccacattccaagtcccatagagatgctgctgtgatgataaatgcttcgccatctcattcgcacacgacttgactctttgggtttgagaacaattttcccttggttttccgaggaaaaacgctggcggcgtcggcggttctggtactttgaaccaagccgccgttagttatttcgacaatcgatcaatgttcaatgggaatgagagagagagagagagagggatatatggctacgagacgatcttaatgcattctttagcagctcggatcggggcgcatttattatgattacaatattgccctttgttggccagcatcccatctctgttttcttctcgtattatcgacgtcggcggtcgtggtcgttgtcgttgtgttgttgctgcatttcttggaaggccacagcactcacgcacacacagacacacacacacacacagtttgctggagatcatgcaagaatgttccttgcctgtgctgcatttatttatttttctgcatcctccttctgtgtgctccgctcttccctcttcatcgtcctcctcatcggattctttcacttcggattctttagcatcatcatcttcctcttcttcacgttgtgagcacgatgcgctccgcttctccccttttaaccctagcttgctgttgttgttgttgcccctacagtatctggtatcaccgcattccaatctcgttttttttattttgtggaaggcaacaacaacagtaagaactaaaagaatggtaaagtgtttataatagtttcccacagtcgagctcaaacagctggggtaaaaactttagaaccaatcaattttcagataaaaaggtatttttcaagtatgcagcaaacgaatccttacttcgcttactctgatgataagttgtttaattaaaaatagtagtattaagaactatttcatatatatatatatactacagatatataaatttatacataattccgcaaactttgtaggctgtatacactacgtgcaagcctattaatttgcccttgtctgtagttgcagaacgcagaccttctccacggcttcggacctctgcggttaccttcacttactgcaacgatagcagcagcataactccaatcacttgggccccagctttacttaccgactgggaatggaatgaaatggcctggcctggctgacttggcttgcgttggtttggctgggcttattccaatcagaaaactcgaaaggcagctccaacctcgatggcactccaagccagtttgattttctgtggctgagttttgtagaaaacttgcccgactgcattccattggaggttcgttggtttggttttggttttggtttggtcttcgtgttcgtttgttttttttttttttttgagttttctgtttgttgccttgccttgcctcctgggcctagccttttgctttggcctttgattatgattttctttgctgcggagtggtattttcttctggtctctgggatcgagctcccatgccattcatgcgccgcccaggaggccttgtctcttcagtcggtcttcggttggtgttgggtgaaggcgctgctcacggtttatccattgctcgatatatatataaatagtgtagttccttgtctgccgcacaataattttgtggaatatatcaattttaaagttcatcgagttttttgtattttgatcgacactggtaagtgtatgaagtagtagtaacctgtataattgagtatatgcaattgtctggctcttgaactttttacggaatttcctgatagccccggtgaaattccaatagtcggtttgcattacaattgttaatgggcttggcattccacaataacaaatagcagacgacggcagaggcagctgtaattgcactttgtaatggctgaagaagcaaaacaaacaataatgataataagctgcactaaagaccgaagactcgaatactctcgcaaaaacaattttcacttcggtttaatatgaaactttgtaaaagcgtaaattaaaatattatcataatatctttcaagtattatgaaattatctgtactaatgtgcgagatatttgattttaaagctacaaggtattgcagaattgcaatgccaacaaattgcaattacaatctcaagctcttcgtgtgcgtttctgtctgctgctgtcggctgctccacttcaaaacaaagcgcaatctctgcagagaaacagacccccatttatatagcatcccccgatctggaagcatcctcaataagtatgtatgtatacaccgaggtccagaagtcagcatttgtaaattacaattgcttttgtttttttttgttttttttttttttgctgcactgtatgtgtgtgtactgtttttccatcttcttgtttttgtgttgcgcttgctgctgcactctgttttctctgtggttagttgtttttcccattgatggtttcgtctttgcaccatatggccgtctcgcttgcaccgccaggctaccaatatgcattatatgctgcgctttatgctgcaagtcgggctccatggtggtggagctgtggagctgtgcaactacagccagagtcgacgagtgcgccgtcgccagagtttgactgcattccattaaaactttctcacagtcggctagctcgcagtggtgctccacagtgcatggcactgccagctaacccaccgatggccccctgtcctcctaaacctccaccgcccgatccgttgcaattgtttggcgtgtttggctggtttgtggttgaaatggactttgaacagtcgggagtccaactcagcggtcgtgctgaatttttctttttttttggcccatgcacaagctcaggcgagtaaatgtacaatctcctttaaagagaccaccgcgaatacagtttaggttcccagtcagcagtcgatatgtttcttacggtttcagaagctttataaagtaatttattgtttttcgaattttgcgctaattaaaaatatatcgattggcaatatctgatctaaaattacgtcgtaaatatacatacatacttgcactgaacagtaatcgatatattgaactatttcttaaacgcatacatgtacatatatgattttcctgtcattactataattgccaacacagcaacaatctacttcaagttcttgctattattattgaaaatatttaccaggtgagtcaggtcgagtatcgttatcgagcaacgtctggctggcgccacgaacttttctaagaaaaaaaggaaacaccaccacccacttagctttgcctttggtggtgctgttttggataggattaggatttgatactaatactcactgcgattctgcgcactggaaaaagtagcggttgtaacattgcgtattcgatggcactacgaatatttgttttttttttttttttgtagtcgcaactcgggagtttttcccgaagggaaaaaccacccttagctcgagtgcgagcaggacaaccgctatgttttccatcatataagggctcttaaagttcgttgatgctgcatccccagtttcttgaactgcgtttcagtttttccctgcattgtacatacacactctgaaagacgtagaagtcgtactacaaagtgtctggaagctttgtttgtgaaaattttggtcctttttgcagaaaaaaaggtaaaaataagaccaaaatgtggctgatcgatttaaatataaaatcaacgataacgaaaacttgttgaattatttttaatggaaattttatttaaaaaagataggtatattgtgctgccctctaatttacttgttgtaataaggaaataggcgtgttttaggaaattatgtaattcacacaaaaatgtataggttacttaggaatttattttactgtattgatatctccactaacgactgaaatctttgttaaacacccccccttatctgtgatataaaagtacgcttgaatttgtagtccgtgacagttgaccattataagcagcatgaaccagtatacaaatattaacggattctctcttttttattcagtttcgacttcagaggaaaggagccagagaagaaattaagagtcaggcaaacaaaggagctaacaaccagaacacaaaatggcatctgttgtagctgatcttccgtcttatggacctatcgcttttgatcaggtggataacaacacgaacgcgacccagctattcaaaaataatataaacaaaaccagaatgaacgatttaaaccgcgaggagacgcgattaaagaccttcaccgactggccgctggactggctggataaacgccaattggcccaaaccggcatgtacttcacacacgccggcgacaaagttaaatgctttttctgcggcgtggaaatcggttgctgggagcaggaggatcagcccgtgccggaacatcagcgatggtcgcccaactgtccactgttgcgccggcgcactaccaacaatgtgccgatcaatgccgaagcattagatcgcatcctgccgccaataagctacgatatctgcggcgccaacgactcgacgctggagatgagggagcatgcctacgcagaaggcgtcatacccatgtcgcagctaattcagtcgattggcatgaatgcagtaaatgcggcaggcagtgtaactggaaccgcagccccgcagccgagggtaacggtcgccacccatgcgtcgacggcgacacaggccactggcgatgtccagccggagacgtgtcgtccttcagccgccagtggcaattattttccccagtatcccgaatacgccatcgagacggcacgcctgcgcaccttcgaggcttggccgaggaacctgaaacagaagccccaccagctggccgaggcgggtttcttctatacaggcgttggggatcgcgtccgctgcttcagttgcggcggtggtctcatggattggaacgacaacgacgagccctgggaacagcacgctctctggctaagtcagtgccgattcgtcaagctgatgaagggtcagctctatatcgatacggtggccgccaaaccagtgctggccgaggagaaggaggagagctcttcgattggaggggtcgcggtggccagcacacaggcttcagaggaagagcagcagacatcactctcatcggaggaggccgtttcgggggatgtggctccgtccgtagctcccacggcagccacacgcatcttcaacaagatcgtcgaggcgacagcggtggctactccctcgacaaacagcagcggctccacctccatacccgaggaaaagttgtgcaagatctgctacggcgccgagtacaatacggcattcctgccatgcggtcatgtggtggcctgcgccaagtgcgcctcctctgtgacaaagtgtccgctgtgccggaagcccttcaccgatgtgatgcgcgtatatttttcttaataaccccaatgcgcacccaagtcctcaaattcaaaataaacatgtctaaaaagaaaatgtgggcggaatgtgttaattataagcgtagaaaaaaatcgtggttcaacaggcgatcgcaacggccagctgtggggatgcccggcagctggccgttggactttagaagatcacaaagcctgccagttatcgtaagcctacattgtaatattagtttagtacagcacttctatgcgttatttataataaaactaatatattaccgaaaactcatggcactcgtggcagttttttttttggcgctgcgtctatgtttctacaagtaaagggtataaaaataaaaccacttttagataagcgtagatagcgctatcaataagttctttgttttaaagagcagagctcttactatggaattgagtaaaagcttttatcagtcattggatttataaaggttggtcattatcattgcggggcccacgcctaaacaaagtgcattcaactgcattcagctgagtgacaaaacagcgttctttgttgcctttgtcaagccgtacgaatgctgaaattttaggtttttgactgcgatatttgtttttggagctcagattcggattgtagcttttttcacctcatccgataagctcgcagtgcatttcaattagtatagatatatatgtgaatccggttacggattagccaaggtgagaagtgctgcataccctgcgaacgggtaggtgcgacttatcggttgcatcacccccttatgaatatgcatatgacacatggaattgcacacgtttcagataggagactcttacataaatttaattacgaaatgccatatgaatgaaacatttgcctgagtcaccagttctaagaacataccttttgatagtagtctgaaaatatcagcgagatattataactgaaatggcatttgactattgctgatcaagtatgcaaattgctgatctagattcaattgcttgcgatcgtaaagtcatgcggtgaccttagtttgcgtgaggttttcaattaacacacgaaggtcccggcgaaaattggcttaattctatctaatcttatcttatctagtatattgaagagctttagaaataactatatgggtattatctttgtcataaaatgtgtttgagaaataggtttagaaattaatcaattcaattgtctttcatgttacaggaatattggcgaagaaatttattaaagtttgaaaataacgttcactcggagctgtcgatttcg

SEQ ID NO: 12365 - DNA, 2013 bp, DROSOPHILA
tcagttgaatgtcgaatctcggcccgtatagacacaatggacaactcgctttgagcgctgtctcgatttaaatttatacatttaaagtacaaaaaaagtattccacggtactgaatgtgatagttggctttgtaattgtaggcgatatagcagcagcaacaacaaaagcaaatacagagcgtaggagataacagaaaacgtgttattgtgtttttccgttcgtgttcacggaaaatcaatagtgattgtgaaagcgcattatttacacgattaacaaatcgtcaaatctcaacgcaacggaaattttccagtgcaaacttgagtttttcaagaaaaagagaaaagccgtcaagtttcgacttcagaggaaaggagccagagaagaaattaagagtcaggcaaacaaaggagctaacaaccagaacacaaaatggcatctgttgtagctgatcttccgtcttatggacctatcgcttttgatcaggtggataacaacacgaacgcgacccagctattcaaaaataatataaacaaaaccagaatgaacgatttaaaccgcgaggagacgcgattaaagaccttcaccgactggccgctggactggctggataaacgccaattggcccaaaccggcatgtacttcacacacgccggcgacaaagttaaatgctttttctgcggcgtggaaatcggttgctgggagcaggaggatcagcccgtgccggaacatcagcgatggtcgcccaactgtccactgttgcgccggcgcactaccaacaatgtgccgatcaatgccgaagcattagatcgcatcctgccgccaataagctacgatatctgcggcgccaacgactcgacgctggagatgagggagcatgcctacgcagaaggcgtcatacccatgtcgcagctaattcagtcgattggcatgaatgcagtaaatgcggcaggcagtgtaactggaaccgcagccccgcagccgagggtaacggtcgccacccatgcgtcgacggcgacacaggccactggcgatgtccagccggagacgtgtcgtccttcagccgccagtggcaattattttccccagtatcccgaatacgccatcgagacggcacgcctgcgcaccttcgaggcttggccgaggaacctgaaacagaagccccaccagctggccgaggcgggtttcttctatacaggcgttggggatcgcgtccgctgcttcagttgcggcggtggtctcatggattggaacgacaacgacgagccctgggaacagcacgctctctggctaagtcagtgccgattcgtcaagctgatgaagggtcagctctatatcgatacggtggccgccaaaccagtgctggccgaggagaaggaggagagctcttcgattggaggggtcgcggtggccagcacacaggcttcagaggaagagcagcagacatcactctcatcggaggaggccgtttcgggggatgtggctccgtccgtagctcccacggcagccacacgcatcttcaacaagatcgtcgaggcgacagcggtggctactccctcgacaaacagcagcggctccacctccatacccgaggaaaagttgtgcaagatctgctacggcgccgagtacaatacggcattcctgccatgcggtcatgtggtggcctgcgccaagtgcgcctcctctgtgacaaagtgtccgctgtgccggaagcccttcaccgatgtgatgcgcgtatatttttcttaataaccccaatgcgcacccaagtcctcaaattcaaaataaacatgtctaaaaagaaaatgtgggcggaatgtgttaattataagcgtagaaaaaaatcgtggttcaacaggcgatcgcaacggccagctgtggggatgcccggcagctggccgttggactttagaagatcacaaagcctgccagttatcgtaagcctacattgtaatattagtttagtacagcacttctatgcgttatttataataaaactaatatattaccgaaaa

SEQ ID NO: 12366 - protein, 438 aa, DROSOPHILA
MASVVADLPSYGPIAFDQVDNNTNATQLFKNNINKTRMNDLNREETRLKTFTDWPLDWLDKRQLAQTGMYFTHAGDKVKCFFCGVEIGCWEQEDQPVPEHQRWSPNCPLLRRRTTNNVPINAEALDRILPPISYDICGANDSTLEMREHAYAEGVIPMSQLIQSIGMNAVNAAGSVTGTAAPQPRVTVATHASTATQATGDVQPETCRPSAASGNYFPQYPEYAIETARLRTFEAWPRNLKQKPHQLAEAGFFYTGVGDRVRCFSCGGGLMDWNDNDEPWEQHALWLSQCRFVKLMKGQLYIDTVAAKPVLAEEKEESSSIGGVAVASTQASEEEQQTSLSSEEAVSGDVAPSVAPTAATRIFNKIVEATAVATPSTNSSGSTSIPEEKLCKICYGAEYNTAFLPCGHVVACAKCASSVTKCPLCRKPFTDVMRVYFS

SEQ ID NO: 12367 - DNA, 3645 bp, DROSOPHILA
cgcagtcgtccagtttttgccctgctaccagatcgattgtggcatcgaggtcgtgtcctttgtgtaaatttcgtagagcagatatgccgcgtccgcttggatgggcaggatcacaaggagcgggaacgagacttcaagttcgaagaactgtatccacttaccaccgatcaggatgaggatgacgagctctccagcgaggagagcaactccagcatgaacgacaacagcagtgacgaggcggagtcggatatggatgatctggaggaagctagaagagcacgcatggtcgagttgagtttgtttacctttaagccgacggaacgacttggcgcctgggaggagttcacacgggtatgttgagcagattacgattcagaaaacttaaattcctataaatactattccctatagggcatcggctctaagcttatggagaaaatgggttacatccatggtactggtcttggctcagatggaaggggaatcgtcaccccggtaagcgcccagatacttccccagggtcgatctctagatgcctgcatggagctgcgtgaggccgccaacggggacaaggattattttagcgtggaacgaaagctaaagcgcgcccagcgacgacagcgaaaggctgatgagaaggcctacgtccgtgagtcacaacgtgtggatgtctttacattcttaaacgacagtgttttggggcctggagaaagcactcagcaaggcgagcaggtgaccaagaaagctaagaccaacgagctacagcagcactcaaccaaaactcttaacgtggaaacagtgcgaattgctgatgaaatccgccgaaagcaaagagatatggccaaggttaaacagtccctggaccggaattctggagatgcgcagctccagaagcgactacaagtgcagatgcaaagccacaaacaggagctagccacgctgcaggcacaggaacgcagcttaagcaaggaacagcagacgcgtaaaagcaagaataaaatgtttgagttttaataatgagtgttttaaagaatttagggaggtatcgtgggtttccaacatctattattgacaaaaacaaaatttaaaaatgattaagaatatcctaattattatctacgcacaattaaatactaccgaaggctcccgctgtgattatggccgtcatgtactgctccagtagcgcctgcgccagatgagccccatgctctacggccagcgagtaggccgtgtctccgtcctcgttggtggcacttagatccaggtctttggccaggagctcgttgcaagtatgcggatgattgccggccgctgcgtacataagcgccgtgtttccaacgatgtccatgtggcccgaatcagcgccgtgttccagcaagaagcggacgatctcgttatgcccaccggcggcagctaggagtagaggactaatcaaatctggagccatagtgttcacattggcaccagccgcgacgaggagctgcacggaaaccagttgaccgtaggaggctgcccaatgtaaggctgtgaaaccatgtgcatccttgtaatcaatgttctgctgacgcgctctttccgctgccacctgctcctccgtgatctcgccttggccagcgcgttcgtgaaaggagagcgaaacttcgacggggcaaaaggtggcctccgtattgccgcgctgcaagttggtcagcacggtggactgggggcggtacggcaagaaggcgctcttccgcttggcgtccagcaccagcatggaggtaggcgccgaccgcactccctcatcgtcgtcggaattcgcattagtttggattgtgtttgctggtgccaccatttgttttggttatatttaccattaataccctgtattggaagccccaaagggtataatagctcgaacttaatgatatacaagattataaaatgccatcttaatataaattctttcaatataaaatttaaaattgatttaccgttaaaatgtctcgtattttaaacaaataaaaatttatttatgtcaaacgctaacataatcataaaactagaaaataacagggcatcatataactggtacacctatcttctagttgctgtagatttttctgtggtgtggtaaagccacattgtaatcagcattaatttgcaactccagcacggtcacattcgattggtttgtttttattttctcgtttcaaagcttaatttgcgtttaattatgtaaatatatttacccgatttgttagcactgtgtttgtgtgtttcataacaggttttgcgacgcggcgcagttgtttctttggccaaaacttccctgcacctgttgcgcctcgccaatttgttttcagtgcaaacctgcgtttggccttttttatgccctttcgttgtacgtttccactgccccaaattaattgcgtcgaaacatcaccaagatgggcaacacgagttccaagggcgagtcggacgccagtgagccacccctggagggaggcaagccgtacaagcagcatcagcagcacaagtccagtgatgcttcccacaacggagtctctgacgtgggcggcagccacaacaatctaaaggtgacgcaggcgcagggctcgatgaccaggtcggcttctggcgcggatgtcaccgagaagtacctcacccagctggtgccggtggagaagctagccgagattctcagggagcagacgtcgtccaaactgggcattaatggcattgtggcagatgtctttgtggtgagtaattaactgataacaccgagcccactcataaaaaataacacctctttcgccagtcacaagtctttccgcagtacgccgacctgggacagcggctgttcaacctgatgcactccaactccaaggccacaacgaaacatctgggcgccgttgctttccggcaacagtgcgaacgctttttgggcatcatggatgactcgaagacgctggagtgctacattaagatgtacgcccaggaggagaatccggaccaaattgacaagacgggagtgacgcggttgctccacatctgctacaccattgccatgcagcactcgggcaacgccgtgctgtgcccggccatcaaccgcacgttcggttcggtgaccaagtccattttcctgtgccacgacagtatgagtctgggctacgtttgccgctggttcgagcagaacctgatgcggctggtgctcctcgtgcacaagtactgtgtgcacactttgtcaaccgcttaccgtggtctagagcagcagaatcagtcatgcggcattgagttgcagacgccggtgcttgagcaacgtaatcccttcacagataccaccgactttagtggcggtagcacgagggagatggactcgctgatgccgctttcgcaagcctggctgctggctggagctctgccgccactctactccaagccccaaactgtgacaccgccggccacaaagggaaacaacaacgttagcgcgtccacagcggtacagattttcaaggacaagctgtcgatgatgccgtcacactggacactgctgtacaactccaatgagcatggcgtgggagccaaccggtttctgcaccacgtcctcggctatcggggtccaacactggtcctgctccataccaaggatgaacagacgtattgcgt

SEQ ID NO: 12368 - DNA, 1503 bp, DROSOPHILA
ggtgaggtacttctcggtgacatccgcgccagaagccgacctggtcatcgagccctgcgcctgcgtcacctttagattgttgtggctgccgcccacgtcagagactccgttgtgggaagcatcactggacttgtgctgctgatgctgcttgtacggcttgcctccctccaggggtggctcactggcgtccgactcgcccttggaactcgtgttgcccatcttggtgatgtttcgacgcaattaatttggggcagtggaaacgtacaacgaaagggcataaaaaaggccaaacgcaggtttgcactgaaaacaaattggcgaggcgcaacaggtgcagggaagttttggccaaagaaacaactgcgccgcgtcgcaaaacctgttatgaaacacacaaacacagtgctaacaaatcgggtaaatatatttacataattaaacgcaaattaagctttgaaacgagaaaataaaaacaaaccaatcgaatgtgaccgtgctggagttgcaaattaatgctgattacaatgtggctttaccacaccacagaaaaatctacagcaactagaagataggtgtaccagttatatgatgccctgttattttctagttttatgattatgttagcgtttgacataaataaatttttatttgtttaaaatacgagacattttaatggtggcaccagcaaacacaatccaaactaatgcgaattccgacgacgatgagggagtgcggtcggcgcctacctccatgctggtgctggacgccaagcggaagagcgccttcttgccgtaccgcccccagtccaccgtgctgaccaacttgcagcgcggcaatacggaggccaccttttgccccgtcgaagtttcgctctcctttcacgaacgcgctggccaaggcgagatcacggaggagcaggtggcagcggaaagagcgcgtcagcagaacattgattacaaggatgcacatggtttcacagccttacattgggcagcctcctacggtcaactggtttccgtgcagctcctcgtcgcggctggtgccaatgtgaacactatggctccagatttgattagtcctctactcctagctgccgccggtgggcataacgagatcgtccgcttcttgctggaacacggcgctgattcgggccacatggacatcgttggaaacacggcgcttatgtacgcagcggccggcaatcatccgcatacttgcaacgagctcctggccaaagacctggatctaagtgccaccaacgaggacggagacacggcctactcgctggccgtagagcatggggctcatctggcgcaggcgctactggagcagtacatgacggccataatcacagcgggagccttcggtagtatttaattgtgcgtagataataattaggatattcttaatcatttttaaattttgtttttgtcaataatagatgttggaaacccacgatacctccctaaattctttaaaacactcattattaaaactcaaaca

SEQ ID NO: 12369 - protein, 234 aa, DROSOPHILA
MVAPANTIQTNANSDDDEGVRSAPTSMLVLDAKRKSAFLPYRPQSTVLTNLQRGNTEATFCPVEVSLSFHERAGQGEITEEQVAAERARQQNIDYKDAHGFTALHWAASYGQLVSVQLLVAAGANVNTMAPDLISPLLLAAAGGHNEIVRFLLEHGADSGHMDIVGNTALMYAAAGNHPHTCNELLAKDLDLSATNEDGDTAYSLAVEHGAHLAQALLEQYMTAIITAGAFGSI

SEQ ID NO: 12370 - DNA, 14482 bp, DROSOPHILA
acacagtgcccgagtgggatccttggcctggaactcattcctggtttcctctggcagccgggatggcaccattgtccaccacgatgtgcgtgcacgtgagcacaagctttccacattgtccggacacacgcaggaggtttgcggcctaaagtggtccacggatttcaagtatttggctagcggaggcaacgacaatctggtgaatgtttggtcggcggccagcggtggcgtgggaactgccaccgatcccttgcacaaattcaacgaccatcaagctgcagtgcgtgccttggcctggtgtccctggcaaccaagtactctagcctctggaggcggcaccgccgatcgctgcatcaagttctggaatgtgaacaatggcactttaatgaaatccgtggactccaagtcgcaggtctgttctctgctcttttctcgccactacaaggagctgatctctgcgcatggttttgctaacaaccaactgaccatttggaaatacccaacaatggtgaagcaagccgatttgactggacacacgtcacgagttctccagatggccatgtctccggacggcagcacagtgatcagcgccggagctgatgaaaccctgcgtctttggaactgcttcgctcccgatccgttggcgtccaagaaggcagtttcgaccagcaagggcaaacagagcgtgttccgacagagcatccgttgatatgctcagacctttagaactgtttttacccccttgattgctaagtttaagcttcaatacttactactggtatgttttccagactagacaattatttcttgaatgcatatccaatttttatgttctcgtttaatgtttcgtactttgtaattacggataaatctctgattatgtgcccccgccgacgatatatgaataattaaattttgtcagttacttttattgcttagagttaagtttgtgtgcgtataaataaaatgcttgacattctgcatccttgtatgctttatttcgctctaaacattttgcgttaacacaaggaattctattcgtttcggattcccacgtgccgggacagtaagtacataaggttccatttcctggatgcattttgagaacgtgtgtgtctaggaataatattgcatacaattctggggcagaaaaggcgtgcttctggggacatcgatataaccacatcgggaatttaagttgtgttaatcataggtatgtttatgtttagtctaaatcgtatgtacagattggatgggcattcaggcaactgtcatgggattgccaccgttgtagctgacaaaatagcgaggatcaccaaagcgatcgtacatctgcaagaacaagaggttcgcaagaaaaaagcgggttaaattaaaaatattacaaaattgttaggtacaagaacaaaagcctcattaagcgataaaataagcaaacaacatagcaagaacaagtaaacaataaaggggggcatactttcaagtctaaatagagttacaaaccttcttttcaatccattacaacatcgaattcaacatttaatttttgtttgctaatttttttttgtagaataaaatatttattttgcaacattatttcattcagtcagaacatgaaaacatcaattagatttagctagcttagtactacggtttatgattcaattttgtataatagattagttggtcgattcacgcacacgcgcacgcacatacaaaaattacaaacatacagaaacagacacacacaaatacatacacatatactcgtacgtaggtagagagaattagcaacaaacatcgagttttacattggacaccttaatatatttttaaattggtacagtgcacgaaagtacttgggagaatattgtatctttctacgatttgtttgcaaaacttcttgtaaaaaccatgcatcaacttgcacactttctatcgagtgatatactatgttggttcaatttgtttatgtttttgagcgggctctactaaaacatagataccctaaataatgggtggataatttcattacttgctgctaccctgctgtttgcttttttctttttcttttgtttttgattcatatttttcttcgtttttgtttgtttttgtttttggttaacaatacattgtgttacaatagagtttctcaagtgtaacaatatttttctcgctgaataccagttcagctgggtacttctcttctcctctcttacttagtttttgaacattttggaagctggtggtggcccatttcaaattgtgtcttacgctctacgcgatcgcagtgatcttttcttggtacatgttcttaagcagtgacgctcaccttcgtatcgtctagatcttcgatatcgctactgtcgtaatcactgtccggaggcgttacggtctccgctccgcgcttctccaggatgttctgcatgcgcgacttgttcatgatgcacgcaaactggtaggccgtcaagccggcgtaggtggccgtttccaggttcagcttctcgcactcatcgagcaggaagttggccagatcctcgttgcagccctcgatcgcaatgtgcagcggtgtgcggcccgattttccctcctggcaatcaaaaattggcatcattagtaacttgaaaattttatgcatttctgagacttaccctggcgttaatgtctgctccatgggataccaaaatgcgtaagatatcaatgtgacccgcctcggcggccaaatgcacacagcgttctcctgtaataaaagaatatagaaggtattggttagaaagagcatagagagagaggtttatttcagagtttaattggggttttcagttaattcctattatttttaaactttgtaatactattcccacattggggatcgaaaaagcttgatttatgaatgaaaccccaaagcttttccgcagtaaaaaaaaagctgcattccgttgtaaaacaagtagtgttttataatgcgaaccaaaaaagctctgattacgacaatgaccagttgggcggcaaacgagcggctcgaaggggatggaactgggtgccaagtggaggcttttgccttataagacaatatgacaacccgttgacttcgcaggcgagtatctgtgtgcgcgatcacaaggcattggtgtgcgttgaaaaacccaagaaattcccacaataaaccagcagcaataacacaacagccagcgccaacaacaaagacgagagtgacgaggtacggcaggaaaaaaaaatacaatgaaatatacaataaaataaaagtcaaacagttggcgttaagttaacaaaccaaatacaaagttggctttttggtttctgcttcggcaacaagtttgcccaagttcaaattggtttatgcatatagaaatctgatatatggacacacaaacacaagtgtctgaaataataataaaatatttgcaataatttaactgacatttgggcaacaaaatttatagatagaattctgatcatgtttctctaatagaatttaaaaagatattcgcagttgaaaatacacacccgtttgctataaataacataattaaaaaaacataatttaagaaaataaactaacatttaaaagccagttttagttttgcctttctctcatcttgattcttctttgccttgcaaacgattcttcatcaattcattctcgtattttcagatcgattcaaagttcgcatacatataaaataataaaaactactgctaaaaaagactgaaaacaaaggtgaattgtttagtctctgtttgtttttgtattccatgccttcgcttttatggctttatgattagttgacgtagtagttgttgttactactcttgccatattttctacccggttattcaaagttttttttttttttatatttttttttctgctgggctacacgtgcttttgattgactttcacacacaaacagcaaacagttggcacatttgcataaaccgcacacagacttacttacaggcccagacggagatttccgctaggaaactgttgttgtctttaatccgagaactaactgtggtaatatactaacaattccaaccatgagtcactcgaaacaaacgaggagataaccccagaagagctcaggaaaaacgaaaaaataatcgactgaggttatcaacgattaaaaacccaattacgcacgggaatttaaaaccaaaagaaagcggcccaagaaagtcaacagctctgcacagtccagttttttttttgtgtatgtgtatttctgtttttttttgttgaatctcggcttgaaagcttacaaaagcaacaattgtgtcacaagataaaaataacgatgaccacacggagatttttaagctcgactaactaaaagagaagccgatgagctagtaaaagacaatcctcattgttgttgcccctttagcacagcaacgtgccaatcgttagcatacgattaaatggccatgtatataaaacgatattaggtatattaatagacaaacgggcgggcagcagtataaaacatgaaatatgaaacacaaaagtttgtttcaaactttgctttgctctgggaattcccccatcgacggccaaaaggctgcgtcacaagatcacacggctaataatccccaagtcttagtctgacacgtctgcagaaagcgtttagaacacggccataaatgcgctgctgattggccaataattagaaacatctgagatcgaaatcgttttatgcggccaataaaggtatcaaatttgaacgtggtcgttttggtgtaccagcgtttaaagtttaagtgtcacaattatttttagcattttcaaaagacagttttattgggggaacacaacaggcaagtgaaactaaaaaattcaaaacaatgttatcggcataggaatatatttaaaacttaatggtgtcacgaccaaaagaggcaatctcaaacaaaattcgaaggagataatagaaggcagaactagaatactgttgatagagaagaatatccttatatggggtatatctgagttacaaccccattggaaagtaattactgcaatgccatttgagacgcagcaattaatggccattatgaaatcgcctagaactgcgcactatgggaaattctatttgtgcggcacttgaaaacccaaacagtttcacaaatggcaccaccgcccacttgatccgatcgcacctccaatcacccccaccccgcctttccattcaccaacatcaacaactcaacccaacccattagcctgtacgatacgatgtcgttactatttacacaggcggctgaaatttgaaataagaaaaaaaaaaaaagaaaaggctaacgatatcggcaacgaccttatgagaaaaacccaacggcgcagttaagagtactccacaagtcacccgaagtcgcaaagttcataaatttattgacagcgcacaaatattaaacgcaacgctgtcttctcttaattttaattaattgtgcttattgttggggcagagttttggaatttctacaacgggtttttcgctcataacgtgcggtgtagcttattgtttcaaatatttatctcttgtattccccggtttgccagcttatttgtccttcagtttgggtcattgtttcataattatggatacacataaatacaatatatacacaagtacggccatgcgcggttaataatatttgtaatatttattggagtggggaaatatcgaaaagctgttttgagttttccaagccagcgcgtgccaaaagaagttaccaggccatcgggggaattacctggcccaaaacccacaaaaaaaaaacacaacaagacccacaagacatggccgatgaaattaaagccaactgttcaaatacgacgggctttgcaaatacacaaaaaaaaaagataaatataaagacaacagccaaaagagaagagagaaaagacaatatcaaattaaatgctatttacccccaaaaacttctgggcgccgttgggcaattggtacacaattgccgtgtgtcgatgcgttcgaactttcccagtgtggaaattagctttagttaagtgaaaaacccaggtagcgctctacagccggccgccaaatgaagcgaaaacaaacagcacaatttagcacaattaaagccgtggattttccatgccatgacgacgacggcgacgacgacgactgacttggcaatgaaagtgttttgaaagcaactcgagcccagctcgagctcgagctcaacccggctggttccaccgccctccgcccgatctactaccactattactactatataacgctcgatcgttatgtcagcggactcgccttgttgactttctttcgagccatgaatgcgaaatgcaaatagcacccagccaaaatcggttggggatcgtcggccacgtgtgggtttgcactaaaaatgtaataagagaaataagtgaaaaagaaaacccagccgcgcaattaaggcgctagcgaaatttggggaaaagccccaggcccaaagaggtcaaccattgttggaagaagatcagcgtttggttgttgttttttttttcttttgtttgtcaactcagttgcacttaggattttccgcaagcgtcagttattattcattgcgttgctttaacttccgtcacttgttttcaatttttgcaattagcatgagctcattgaaagtatctggtattgttctttcagcgctactcactgctatttgtttaccttgcaaaaagtagtaggaatcatgtttaatcacttaaaatctattagatggctcatgtatcgcaattgattgccagtacttccatgtcaataaactctgatgtcttaataaggataaatctacttctgagatcactttgtttaaatctgacattcgatgatcaatgaaatgatctaaacccaaaatgggaagtacacatttccgttttcaaaacgaatctaaccttgtccgcttgtactttaatgtgaataaactccgaagcatatgagcatttgaactctgccaaatgtgatttctttaagttatcagttagcaatccataaaaaccaaaaaatacataagtaaatgttccagccttgtcgtcatctcttggtgtgaataaacccttagatcttgaaattttgctacgtagctacattcgcgccaaacccaagcggattaagttaatttcagatttttaataaggaaatgatgaagcgatttaagctggaagtgggatatcatagtgttacgagagtctagatttaaccttgtgcatatgactaacttgttgttgtttatgggtgcaacagacaagcctcgatgtaaaagtcattgattgtcgtcgtcggattccagaatgtcgtagatctcgattaaaattaatgcccgaaacgggtttgcgatgctgtaagactgattaaagttgatcaatttgattggtctttctactactactactactacttcttgcagctggaagtcgaaggttcaagttattcgcttatgaaaatcccagtgacgataagcgtatgtatttctttccatatttccttttattttatgcggtcatttaaaaggtttttcagaatttgcgtcaactcacgatttaacagcgggtttctacggttctcagctaaagttcttcaaacacgagacctttgcggcacatatggcagcgagatccccagtaaatagagtaacattcggagtggtaaaacctgggcactgataatagccagttatctacgtgaatgcgaaaagggggcgacgaggacgtttaggagcgcaattcggtgaacgtagagagtgtcgtataatcgcacagtaaacgaccacctatggggttttcctcgcagctgataacgcacgatttccagttaccaatgtctgctgacgatcgaacaccgatggacatatctcgtttgctttttttttttatagtgtgccggcttatcaggcggggaagtacgggagtgactgcttctaattgtgatttcagttgccaggccacagatttcatggggttcttcttcgcttaagcaaagatatccattcgcaacgtaacaaatggcatacacatgcaaggcaaatgtgctgttctgaaattcccttgcttggttaacccaacatttgtttattgctcatctaaaagaccgataagagcagaaactctgcttgctgtcttcggcattcccttggggaaatttctacattatttattggattaattgcaaaatcagcagcaggattttttggaaatccaaaaaaaaacccagcttgatacggcttcaaaacgtcactgatccctaatgcgacagtagttcattttttctgataacttaatcacaatccagccatttgcgctgtttattatcaacagtgggaatttctggcactcctggttaaccaaccaaaggccaaagcccacgaagttgtcaagcgatccgaactggcaaaaggacgtccttatactatttatagagcctgtgccgtgtcctcgtcctcgggagccttgcgtgcgtttatttatataatggcagtccatttcccagttgcgtgtcgggcgcgttaatgatgcccaaaaatggattatggccaagaaacgggcggttggttggtcgacctctaaacatttggccataattactattgtggggatttccgaaaaagtacagaagtatttgtttctgcgggcggagaagggtgccactgtgccctcgataacgaacctttcccaatttccgttattgtctgcgcctttaatcgctctaatgcgctatcattattctctattgatattatttgttttgtattttcagcattcttttaaagtctgctcttgcttggctctcggccaaatgttgaaaatgtgtcctattttcgtcactagtgcctaaatacattttcagtagcatttaatttagaagggaatgtcttaaagttttaaatagagttggaatgtctttcgaaatgttgaataaaaaacaaataaaattcgctttttcttaggaagaaacaatttgtcaataagcgacttattagtactatttaatctgaaagtatgtttttcatcccgattgctgacgtcaattgctggattacattgcatttggaccacatattcgaagggccttgtgtttacttagctatcgtcatcaatagtgatctacacacagaactggcccggtgtcccgcgcttcgaatatttaaaattgctttcgaatttattgctgtggcagtgggaaaacccagaggtttcgaataggcgaaatgctcaaaagcgtctgaacgtctcgtttcttgttgctttgttgcttgtctttaatagtttttgtcggaaatgtctgcgctgctgcttttggctagccaaagaaatacattatgtggcttgtgtatgagcgggttatatatagcatatgcatgtatctacatatgtacatatatccacgatatggggagcagctgttttgtggagcttcaaaccggttggcactgcttaaagctggcaaacgggtagaaaaaaaatgtttgttcaccaaaaatgtttgccactcacgaattcggattttatttttggcaaggttatacataggaaaaaaatcagcggcagaaaggccaatagaaatcgattaaacaaacgaaaggtcaaaaacaaataacttcggttttgcaacactttccgacaagtttattaacctttttggaggagtccaatcgttaattacaacacttttactttccattcaatgaaaaatcaataatattcgagagcttgagtttttattaatggtagcaattgaaagttcggtaaacaattcatttaattgaaataaactaccaaataaacggattgtgctaccaaaatcttggcgagcagatacagtgtgccacaaattatgaattataaatatacgttctgatttagaacccttcctgtgctcctccacacatgttatgcaatgagtgtgggtggcacccccacatcccagaggcattggaatcgataattcgatttctggtccgcgtatacagagcaaaatcaaataaggaaacaaatgttaattatgagacacgcctgtccttacgtgtggaaaataaattccatttcaattatttcctcgatgcattcgaaattaagacgcagtggtaagacagagcaaatacatgaatttccatttcgaaatgagcttatgtaaatgtgtatttcagattccacatccagcaaacaaataaatatttacctatccttgtgtaaaattgtttttttttttatactttgctgacgtctgaaactttgcaaatgttctgcttctgtgcgttctgtgcttttcgtttattttggttaatcaataacgcaaatgaacaaggaacagggagggggcttgctttttttttaaacgttttgacgagcgaaaatttcaagcgaaatgtttcggggaggccaatgtatttttggcatctgctcaaaggcgtctatatagcccataaccatatgtacgtctataacgtacatatatacaatgtgtactatatggcagacgacaatgtctcgcagtttggctagccgttggcgggacaccatttatatcatatatgtatatgttcatatatagagctttatataattggtacatttttggcacagattcatattcttaatgataaatgcctgaaaatgctgggccaaaaatattcactttactagaacggaaaaattcctacaagtttgcgagacaaatagctcgtgatttccatacccaagcaataatatattgctatctatacgaaattgtggaatcagtaatattaactaattattattgcttgagtgcggtatatgtaactagcactttacttaccatcgtagttgcgaatctccagatcggcgggcaggcaggcgtagctcagggaactgaccgctttgtcgttggatcggtgtccatattgtcggtgggcctcatggatttccgtggcgccgaacttctctgtcaaggcacggacgcactgtttctctccggcgatgcaggaaagatgcagagctgtgtttccatgacgatcgcgcaccgtgggctattcaaatgagtaatgggaatcttttgttacaaatataaatacttaaattagcttttgttagaaaatcaagatgatatgacattacattcgtcaataggggattaagctagattttacaaatatgcaaatatctaaatcttcttattcgatctttgttgaatattacctcagctccggcgagtaaaagtatcctcatgatgttcggctgggcagtaagagcggccagatgaaggggtgtctgggccacatcgttctggatgttgagcaggcacggatgaggagccatgcgaatcagggcggccaccacgtccactgatcccgaaatacaggccaggtgcaaaggtctgaaatgagagagagagagcaaaaaaaacaacatgaatttgtgggtttcttttacctggcgatcgaacacccgcactttctttccttcctgtacacttgtcgccgttcatgtggcggcgtaaaaacccaagtaagttaagtagaggtaaagtaatgtgaagaaagaagaggtgccccgaaaaacctgttcccgtacctgcccacataccaggaaaaccccaaagcctgactaaaacacatgtgtcagtcgcgtttctcgcctcagacaatcgtctttgagtgattcacgaaactctccccttagctcgcttggtggtcatcagtgcaacgcggcgttgtctttgttattttgggaaattttaggattctcatcggaaatacggcacgtataagttcatagaaattcggaaatgattcaaagactgtgcttataaatctttaatcgtgaattgtcaatgagtatgttaaattgatttttaagagcatgaagacctaaattctaataaagatttttttttggcgattgtgacagtctaaatataatcaatcgtttccaatttcaaaaaataccgtccaattgtataaaatatttaaaatataaagttcttatgattgctagtctaagaataagcatgggaaagtttttaaagtgacctagagataaggcgctaaaatgtttaaatcatacttgggaatttccccacattaaaaatacacattcgaagttatctataaatgtggtttgcacatatataaataatttgaaagtctagaataaagtgacatttcctgagattctataatgtttacttacgtgtcgccgtcgtcgttttgttgatagaactgctcccaggcgttcatgatattaatgctgctgggcggagcggatgatgttgctcccgatcccgaaggattcgcgttcgccgtgctggctgtggaggattgaaccttgctgcgaccggtgatttgggtgctgctgctctggccgagattgttaagctgttcgccgcgactgaccaaatggctttcgacggtccattgtgggatgcctgtgtccgcgctgtgtttgagtcgcattgaatcggcggtggcagtggtggtgtcctggtgctcctcctctttctcctgctcctcctgatcctcttcttcgtcgataataccggaatcgaggacaacgggctgttccttttggggtgccgactcctgctgatccttatcctgttcctcgctatcggggactatctcctcgctgaagatctgcgaggattgcgggccggagatgaagcccgaatcactggtttcgtttggcacggcaaattccttttgcttgttaatggcggccgtttgatcttgtgttttgccgccaattttaccgctagtggctagtgaggacgaggggttagccgcgtttgagggggcgcgctgctcaacactggcagcgctgcagctgcagtcacttgttgctgttgcctttgttgctgcctccgctgcttttgttgggctcggcattttcgtgcttttcctctctcagttgggctaaaatatatgtatatatgttatatatatactcctgtcgttttgaactttgcttttgagcccagtctctcaaacacacacacatacacacgcacagtaagcgctcacctcggtggtgcgagtgaaacaaacatataggctccagcgaacaagtgaaaacgcaataatttttgtagattaaaggcaatttatggacttatgtacaagtgtagccgcagaaaaataaaaattacggtttcacactggttgaaaattttagatttttccatttgccaatgtcttatttgcctcttcacggttgtttcacccgcacacacccacaatcacactgaggtagattttttatctcccttttcacacagcttccttttcgctttttattttctgcacatgttctgggtttaaaccccagcactattttctatggatttctcactaccttgctggttaattgtcttgcgaagctgtctttaaaacgcgtatttatggtttaaatgtttgtaatctgcaattcgcatagtacccggacgcacgtctgctttctttcacgtttcgatagcgaatgaaattgagggagcgcgctgatatgtatatatttatatggcagtctatactataaagccccgtttgcactaagagttatcacgaaatgaagagtctcgattttaaattttctttacttagaaaactgttaattgaaaaaaatctattttttcatatttgcccaaaaaaaataaaattctagacttgaaaagaccgaagtgaaaacgtttgccttaatatatcgacgatggagtgtgtaatcggggcttaaatcagttttacatgtgtgcgagggagaccatagggttgccagatagtagggagagcgccaagttaaaatctcccaacaacaaaatgagcagctaaatggtcagctgcaacaaaagcaaccacagcagcgatgcgtttatttatacttcttactctctgattgtgtgattgtttagttcctcgagcgaagccacttgatgttgatgctcggcgtcctacggttgaaatgcgtatgacggcgaggcggacaaatatctgggaaatcacccgctgaccgagaacggaaatgaaatgcaggattctttcttcggtttttcacaggtcagcttcgattgaaacctcgaccaattctgaatttcatgggatattctgagcgaccgatttgtcatacactctccttctgggattttttaacactcaatcacattttatcgccaattcatgaaatattatatatacgattattttggtttttacaaggttgtattgattaaaaaattatctgaatccaagaaatttagaggggctttacaagattatcagattcttaccataaaacctgtgtttacggtcacaagtagtttcgaaagtttttgctcgcttttttaatttaaaatttaaaattccgcctctcgtagttgtaaagttatttattataacaaataggttattaaaaaatcggacttgtttcctaaaattttgattaaattgctgggaatttgtaaattactct

SEQ ID NO: 12371 - DNA, 1897 bp, DROSOPHILA
aaagaaagcagacgtgcgtccgggtactatgcgaattgcagattacaaacatttaaaccataaatacgcgttttaaagacagcttcgcaagacaattaaccagcaagcccaactgagagaggaaaagcacgaaaatgccgagcccaacaaaagcagcggaggcagcaacaaaggcaacagcaacaagtgactgcagctgcagcgctgccagtgttgagcagcgcgccccctcaaacgcggctaacccctcgtcctcactagccactagcggtaaaattggcggcaaaacacaagatcaaacggccgccattaacaagcaaaaggaatttgccgtgccaaacgaaaccagtgattcgggcttcatctccggcccgcaatcctcgcagatcttcagcgaggagatagtccccgatagcgaggaacaggataaggatcagcaggagtcggcaccccaaaaggaacagcccgttgtcctcgattccggtattatcgacgaagaagaggatcaggaggagcaggagaaagaggaggagcaccaggacaccaccactgccaccgccgattcaatgcgactcaaacacagcgcggacacaggcatcccacaatggaccgtcgaaagccatttggtcagtcgcggcgaacagcttaacaatctcggccagagcagcagcacccaaatcaccggtcgcagcaaggttcaatcctccacagccagcacggcgaacgcgaatccttcgggatcgggagcaacatcatccgctccgcccagcagcattaatatcatgaacgcctgggagcagttctatcaacaaaacgacgacggcgacacacctttgcacctggcctgtatttcgggatcagtggacgtggtggccgccctgattcgcatggctcctcatccgtgcctgctcaacatccagaacgatgtggcccagacaccccttcatctggccgctcttactgcccagccgaacatcatgaggatacttttactcgccggagctgagcccacggtgcgcgatcgtcatggaaacacagctctgcatctttcctgcatcgccggagagaaacagtgcgtccgtgccttgacagagaagttcggcgccacggaaatccatgaggcccaccgacaatatggacaccgatccaacgacaaagcggtcagttccctgagctacgcctgcctgcccgccgatctggagattcgcaactacgatggagaacgctgtgtgcatttggccgccgaggcgggtcacattgatatcttacgcattttggtatcccatggagcagacattaacgccagggagggaaaatcgggccgcacaccgctgcacattgcgatcgagggctgcaacgaggatctggccaacttcctgctcgatgagtgcgagaagctgaacctggaaacggccacctacgccggcttgacggcctaccagtttgcgtgcatcatgaacaagtcgcgcatgcagaacatcctggagaagcgcggagcggagaccgtaacgcctccggacagtgattacgacagtagcgatatcgaagatctagacgatacgaagatgtacgatcgctttggtgatcctcgctattttgtcagctacaacggtggcaatcccatgacagttgcctgaatgcccatccaatctgtacatacgatttagactaaacataaacatacctatgattaacacaacttaaattcccgatgtggttatatcgatgtccccagaagcacgccttttctgccccagaattgtatgcaatattattcctagacacacacgttctcaaaatgcatccaggaaatggaaccttatgtacttactgtcccggcacgtgggaatccgaaacgaatagaattccttgtgttaacgcaaaatgtttagagcga

SEQ ID NO: 12372 - protein, 500 aa, DROSOPHILA
MPSPTKAAEAATKATATSDCSCSAASVEQRAPSNAANPSSSLATSGKIGGKTQDQTAAINKQKEFAVPNETSDSGFISGPQSSQIFSEEIVPDSEEQDKDQQESAPQKEQPVVLDSGIIDEEEDQEEQEKEEEHQDTTTATADSMRLKHSADTGIPQWTVESHLVSRGEQLNNLGQSSSTQITGRSKVQSSTASTANANPSGSGATSSAPPSSINIMNAWEQFYQQNDDGDTPLHLACISGSVDVVAALIRMAPHPCLLNIQNDVAQTPLHLAALTAQPNIMRILLLAGAEPTVRDRHGNTALHLSCIAGEKQCVRALTEKFGATEIHEAHRQYGHRSNDKAVSSLSYACLPADLEIRNYDGERCVHLAAEAGHIDILRILVSHGADINAREGKSGRTPLHIAIEGCNEDLANFLLDECEKLNLETATYAGLTAYQFACIMNKSRMQNILEKRGAETVTPPDSDYDSSDIEDLDDTKMYDRFGDPRYFVSYNGGNPMTVA

SEQ ID NO: 12373 - DNA, 6214 bp, DROSOPHILA
gatcgccacatataagggatctcgattttgcgagaacgaaacgaagagacaacgaaaacagcggtattgtgactaccagataccgtctaatatgcattccagtttattttttatgagtccagtactaatgagagtacgaaatatgcgtaggcacggaggtggaatatatatattatatattaattattgtaatatttactgtaaaaagtgctaagttatccgtttatattaggggtactcttgatagtaggttaatcatttcggatttcagaaataggttggtctcaatcagtaacacttagaaccattctaaaaagcaattaaactctccatgtctacattttactaataatcattaataatagctgtattgaaaatgaaagtaatataatgaaatactgttgcactgcaagaaactggtgatccttctctaaacaccctagagggtaagtcttagtcataagtatacttaaaagcagtctctagcaataaaaaataaacaaagattcttaaaccattttaaatttcatataattatgaaaacgaaagtaatttattgaaatattgctgcactgcaagaaagtggtgatcttgctctaaacacacttaagggttgattggggctgtcctctcaggatggtacgagtatacccctggggatgtgtgccaccacctgctgtagagaaagagtgcgttttggtggaaagcccgcattggggttgtgtgttgttagtgtgccaaggaccgcaccgtgacctgctcaatgccgctccctcgagtgtgctcgactcactccaagcgaatcgagttgtttgcccaccaacgagtatgagtatatgggagtatatgtgagtattctcttatacaaggttcccatcgatcgatcagtcttcccgcttatctaatcgggtatggtgaggctttagctataaccgccggtatgctcgtcgccgtcgctcagttgagttgcggttgccagggcgcgaacagttttcgattcgattcacgattttcgtatcaccatgattacgccgccgtcgggagtggtagtgttggtgaccctgggcctgctggtcagcggatccatgggtgaaagggagcgatccttgcgactgcccaacgccacctatccgctgttctaccaactgcacatatccagtgatattcacaagggccaactgctctttagcggaaatgccaccattgacgtagccatccggcaatcgacgaacgagatagtgctgcacgccaaaaacttaaccgatattcagattactgttcaccggttgatggccgaaggatccgagatcgtggacgatctaacacatacactgcatcccactgctgctttgctcatcattcacccaatcgaaaattaccaggccttcgaggaggggcaacaatatcgtctggagattctctacacggctattatggcatcgcgtcccgccggactttactacatggattatcgggatgaggagaacaaccacaccgtgtaagtgttttatctttcgtagcaacaaaaaaagaaaaatcctcaagttgactttgttaaaattagaaaatatcttttcttgtgtgtcgctacctccttttttttagaactaccagattatgcttatcataaagcgcgataacctttaggaaagctggatatcttatccccgcttataaactttttaaatacactattctattgaaagaaagagccagtagtaagcacgcgcttattccgattatgagtgagccaatcttacataacacgcagatagatccggcgtgcatttggtgccggggatttcgctttgcttacgctcttacttttattttgttattattttcatttgtttggtattgctttttaattacttcgctggcgtagacaacgctctgggactttatcgctatcagacgtacatatatgtatgtattcatatggtagatgttcatcgcaccatatggcaaagtcggttgatccggacgcgtcacctgggtgacgatgtgcgcaatgggctttctcaatggggggattctttataaaggggaatgactgtgtcagcaataaggagtcgcatcttatcagtgcgcggttgatagtgaaacgacaacataaaccgacagtgtttgatacggcagtatgtgttttagagcgcctggatttgttttgattcagattgagcaacatattcgcatgacccacgactttcggttgaaaataacgagcctcgattgttccgtggaagtgagagcaggttctccatgtgatcgatcattccggcagccgcaggctgtgactggtttttttttttttgttaagcgttcaatgatctgaaaatgggattgggaattttggactgaagcgattttgttttaattataatttctatccggacagcagacgctaattactcttggcaacacgtactatagtacttggacgtatgctataatttctattcatgttatgatttcattttactcgcagacccattgacccaattcaattttaatcttacagatacgtagccgccacgcaatgtgagccaacatatggtcgtctaatatttccctgctacgatgagccgggctttaagtcaaactttagcattaaaattacccacggtagtagtcattccgccatatccaatatgccagtgaaggaagtactagctcacgggtaagttcatatgcttatatatttttccataaatattaacctcttatatatatttgtagtgacttgaaaaccacttcatttcacacaaccccaccgatttcaacctaccttgtggcttttgtcatctccgattttggaagcatatctgagacttatcgtgggatcactcaaagcatctatacctcgccaacttccaaggaaaaaggtcaagttgcactgaaaaatgctgtgcgaacagtggctgcactcgaggactacttcggggtttcctatcctttgccaaaactggatcacgtggcgcttaagaagaactatggagcagccatggagaactggggtctaatcacttataaggacgttaacttgcttaaaaacatttcgtcggatggacagaaacgaaagttggacttgatcacccagaaccacgagatcgcacaccagtggttcggcaacttggtgtccccggagtggtggacatacacttggatgaatgagggattcgccacttattttagctatgtgataactgatttggttagtaacgaataatggttataataggttactttcctttttcatacaactttcccgtttcctttcagatataccccaatgacaaaatgatggacatgtttatgacccatgaggcagatagtgcatacagctacaacagcttctttgatgtccatccaatgtcccattacgtcgagggtgaaaaggacatcatgggtgtattcgacattatctcctataagcgaggtgcatgcgtgatcaagatgtttcatcacgcctttcgtcagaagctcttcgtgcgtggtatcagtcactttctggagaaatagtaagtttttgaaaatcacctctcgaactggtcaattggaattcatgggtcaaggtgctctgctctttcgcccagtcgttatagcgtggccaatgagctgaacctcttcgatgccctgcattcggagctccaggatgacgagtacttttcgcatcagccatgggcgtcccggataagggagattatgctctcgtggacgcatagcgaatggttgcccattttggtggtcactcggaactacgagaacaacaccatcacgtttacccagcgatcagttcacatgaaggatgagctatggtggataccaataaattttgccaccacacagtcgcccaacttcgaggacacccaagtggatatgtttatgccaccccaaccacagtatacggtatcactggaggatctgaatatccatgtcagcggcagggattggataatggtgaataagcagcacaccggtttctatctcgtccgctacgatacagataatctaatggccattgccaggcagctgcagacgaatcactcggtcatccatccaataaatcgacttggtctctttcgagatctgggtcccctgatcgaacataatgaaatcgagcaagtggaagtagtgttcgagttgctaaagtaccttgagcttgaggaggatgtgctgacttggaatcagttgcaagatacgatagagtgtctaacacgaaacttgcatggcacctcctcccagagcctcttcaatgagtttgtacgccgcctggttggcccgacttttcgacgagtttacgtggaacaaggtgtaaatttagctgaagatgggatgttccgtgggattctagaaatcgcctgctctgcggatcttcccgagtgcctggaatacacacgtcgcctggctaaggagcatataatcgataaaatttattttaaagatggatcagactaccatgccataatcgattccgtgttatgcatgggagttcggtatctaagcgatcaggacttccaaaggataattgatatgatgcaggaaatagatcgagcttcggtatactatgatgacattatatatgccctccggtgcacgcagagtcatcggcatctgttatactatctggaaggtctgatgggtgaaaactccacccatatggtcctttccgaattcgaagatttgatgtatctcctctacatatacaagtcgaatctggcctctcgtccggtcatctggcagtatatcgagcgcaactacaaggtgctctgtcgagcaccaaactttttagagcactttaaacagctcgctggatttgtgcccagacatcagagatcacatgtaatgagtttatatctatttcatatcctactcgttttgttcacacatatctcttttcagtttgagaggctacgccagacaattgcgaaccacatgatgcaggagggtcttaatacgaaccaaacgctgatcgaggtcgattctccgctggtgggcaaaaagatgaaaatcaccgaaaatttccaggacaagttcgagcagcagatccacaaatggctgctcaatgagcttcctcaggcgaccagcagaagtgatgcccttttgtccgcctccctcagcgcggccaatgggtcaagtcgtcctcaaggagtcctaaaggaggcgactagggtgttgcgcagtgcgttacgaatagtagatatgtataggtgaccagacatttggtctaactaggtatcacataagtacaggcttaattacgaataaattaatttttttcaaaacaaaacaatcgagtcaattcattcaacagccaagagcttttcaacacattctaaattaactacagacgttatcgatttgtctgaaacgcctccgtggggaattgataagcaagtataaaacacaaaagtcatcgataataaaaacccgatcaaatgactataacttttttacgcaaagactagtaattatttctgggtatttctggccattaaaaagcaatttgaaaaatttataacaattttggacattcaataagtcgtataaaaatatacaaaactgaacaaagccattacttaagtttgttagtttttgtacaatgattactgaatattaaagcatacaaatttgatatatttaaaatgtagcacctcgtaaaattaattgatacttattagcgtttttcacgagtatttatgactgttttgattatagcactataacaacttgcattttttcgtactttcaaatacttagtcgtcccagacgaagccataattcaaaaatttactgctcctaatgatgaaactaataataggaatttgattaacaaaaaagtaatgttatcctgctttattttgataagcgttacgctactgaataattaaaatgttaccgaggggattttttacactatagagtaccatcttcaaaactctcgtagactaattgttttacagcccaatcatacttcacatttgacttgtcccagtgcactctgggccaataaccgtggctttgccacgttttatcgagaattgcgcaacaatctttatggcgatcgatgttgaggattagatatggccaagtccataaaaatgccgtgttcaagcggcggccgctcaataacaaagtgtcttttaccgagcagccaacatggcacggtggctgcttaactcgttttcgctgatcctgctcctggcagtgtgca

SEQ ID NO: 12374 - DNA, 2989 bp, DROSOPHILA
gattcacgattttcgtatcaccatgattacgccgccgtcgggagtggtagtgttggtgaccctgggcctgctggtcagcggatccatgggtgaaagggagcgatccttgcgactgcccaacgccacctatccgctgttctaccaactgcacatatccagtgatattcacaagggccaactgctctttagcggaaatgccaccattgacgtagccatccggcaatcgacgaacgagatagtgctgcacgccaaaaacttaaccgatattcagattactgttcaccggttgatggccgaaggatccgagatcgtggacgatctaacacatacactgcatcccactgctgctttgctcatcattcacccaatcgaaaattaccaggccttcgaggaggggcaacaatatcgtctggagattctctacacggctattatggcatcgcgtcccgccggactttactacatggattatcgggatgaggagaacaaccacaccgtatacgtagccgccacgcaatgtgagccaacatatggtcgtctaatatttccctgctacgatgagccgggctttaagtcaaactttagcattaaaattacccacggtagtagtcattccgccatatccaatatgccagtgaaggaagtactagctcacggtgacttgaaaaccacttcatttcacacaaccccaccgatttcaacctaccttgtggcttttgtcatctccgattttggaagcatatctgagacttatcgtgggatcactcaaagcatctatacctcgccaacttccaaggaaaaaggtcaagttgcactgaaaaatgctgtgcgaacagtggctgcactcgaggactacttcggggtttcctatcctttgccaaaactggatcacgtggcgcttaagaagaactatggagcagccatggagaactggggtctaatcacttataaggacgttaacttgcttaaaaacatttcgtcggatggacagaaacgaaagttggacttgatcacccagaaccacgagatcgcacaccagtggttcggcaacttggtgtccccggagtggtggacatacacttggatgaatgagggattcgccacttattttagctatgtgataactgatttgatataccccaatgacaaaatgatggacatgtttatgacccatgaggcagatagtgcatacagctacaacagcttctttgatgtccatccaatgtcccattacgtcgagggtgaaaaggacatcatgggtgtattcgacattatctcctataagcgaggtgcatgcgtgatcaagatgtttcatcacgcctttcgtcagaagctcttcgtgcgtggtatcagtcactttctggagaaatatcgttatagcgtggccaatgagctgaacctcttcgatgccctgcattcggagctccaggatgacgagtacttttcgcatcagccatgggcgtcccggataagggagattatgctctcgtggacgcatagcgaatggttgcccattttggtggtcactcggaactacgagaacaacaccatcacgtttacccagcgatcagttcacatgaaggatgagctatggtggataccaataaattttgccaccacacagtcgcccaacttcgaggacacccaagtggatatgtttatgccaccccaaccacagtatacggtatcactggaggatctgaatatccatgtcagcggcagggattggataatggtgaataagcagcacaccggtttctatctcgtccgctacgatacagataatctaatggccattgccaggcagctgcagacgaatcactcggtcatccatccaataaatcgacttggtctctttcgagatctgggtcccctgatcgaacataatgaaatcgagcaagtggaagtagtgttcgagttgctaaagtaccttgagcttgaggaggatgtgctgacttggaatcagttgcaagatacgatagagtgtctaacacgaaacttgcatggcacctcctcccagagcctcttcaatgagtttgtacgccgcctggttggcccgacttttcgacgagtttacgtggaacaaggtgtaaatttagctgaagatgggatgttccgtgggattctagaaatcgcctgctctgcggatcttcccgagtgcctggaatacacacgtcgcctggctaaggagcatataatcgataaaatttattttaaagatggatcagactaccatgccataatcgattccgtgttatgcatgggagttcggtatctaagcgatcaggacttccaaaggataattgatatgatgcaggaaatagatcgagcttcggtatactatgatgacattatatatgccctccggtgcacgcagagtcatcggcatctgttatactatctggaaggtctgatgggtgaaaactccacccatatggtcctttccgaattcgaagatttgatgtatctcctctacatatacaagtcgaatctggcctctcgtccggtcatctggcagtatatcgagcgcaactacaaggtgctctgtcgagcaccaaactttttagagcactttaaacagctcgctggatttgtgcccagacatcagagatcacatgtaatgagtttatatctatttcatatcctactcgttttgttcacacatatctcttttcagtttgagaggctacgccagacaattgcgaaccacatgatgcaggagggtcttaatacgaaccaaacgctgatcgaggtcgattctccgctggtgggcaaaaagatgaaaatcaccgaaaatttccaggacaagttcgagcagcagatccacaaatggctgctcaatgagcttcctcaggcgaccagcagaagtgatgcccttttgtccgcctccctcagcgcggccaatgggtcaagtcgtcctcaaggagtcctaaaggaggcgactagggtgttgcgcagtgcgttacgaatagtagatatgtataggtga

SEQ ID NO: 12375 - protein, 988 aa, DROSOPHILA
MITPPSGVVVLVTLGLLVSGSMGERERSLRLPNATYPLFYQLHISSDIHKGQLLFSGNATIDVAIRQSTNEIVLHAKNLTDIQITVHRLMAEGSEIVDDLTHTLHPTAALLIIHPIENYQAFEEGQQYRLEILYTAIMASRPAGLYYMDYRDEENNHTVYVAATQCEPTYGRLIFPCYDEPGFKSNFSIKITHGSSHSAISNMPVKEVLAHGDLKTTSFHTTPPISTYLVAFVISDFGSISETYRGITQSIYTSPTSKEKGQVALKNAVRTVAALEDYFGVSYPLPKLDHVALKKNYGAAMENWGLITYKDVNLLKNISSDGQKRKLDLITQNHEIAHQWFGNLVSPEWWTYTWMNEGFATYFSYVITDLIYPNDKMMDMFMTHEADSAYSYNSFFDVHPMSHYVEGEKDIMGVFDIISYKRGACVIKMFHHAFRQKLFVRGISHFLEKYRYSVANELNLFDALHSELQDDEYFSHQPWASRIREIMLSWTHSEWLPILVVTRNYENNTITFTQRSVHMKDELWWIPINFATTQSPNFEDTQVDMFMPPQPQYTVSLEDLNIHVSGRDWIMVNKQHTGFYLVRYDTDNLMAIARQLQTNHSVIHPINRLGLFRDLGPLIEHNEIEQVEVVFELLKYLELEEDVLTWNQLQDTIECLTRNLHGTSSQSLFNEFVRRLVGPTFRRVYVEQGVNLAEDGMFRGILEIACSADLPECLEYTRRLAKEHIIDKIYFKDGSDYHAIIDSVLCMGVRYLSDQDFQRIIDMMQEIDRASVYYDDIIYALRCTQSHRHLLYYLEGLMGENSTHMVLSEFEDLMYLLYIYKSNLASRPVIWQYIERNYKVLCRAPNFLEHFKQLAGFVPRHQRSHVMSLYLFHILLVLFTHISFQFERLRQTIANHMMQEGLNTNQTLIEVDSPLVGKKMKITENFQDKFEQQIHKWLLNELPQATSRSDALLSASLSAANGSSRPQGVLKEATRVLRSALRIVDMYR

SEQ ID NO: 12376 - DNA, 4887 bp, DROSOPHILA
aatcactggactgaatttgtttttaattgatgttgattgatattcggtttacttgtttttctttctattatcagtgtttagtactcgatttgatttatgtatgttcgtaacgagaattccgtgaatgcctttaaatgtacttcggtctacttgtgtatccatgtatatgtcacacattgtcttcgttttcgtcaactttttcctttaggtcttctgttatgttccgtatctttgttcaaaaatgtaaaaaagcaagtattatgaaaagacataggattcgaagtgcttaaacaaatatttcaataaatgttacaaatgaaatgaagtcgtattctctacttgcaagcgtggaatgtagttctcatcattattttatctcatgtcacccaactagatgatcctaaaacaatgttaggggattttaaatgaccaacaaaattcaaatttcttatcacatattaacaaaagcaacaaatacataaacaaaagcattagtgtcgaaaattggaatgatatgcacaatgttagtacacaaatgggtgcagtagcaaatgaaaataatcacgaattgtacgagattaaaacataaaaggcggtttcgattattttccaatattatattattgatgtgtatattagttttacaataagaatttctatttaaatacaagtcacgcccttttctgaccggcggcagtcacaaaattcacaatcggttcaggcatgtttttttttaattaactacttcgccacacaaaaagttggagacctacataactatgcggggtcacctagcagggatgtatagagtaaaaatatcgtttcgggaaggtctgttcacaaacaatcagcacataaaaagtacttacaaaatatctgacccctatattcaatgatgattctttgggatgctaagggatgtgtggattcacttgtgcgcgctatcaggagcagcgattacagtgaatggcgatctaaaataagttgctttcgctatgaaaactaaggccacaattcaaatgccccatttgatgggccgctagaaagtgttcgtttcatgagtattctaagcctagcacaaatcaagatatgggatggggaaaaacaataaatataagcatagcatataactgataaggggctttaaggtcagcgcgtctaggtgatgtactctcgatcgcggcgtcgccgcgtcgtggaggcaataaagaccacgggttgcacaccagcaccgtcatcttcagcgtctccatcctctccgtccacgtccaagtcaccgtcgtcagcgtcattatccccgcccgttgagttcgaccactcggacgccgactgattgctgccagtggcactaaacttgaggctgcttgacatgccaaacgatacggatagcgaggcgctgagtgacgaggcattcaactgctggctcacgtccacgccatcttcgtcctcgaaagcgtcgtcaatgtgcgggtgctgatgttgctggtagtgatattgttggtagcggtgtcacctgcctgcgcccgcacccaacagcagggcataatcatcgttggactcgggaattggcgccgctgccgacgcggcaccagggggcaggcgcaggaaactgccaccgccgccagcacccgcacccggatccctttcgcgctcgcgaagatgcagtgtgtcgcgttgacgggtcgacggctgagagcctgccgctcccggcaagtgtagttgttgttgttggtagttgctattgctactgttcccatcgtcggccacgcctgctaaaggaaatcgagattgggagtgagtagattgactttcgggcagtgtattcagcttgccatcatacacaggcacgatcaggcgactggacgttgcaccatacatgttacctgattgtgacgagttgcccggcagctgctgatcttgccgcttgctgatcagatactcggactcactgctggagcggcgaggactgcgcgccagcggctggtatgtgctgcgtccctggaagcgacgactcagtgaactgcccacgacgcccagatgctcggtgacatcctcctgcatgtcggatatgtccatcatggagaggaaggcgcgacaccagctatggttcgggttgttccagtactgcggcgagttgatgtgaaacggatggtgcgggaagctgtagatgtgagccacggccgcgataaacatttcgatgcagatgaggaaattctggttggcgataacaaatacatacatatttgaattggtttttggaaactttcacttcggtttcatttgttgtgtttgcaaatttggaagttatgcttgataaaaactcttagtcatcagtattaaacgaacttgggactgttttcggttataagataaggttggtatgaaaaaatcatgcttaatttacatattagctctttacttatagaaataacttattgccagatccattcggcttttaaataggtcactcacctgaagcagggaagccagattggtgtctcccacatccgacccaaagatgtccttaataatattatagtataccagtacgttgagtagcactccttggctacggtggagtaaaatattcttaaccaatcttaaatgctttcatgtggtacttacaaaaacgagaaaaacaccacagccttgatgcacaggaatttgggaataggcttcattggtttgagatcctccttgtttgcacggtaaaatagcaccaggcaatacatggccacgaactgggatatattgttgaccaccacaatataggggaaggccacgttgcccgcaaactcgccctcgccgtaaacgccgcatagctcgcagatgctacgaaattccgattagagttgactgttaaacggaaaagcacatcccgacactcacacagagataaaggtggtaatggggcgcacgaccgtgtactggaggatgccgtgcttgcagttgtggatgaattcacgacccatcacccacggccgcatgcagcagagcggaaagaagtgaggcacctgcggcttgtactccattgtggcctctaggtccataccgagattcaagtagttgagcaggtacaccatgaagttgtagataacgtacgcctcgtagcactcgcgcagtgagtccacgtagatggagtgcttcggaaagaaaaggccgatccactgcaagtgaatagagagtattaggtttcttgtggtctccaattccgcaatatcgaagctcacatcggtggcccacttaccgcgttcaaggcgtagataggcaccatccacaatatgcggattatgtgcttctgcagtatgggcttggtaaaatgaatgacgtgttggatgatatgccaaatggacacgggcactgcggacaacacaaacagaccgccgatgagaatgagctggtcattgcgctggaagccatccttcacggagttcacaatgagcagcgggaccacgatgatggcgaagatgacataggtgataatgagcagcgggcgtatccagatgcgccactcctcgaagaagcgtcttacgtccaagctgcacatctttgcctctggtgcactccttgggaatgctccttgaaatgtgctgttcaccggagtacctaatatccgggttgatatcgttgattcgttgacgtcgacgccgccgccccgattctgttttcacttgggtttccgctttcttccgctccgatccgctcttctccgccagaaattctctcacagcagattacaggacacggcggtggcacccacgctggaggcgcattttcagagatctcctgctggcagagcaagttcttcgatctattggtttcagtcctattggcagtaatatcgcggctttcgtgcccttcttttgtgaggaatccagttcgtgggtcgggtgcctacgtctaattggtgtgaccagccaatgcgaaatccgaaatgactaaaatacagacttcctcccggttttatattatttaaaatttttactatttgttttattttaaagtttaaaagctatcagtaaaaaaattaacttaattaaaaaacaaatgtcgaagattatttagattttgtttgtcgcagacgaaaaatatgaaaattttccgatgatttaaaaaagggaaatttcgagggctgcagagtaaaaaaataaaacatattttgaaaattaaagaaatatgtcaaatatataaagtagctaactccaaaccgactactaattgtttcgtagttcagaaatttttttaatactgaattaattgtaaaatatctaattttagttagttcaataaaacaattcacgaaagttagatgcattttatttatttataagattaaaatatcaattatgtacaactaagttaagtatttaattagttctcttgaaatggatataaggggatttacaagtgagcttgataagcgtgatattttttcgttatggatttattaaacaaatattcttagattatctgtttgatttgaatatatgatgtcaaaatgttcccttaacatttatacgtcgataacttaagatgttccgtgtacgtcccaaggctgtcttttggttaaaagtactgcggaatcgctattactatttgcctcgcccctggtagtcattttcatatacacaagatcggattacgttaaaagtaattaaaaagtatttgcattataagaaacagtagtcgccagtgcagactaattgttgtgatgatgaagaaagaggatggcgtcgatgtgactaccggtgagcatgaatcgcttgttgaagtcgtatatttggtctctcagcgccttcttgaagctgagcgtcaccacgccgggcacactatggtacaggctggccaaatcgcggagcgttccataaatgtgtcccatcttgagcc

SEQ ID NO: 12377 - DNA, 2208 bp, DROSOPHILA
acccacgaactggattcctcacaaaagaagggcacgaaagccgcgatattactgccaataggactgaaaccaatagatcgaagaacttgctctgccagcaggagatctctgaaaatgcgcctccagcgtgggtgccaccgccgtgtcctgtaatctgctgtgagagaatttctggcggagaagagcggatcggagcggaagaaagcggaaacccaagtgaaaacagaatcggggcggcggcgtcgacgtcaacgaatcaacgatatcaacccggatattaggtactccggtgaacagcacatttcaaggagcattcccaaggagtgcaccagaggcaaagatgtgcagcttggacgtaagacgcttcttcgaggagtggcgcatctggatacgcccgctgctcattatcacctatgtcatcttcgccatcatcgtggtcccgctgctcattgtgaactccgtgaaggatggcttccagcgcaatgaccagctcattctcatcggcggtctgtttgtgttgtccgcagtgcccgtgtccatttggcatatcatccaacacgtcattcattttaccaagcccatactgcagaagcacataatccgcatattgtggatggtgcctatctacgccttgaacgcgtggatcggccttttctttccgaagcactccatctacgtggactcactgcgcgagtgctacgaggcgtacgttatctacaacttcatggtgtacctgctcaactacttgaatctcggtatggacctagaggccacaatggagtacaagccgcaggtgcctcacttctttccgctctgctgcatgcggccgtgggtgatgggtcgtgaattcatccacaactgcaagcacggcatcctccagtacacggtcgtgcgccccattaccacctttatctctgtcatctgcgagctatgcggcgtttacggcgagggcgagtttgcgggcaacgtggccttcccctatattgtggtggtcaacaatatatcccagttcgtggccatgtattgcctggtgctattttaccgtgcaaacaaggaggatctcaaaccaatgaagcctattcccaaattcctgtgcatcaaggctgtggtgtttttctcgtttttccaaggagtgctactcaacgtactggtatactataatattattaaggacatctttgggtcggatgtgggagacaccaatctggcttccctgcttcagaatttcctcatctgcatcgaaatgtttatcgcggccgtggctcacatctacagcttcccgcaccatccgtttcacatcaactcgccgcagtactggaacaacccgaaccatagctggtgtcgcgccttcctctccatgatggacatatccgacatgcaggaggatgtcaccgagcatctgggcgtcgtgggcagttcactgagtcgtcgcttccagggacgcagcacataccagccgctggcgcgcagtcctcgccgctccagcagtgagtccgagtatctgatcagcaagcggcaagatcagcagctgccgggcaactcgtcacaatcagcaggcgtggccgacgatgggaacagtagcaatagcaactaccaacaacaacaactacacttgccgggagcggcaggctctcagccgtcgacccgtcaacgcgacacactgcatcttcgcgagcgcgaaagggatccgggtgcgggtgctggcggcggtggcagtttcctgcgcctgccccctggtgccgcgtcggcagcggcgccaattcccgagtccaacgatgattatgccctgctgttgggtgcgggcgcaggcagcgcctcgctatccgtatcgtttggcatgtcaagcagcctcaagtttagtgccactggcagcaatcagtcggcgtccgagtggtcgaactcaacgggcggggataatgacgctgacgacggtgacttggacgtggacggagaggatggagacgctgaagatgacggtgctggtgtgcaacccgtggtctttattgcctccacgacgcggcgacgccgcgatcgagagtacatcacctagacgcgctgaccttaaagccccttatcagttatatgctatgcttatatttattgtttttccccatcccatatcttgatttgtgctaggcttagaatactcatgaaacgaacactttctagcggcccatcaaatggggcatttgaattgtggccttagtt

SEQ ID NO: 12378 - protein, 569 aa, DROSOPHILA
MCSLDVRRFFEEWRIWIRPLLIITYVIFAIIVVPLLIVNSVKDGFQRNDQLILIGGLFVLSAVPVSIWHIIQHVIHFTKPILQKHIIRILWMVPIYALNAWIGLFFPKHSIYVDSLRECYEAYVIYNFMVYLLNYLNLGMDLEATMEYKPQVPHFFPLCCMRPWVMGREFIHNCKHGILQYTVVRPITTFISVICELCGVYGEGEFAGNVAFPYIVVVNNISQFVAMYCLVLFYRANKEDLKPMKPIPKFLCIKAVVFFSFFQGVLLNVLVYYNIIKDIFGSDVGDTNLASLLQNFLICIEMFIAAVAHIYSFPHHPFHINSPQYWNNPNHSWCRAFLSMMDISDMQEDVTEHLGVVGSSLSRRFQGRSTYQPLARSPRRSSSESEYLISKRQDQQLPGNSSQSAGVADDGNSSNSNYQQQQLHLPGAAGSQPSTRQRDTLHLRERERDPGAGAGGGGSFLRLPPGAASAAAPIPESNDDYALLLGAGAGSASLSVSFGMSSSLKFSATGSNQSASEWSNSTGGDNDADDGDLDVDGEDGDAEDDGAGVQPVVFIASTTRRRRDREYIT

SEQ ID NO: 12379 - DNA, 3355 bp, DROSOPHILA
tgccctctgtcctgcaggtcatgtacacgcaagcggcgtagatgtgggtgctcttcctaccgcgggtcagatgcctacccaatgccatcttgaagaaattcagagcagtatctgcatagtgctgggatagctgcagctgctggcagagtagtgtgatgtccttcttggcctttttgatggtcacctcgcgggattcggtgcccgatcccacctgaaacttgccgtagccatagttggtggcaccgcccgacgactcggcggacacaaactggccaattgcggctgctccatggccaacttcctcgaactgcacttcggaaacaatgagggaatcctccaataccgagccgcagttcatgcaaactacagtgaatgggtgaacgtcgttagtgtcatggatatgggtccttggatgtcattatacctcgatctccgcgagcattgtcttcctcgatctcgttggatccgcaattgcgacattttaggcccgtagacatgattgtttgttctttgctttaataaacactgccacctgcaacgcttcgtttttatccgttgttttgacagtttaaactacttgtttgctgtcatttgaaagccattttcgagtcttttttaaacaatttgcaatttgttgccaattgaatcaacacgcttggaaaacatctgattgaaccccgccggcgttgcttaacactgatgatagaagaagaaatgctagagatgcgcatttctcaatcaagaacgacattggcacaactgcttgaaaaacttaaaagagatattaaaattgtaaaaattacgtaaagctggttccaaaaattatgttctagtttatttggcaaattatcaatcaatatttgtttttcatttacattggaatatataataatacaggtttagcatcgtgttcttaggtgcacatctctagtagaaatagtgttaaagtgccggtaaggtgactaagtattttgttgacatattgaacaagttggaccaaaaggagtatacagtcatcttggacttaacttataaatattaagtaaatattttaatacatatttattttaaatttacatatttatatttaccgtgtgttcttgcttttgtaacagtgtcaagctttgacgtcatatttaaagaaagtcaccccactttgttccaccctgagcagcggaataaacaacaagtcaagtcagcgttcaattttcgaaagtcaacttgaattaaaaaaaaagaaaagccggtcaaaatatatcagtcatgggcgatgctgatcgtgcgatgaacgaaccagaagccgcgaaaactgtgtccggaatccaggtgattcccgccgaggatgtggcttccattgaggatataatcacaatcgatccggactgctacgagcttgatctgaatcatcgccggatcgagaagctggagaacttcgagccgctgactcgaatcgagcgcctgtttctgcgctggaatctgatcaagaaaatcgagaacttgtccagcctgaaaacactgattgagctggagctgtatgacaaccagatcaccaagattgagaatttggacgacttgccccacctggaggtgctggacattagcttcaatcgtctgacgaagatagagaaccttgacaagctggtcaagctggagaaggtctactttgtgtcgaaccggataacccaaatcgagaacctggacatgctcaccaatctgaccatgctagagctgggggataacaaactgaagaagatcgaaaacatcgaaatgctcgtgaatctacgacagctcttcctgggcaaaaataagatagcaaagatcgagaacttggacacattggtcaatttggagatactcagtctacaggccaatcgcattgtaaaaatcgagaaccttgaaaagcttgccaacctccgcgaactctacgtttcggaaaacggagtggaaaccattgaaaacctctcggagaacaccaaattggagaccctcgacttggccaagaaccggttgaagggcattgccaatctggaaaagctggaactgctcgaggagctgtggctgaaccacaacggagtcgatgactggaaggacattgagctgttgaaggtgaacaaggcgctgcagaccatctacctggagtacaatccgctggccaaggatgttcgctaccgctccaaactgcgcgacatactgccgcagctgcagaagattgatgccaccctgtgcaaggtgcccggtacctagatggaaccactgtaaaccccttgaaagactaatccacggcgttgcgccactacatttatatcgattaactttgaaaaactgcgtttaaaatatacatacaaattaaccactaatggttctatctacgaattggtgggtgcagtgatttagtttgctttcagaagaaggtatatttggataagttactcaaagcgtgaagtttacctaatgagtcagataaattatccatctaggctaccgcctaacatataaaactaaaaagtattttatatatacacataaataatgtaaattgaatctaaaaagatgaaaacattttagttaaacaattctggtttctcttaaaccaaaacaatacatttcagtatgtcagagtacattcaacggaatgtatttttatttatatcaaagttattgttctatcgattgaaatcacagagctcaactgataagtggctttcataaaggcctttgtcttcattctttccctttgtggcagacatgttgtgcaaatatgcttatcatttcattttttgacaaagtatatgaggcgtcagttggattgcttttggaggagttcatcaattcgaaacagcgtaatagtcagaggcgctcactttatgaggacctccatagaagtccagaacaaagatattgctaatttccagttcgcaaaggtagaaattgtgagctgtaaaagaaacaacgtatttattattagtacatacatatcgagctcttaatgaggttcgctttcaccaaccttttacccaattgatggcagctggatgacgcctcacataggcatccagcgatggctgatagcttttgtcgctaggatccatcttcaaatgagccaaaacattcttaatccattttaaataggatttaattcatttttcataccttcttcacctgtccactgatcatggaacgggcacatgtaggctccatgggatcctttccgccctccttgcatcttagggtctgctcgtcactgaacaggagtgtgaccttgttgtccttctgccagtcgggaccagtgaagtccaaatcggttagcaggaatcgaatacgtccagtggacctgttattagcatcgctgtcgtcg

SEQ ID NO: 12380 - DNA, 1282 bp, DROSOPHILA
aaggagtatacagtcatcttggacttaacttataaatattaatgtcaagctttgacgtcatatttaaagaaagtcaccccactttgttccaccctgagcagcggaataaacaacaagtcaagtcagcgttcaattttcgaaagtcaacttgaattaaaaaaaaagaaaagccggtcaaaatatatcagtcatgggcgatgctgatcgtgcgatgaacgaaccagaagccgcgaaaactgtgtccggaatccaggtgattcccgccgaggatgtggcttccattgaggatataatcacaatcgatccggactgctacgagcttgatctgaatcatcgccggatcgagaagctggagaacttcgagccgctgactcgaatcgagcgcctgtttctgcgctggaatctgatcaagaaaatcgagaacttgtccagcctgaaaacactgattgagctggagctgtatgacaaccagatcaccaagattgagaatttggacgacttgccccacctggaggtgctggacattagcttcaatcgtctgacgaagatagagaaccttgacaagctggtcaagctggagaaggtctactttgtgtcgaaccggataacccaaatcgagaacctggacatgctcaccaatctgaccatgctagagctgggggataacaaactgaagaagatcgaaaacatcgaaatgctcgtgaatctacgacagctcttcctgggcaaaaataagatagcaaagatcgagaacttggacacattggtcaatttggagatactcagtctacaggccaatcgcattgtaaaaatcgagaaccttgaaaagcttgccaacctccgcgaactctacgtttcggaaaacggagtggaaaccattgaaaacctctcggagaacaccaaattggagaccctcgacttggccaagaaccggttgaagggcattgccaatctggaaaagctggaactgctcgaggagctgtggctgaaccacaacggagtcgatgactggaaggacattgagctgttgaaggtgaacaaggcgctgcagaccatctacctggagtacaatccgctggccaaggatgttcgctaccgctccaaactgcgcgacatactgccgcagctgcagaagattgatgccaccctgtgcaaggtgcccggtacctagatggaaccactgtaaaccccttgaaagactaatccacggcgttgcgccactacatttatatcgattaactttgaaaaactgcgtttaaaatatacatacaaattaaccact

SEQ ID NO: 12381 - protein, 326 aa, DROSOPHILA
MGDADRAMNEPEAAKTVSGIQVIPAEDVASIEDIITIDPDCYELDLNHRRIEKLENFEPLTRIERLFLRWNLIKKIENLSSLKTLIELELYDNQITKIENLDDLPHLEVLDISFNRLTKIENLDKLVKLEKVYFVSNRITQIENLDMLTNLTMLELGDNKLKKIENIEMLVNLRQLFLGKNKIAKIENLDTLVNLEILSLQANRIVKIENLEKLANLRELYVSENGVETIENLSENTKLETLDLAKNRLKGIANLEKLELLEELWLNHNGVDDWKDIELLKVNKALQTIYLEYNPLAKDVRYRSKLRDILPQLQKIDATLCKVPGT

SEQ ID NO: 12382 - DNA, 5471 bp, DROSOPHILA
gcgggagatgatgccggtatcgaaaagtttaatcgccgattggtccgggtaacgaaggagcacgccaaagaggccaaggaactgctcacactaatgggtgtgccctatgttgatgcaccgtgcgaagcggaggcccagtgtgccgctctggtgaaagctggaaaggtttatgccaccgccacggaggatatggatgccctcacattcggatctacaaaactgttgagataccttacctacagcgaggcacgaaagatgcccgtcaaggagttcagctacgacaagctgttggaaggtctggccattaacaatcgagagttcattgatctatgtattctgctgggttgcgattactgtgagagcatcaagggtattggacccaagcgagcgatcgaactgatcaacacctatcgggatatagagactattctggataacctggactctagcaaatacaccgtgcccgagaactggaactacaaggtggcgcgggaactcttcatcgaaccggaggtagctgatgccgactccatagatctcaaatgggtcgagccggatgaggagggccttgtcaagtttctctgcggcgaccggcagttcaacgaagagcgcgttcgcaacggtgccaaaaagctgatgaaatccaagcaggcccagactcaggtgagactcgatagcttctttaagacactgcccagcactccgaatgccacaaacgctgcaaaacggaaggccgaggaagcaaagaagagcgccaataacaaaaaggccaagaccagcggcggtggacgaggccggcgacccaagtagttcattcgtgtgttatctggaaaaacgtacaattctttaatcttaacttaaccgtaaagcctatgcatacaatataaactacatctttgagcttaatgctagttggtctgcttgtgggtgcgggtgaggttgggatgttggattatggatattggattttgaattagagtttggactgtgggggctgcgactacagcaaatactgcttggccagggcacgcagaaatctcgatttccgcaccatggcagattctcgtttgatctcctcattgttgtttgcattcagctccagagtgcccatcatagaaatctgttttttaaaaatgttataaagataaatgattacccgcaaatgagcacagagtaatagattcctaccgcttcaagtttccgactgtgttcgcctcgcttagcgtgcagattgacgatgaactccagcagagttgtatcccagatgcagctgtaatatgcatccatggcatcggtgaaattcgacgatttctcgctgagattcttgaacacaatgccgtagtcgatctcatcaaggaactgacacagaacggtggcctgcatgtgacagcccagattggcggcacatcgaatcatcttgcggatcacgtagtcgtcggccacatttctctgcagcggcatggtgcagtagtcggtgccagtaaccagcgcatttacatagcaacgcattgcggactcattattgccgatggctagatctagatcgcctttcatcttcagccatgaaatggtttgcggatagtaggacaaagcctcggaaagaagccattgcagggtctcgcaaacgctcctcaaactgtagctgacagggctgaaatgaggattaaaagttattatttaaaaaaaaactatattactgtctgtctactcacttgttaatgctggtaggccacagctgcatgtactcgcagcttaaatcatgattggggtcatccttaagtatgttgtggactttgcctatcatggagatggcgagtccgaaaacgctttggtggcggattcgctgtaggaaggcctgcagggaactgataccgccaactcctgaggagccacgcttcggaacgttaaggaacatgcttagcatcagttcccaggcatcgcgacataccttcttggggcccttcatcttctccatctcgatgaaggtggcggcgaaggccaggggtagttccaggggacccgcccgtttatccaggtaaaggagaggtggaaattctgtgaggttaagtagcatgatagcgcaactctctaggatatccggacgtgggacgattgaatctcctgcctgcagggctcccaaacattgcttgcatcttcctcccaaggattgcagatcgagtggcttctggtgccactcctccaggcactgtgttatctgaatgtgcaggatttcccaggtgatcagcttacacatcagctgcacattggccgccatctcctggcgctgattttccgacttcagtacactcagcattgaaacggcatcgatgtagttgccccttgtggccaattctcgcgccttgccgagcagaacatagctgaagtcttgcaaaaagctaaccggcatggccataataagagttttcaggggctgtggtacgtcccaactgggattaatggcccacagaggttttccaggagcagttgcgcataatttcactagcaatatcctcactgtgttggcattggtgcagcttatcagttgtcgctccagagcgcccacgtcaaccctgctcactagaaggggtaagttaaaatataataaatgaattttgttacaggaatggagatgcatctcttactcttggagtgacacatccagtcggaaagcgaggccaacgagttggtgggcaccggcggcgtcgcctgcagcatctgttcgtcaatatcctggagttcatctgacgagaacagtccaaatcctcgcaccgtttgtagcaactgtcgtgactgcccaccctgatgaagcaaacagtcgatgaggaagtgcttgagtgccgcctgttctttgaaagtacagtggggaagcatttcctgcaaagcctccaccagcggtggcaggcagtccagttcccggtacttctcaaagtactcaacgctgccaaagatgctgccccactcaaagatgtttcgcaccacattcaatgcagccacctgcaattgcagctgaactgtctccttgagtatgcccgtggagatggaaccctcaatgtccagttccacttgccgccggcttataaaggggatttctcgccttctgttgtccattcgcagaattgatacaatgtctgtgtagttgttaagtagcgattgctggaacttctccagcagtgactgctcctcggcgctaattccacaggcctgcagtagaccttccagttctgacggtcgtatgtggcagtaatatagagttgtctgtggcgggattgcctgcagattagtattacacgcggcggccgcttcccgggccaaaacatactgtttggtgtacaggtaatattgggcgagctcgtagtgcagttgggctctcaattcctggggtgttattaggtgcataacatcgtagttttggccattgccgatatcatcacatcgcagcggaacaaagctgtcgtagtgaaatatgtagaaaggttttgtcgaggcgcagagttgttgcaaatactcgatggatggttgagtcggtgtgtccagaaactgctggagctggtccacagtttggtacctataattaagccttatttgagcattagagtatggataacttaaccacatcttacattgtgttttgaggacgtggcgcttttaacgcctgctcctttatcagttgcattcgcagcagcatgcggtggtatatggtcaaggcgaatcttgctgctctttcgtttccagcagcggctgaaaggattcacagaggatatagagaagtatatgtggaggctaggaattaacatacaaattctcgcgtcaaaatcattgggcaggggaatacttaaggagcagccgtagcttatggtgcacagatcgcgcagcaaggccagctgcataatcacaggcaggttcttctccaatgcatccagatcccacttcagccaagtggctaccttcagctcgaggattttcagtgccaactgcttgcggttcaattgcaggcccttctccgcgggcctttgtgggctatggggcatgcccactccgccggaggcagtgggcgttgtcggcgcaggggcaccaccaaccacgccgggaatgggtcccgaattcgatggcgtctggtttagattctgcaaatcactgccaggcgtccccactgactcctgcgccgtgttcggcgtcatgctgatgaactgcacgatcagctccatggcgctgggctctataaatggtgggcatggattgtaatctcaatttgtcggccggattccacaagtgagtcgaacataccgggatgcgggcgctgcagatgctgcgtaatcttgtgcggatcgagcaggaactcgaaccacagtaccgtttcggcagccagtggaactggcttgggcttaagaggatcgtccatgctaatccctgccaaaattcaccaatcaaaacaaaaattaaagaatggcgaagggagaccagctggctgtggctatacaatcgatgtatctatcgatgggcgatagattctgtccgcttttgatttcgataaatttgccaaataatttgatttgtgttatcgatacatccctgccaactcgttttatggacaattgaaagttggtttttgaagatgctgttaaattgaaatatttaaatctttttttaaatagaccagtagcagaatgtactgttatcttcttgagattcttgttggcaattaaagttctccttattcgtttgggacacaaagaagtatttccgcttttctaaaaaacaattttcctctttttgtttaggcataattttactgttaataataattatttagttatccatttatatatgggcaattaacagcctttacctaaaattttacaataataaataccccttaacccaaatgaagatttcgaaatccagctgtaataataaaatataataccgaatttaatgtaggtctaaagtttatgaaatagtttttacttctttcattttagtttatatgtttgtttttattttatccatacttcattagtaccataaaatgtttaactccatctcctttgcacattgatcggaaaaacacaaacaaaaacgaccaaaaggggagtacctaatcatttcaatatgcctaagactattttattgttgttcattaaaaatgtaaaatagcctcaaaaactttttggttaatttatgcaaatattctgtttgttgtatatcgagtcaggtgctctagagttgggttatctctctctttcagtttgatttcgatgcagacactgaaagaaatctattacaaaattgtatagtttatagttgatgttttgcggaatgttcatgggtatttttttccactgtaagttcctctaagtttattgtacaccctttttttagatggtgatctttatgagcatttctcgactccataatctgaatcttaaataaaatatttaacgttcaatcaggtgattttatgcaaattacac

SEQ ID NO: 12383 - DNA, 3096 bp, DROSOPHILA
ccacagccagctggtctcccttcgccattctttaatttttgttttgattggtgaattttggcagggattagcatggacgatcctcttaagcccaagccagttccactggctgccgaaacggtactgtggttcgagttcctgctcgatccgcacaagattacgcagcatctgcagcgcccgcatcccgagcccagcgccatggagctgatcgtgcagttcatcagcatgacgccgaacacggcgcaggagtcagtggggacgcctggcagtgatttgcagaatctaaaccagacgccatcgaattcgggacccattcccggcgtggttggtggtgcccctgcgccgacaacgcccactgcctccggcggagtgggcatgccccatagcccacaaaggcccgcggagaagggcctgcaattgaaccgcaagcagttggcactgaaaatcctcgagctgaaggtagccacttggctgaagtgggatctggatgcattggagaagaacctgcctgtgattatgcagctggccttgctgcgcgatctgtgcaccataagctacggctgctccttaagtattcccctgcccaatgattttgacgcgagaatttccgctgctggaaacgaaagagcagcaagattcgccttgaccatataccaccgcatgctgctgcgaatgcaactgataaaggagcaggcgttaaaagcgccacgtcctcaaaacacaatgtaccaaactgtggaccagctccagcagtttctggacacaccgactcaaccatccatcgagtatttgcaacaactctgcgcctcgacaaaacctttctacatatttcactacgacagctttgttccgctgcgatgtgatgatatcggcaatggccaaaactacgatgttatgcacctaataacaccccaggaattgagagcccaactgcactacgagctcgcccaatattacctgtacaccaaacagtatgttttggcccgggaagcggccgccgcgtgtaatactaatctgcaggcaatcccgccacagacaactctatattactgccacatacgaccgtcagaactggaaggtctactgcaggcctgtggaattagcgccgaggagcagtcactgctggagaagttccagcaatcgctacttaacaactacacagacattgtatcaattctgcgaatggacaacagaaggcgagaaatcccctttataagccggcggcaagtggaactggacattgagggttccatctccacgggcatactcaaggagacagttcagctgcaattgcaggtggctgcattgaatgtggtgcgaaacatctttgagtggggcagcatctttggcagcgttgagtactttgagaagtaccgggaactggactgcctgccaccgctggtggaggctttgcaggaaatgcttccccactgtactttcaaagaacaggcggcactcaagcacttcctcatcgactgtttgcttcatcagggtgggcagtcacgacagttgctacaaacggtgcgaggatttggactgttctcgtcagatgaactccaggatattgacgaacagatgctgcaggcgacgccgccggtgcccaccaactcgttggcctcgctttccgactggatgtgtcactccaagatgagcagggttgacgtgggcgctctggagcgacaactgataagctgcaccaatgccaacacagtgaggatattgctagtgaaattatgcgcaactgctcctggaaaacctctgtgggccattaatcccagttgggacgtaccacagcccctgaaaactcttattatggccatgccggttagctttttgcaagacttcagctatgttctgctcggcaaggcgcgagaattggccacaaggggcaactacatcgatgccgtttcaatgctgagtgtactgaagtcggaaaatcagcgccaggagatggcggccaatgtgcagctgatgtgtaagctgatcacctgggaaatcctgcacattcagataacacagtgcctggaggagtggcaccagaagccactcgatctgcaatccttgggaggaagatgcaagcaatgtttgggagccctgcaggcaggagattcaatcgtcccacgtccggatatcctagagagttgcgctatcatgctacttaacctcacagaatttccacctctcctttacctggataaacgggcgggtcccctggaactacccctggccttcgccgccaccttcatcgagatggagaagatgaagggccccaagaaggtatgtcgcgatgcctgggaactgatgctaagcatgttccttaacgttccgaagcgtggctcctcaggagttggcggtatcagttccctgcaggccttcctacagcgaatccgccaccaaagcgttttcggactcgccatctccatgataggcaaagtccacaacatacttaaggatgaccccaatcatgatttaagctgcgagtacatgcagctgtggcctaccagcattaacaaccctgtcagctacagtttgaggagcgtttgcgagaccctgcaatggcttctttccgaggctttgtcctactatccgcaaaccatttcatggctgaagatgaaaggcgatctagatctagccatcggcaataatgagtccgcaatgcgttgctatgtaaatgcgctggttactggcaccgactactgcaccatgccgctgcagagaaatgtggccgacgactacgtgatccgcaagatgattcgatgtgccgccaatctgggctgtcacatgcaggccaccgttctgtgtcagttccttgatgagatcgactacggcattgtgttcaagaatctcagcgagaaatcgtcgaatttcaccgatgccatggatgcatattacagctgcatctgggatacaactctgctggagttcatcgtcaatctgcacgctaagcgaggcgaacacagtcggaaacttgaagcgatttctatgatgggcactctggagctgaatgcaaacaacaatgaggagatcaaacgagaatctgccatggtgcggaaatcgagatttctgcgtgccctggccaagcagtatttgctgtag

SEQ ID NO: 12384 - protein, 1007 aa, DROSOPHILA [sequence omitted]

SEQ ID NO: 12385 - DNA, 3089 bp, DROSOPHILA
actggccagcatgagcacggacttcaagcaaatcctggaggtgcgcacggagaacctcaagcagcagaagacgcgacgtgatcagtttagccagggaccaggtccgttggccgcgcacaccgtctccccctcgacagccaagcagggatctttgcttctcagcgaggaaaaccaagcggtcagcatagatatggggagcagcgataccacaccactcctatcaacccagacacagatggccatctacgatgattccgataattacgtccagcagcgggcggagaccatgcaaaatatagaatctaccatcgttgagctcggcggaatattccagcagctggcacatatggttaaggagcaggaagagatcgtggagcgtattgacacgaatgtggcggatgcggaattgaatattgaggctgcccatggggagatcttgaaatactttcaatccgtctccaaaaatcgctggctgatgatcaaaatcttcggcgttctcatattcttcttcttgttcttcgttgtttttatgtcgtaatcaaacgccagttgcccattaaaagccccatgtacctatccatgtatacagctttttattttaatcaagattcaatcacaatattgtttattccaagctgtggcctcccgaaacgattgtaaaataaagttataaatacgttctaaagcaaaatacatttattttagcatgtggttctttggtgaatttttccattctaatggaagctctaaaattaaatataatttccaaaatataaagccgaatgataaatatgtttgctgatgtaagaaacttgtatattaccttagaaaacgtgtaatgcaagtatcaaattggagagagactatatctatgtttgccctgctgataaggtttaagtgccctttcataatctttattatcttaagtgctcgttgctccatgttcgtcgtgtttagccaaaaattccgctgtccctcatgctaaacagaaaaatgaaaattggttacattgatttgacttttatttaatgcttaaaatccaactacaccaaagatgcgatatgcaaaaaataatcaaaataaaaacatgttacaatctcttactgcagaaaagtattacaaattgtatgaaaaaaacaaagcttcaagatgtctttatggatttacactagaatttacaagtgaagtattgttcgcggttgatggggactcttccccaaaaaaggaagtcctctacccgagtttagacaactaatacacgacgctgatgcgttggcgccaacactgagatccccaggcaagagcttgcctatgtcgagatgagcgaataaaccatgctaaaattagcaattagaaacgttagacaaatgaggaccctggccacaatgaatctcaattagacttacccgtatatgtagtagaagaagctaatcagatagacggccagtttaatccaaccctcacgcatgttccggtacaaagtatcggttttcaggaccgtggtgggatcataaagtccgggtcccgacatcacagggcggtttttgtaactgaaagcgataggggtattacaaagcatgagtgcttaagggtgcttatgttgggcttgggtgaatcttgatctcctcggatctcaaatcacattatatcacacggtcaaatgagtcacttaccgccaaatatgataggctatgaggggtatgttgatgcatagcgaaaaccattcgccgcagaacaagaagagcaagttcagaaagatgtgcagaaggtattcgggcaaaaccagctgaaatgcaaacacatacattacagggcgcactgcgggtgtaagcagtaagtttactgaccggattgaggctattgcactgatcaattgggttcttataatccgttttaagttcgtcgaatgcaatgacatgaaatatggcgaaaaatatcaagaatgcatccccgatcagggccactatgtacgtgaaggcggtgaagttgaaggccatcttgtaaaatcgctggagcacgtcttccaggtgctaatcaaagtgacttgctaattattatcgtaaaattcggctttgcaattgtagcgctgggactcacttgttttttttttacaagggcggcgatgatgacagctgtgcgccagggatgcactaatctaaacgatcaggcagcacagatgtacggtcacattgcaaatgaggctaataaataatcagctatccattataaatcaaatataatttcatttaaagaagcaattttaatttctaacgaattataatgttttgtattaattttaattctctggtaattttctctacgcacaaaaaataccactaacagttagccgatgcggtcacactacatttccaaatcgaaccgccatttgtgttgcatctcgaaatctggaaaaaattcgatccaagtgttctatgagcttctgttttttaataataataaataaataaattcgataatcaactgacaccagaaaagagcggaacacaatgtcgcagttcaattttgtgagcgatttgcagaatgctctcatcatggacggcgagacgcgcggacctgcgcccaggtggaagaagaagctggaggcgtctctaaatggaagtgtgaataccactcggtcggtgctatccgtctcgtacaacaccagtttctcgggtgtccaggcgcccacgaaaactccgggcaagagcagcgagggcaagaccaagaagtccaacaccacgccctctaagacgccaggaggcggagatcgctttattccgaatcgggcggctaccaactttgagttagcacactttctggtaaggattccactcatccctccatcccgccctgtaagggcatccttattccagaccccttaagaatttattgaccacctgaccatctattaggtgaacaaagactccggcgataagtccgatgaggagaacgacaaggccacctcgagcaacagcaacgagagcaatgtccaggcttcggctcacaagggcgaccggcagaaactcatctctgaagtggcccaggtcggtgactccaagggcgggcgcattttgtgctaccaaaacaag

SEQ ID NO: 12386 - DNA, 836 bp, DROSOPHILA
cagcgctacaattgcaaagccgaattttacgataataattagcaagtcactttgattagcacctggaagacgtgctccagcgattttacaagatggccttcaacttcaccgccttcacgtacatagtggccctgatcggggatgcattcttgatatttttcgccatatttcatgtcattgcattcgacgaacttaaaacggattataagaacccaattgatcagtgcaatagcctcaatccgctggttttgcccgaataccttctgcacatctttctgaacttgctcttcttgttctgcggcgaatggttttcgctatgcatcaacatacccctcatagcctatcatatttggcgttacaaaaaccgccctgtgatgtcgggacccggactttatgatcccaccacggtcctgaaaaccgatactttgtaccggaacatgcgtgagggttggattaaactggccgtctatctgattagcttcttctactacatatacggcatggtttattcgctcatctcgacataggcaagctcttgcctggggatctcagtgttggcgccaacgcatcagcgtcgtgtattagttgtctaaactcgggtagaggacttccttttttggggaagagtccccatcaaccgcgaacaatacttcacttgtaaattctagtgtaaatccataaagacatcttgaagctttgtttttttcatacaatttgtaatacttttctgcagtaagagattgtaacatgtttttattttgattattttttgcatatcgcatctttggtgtagttggattttaagcattaaataaaagtcaaatcaatgtaaccaa

SEQ ID NO: 12387 - protein, 144 aa, DROSOPHILA
MAFNFTAFTYIVALIGDAFLIFFAIFHVIAFDELKTDYKNPIDQCNSLNPLVLPEYLLHIFLNLLFLFCGEWFSLCINIPLIAYHIWRYKNRPVMSGPGLYDPTTVLKTDTLYRNMREGWIKLAVYLISFFYYIYGMVYSLIST

SEQ ID NO: 12388 - DNA, 3143 bp, DROSOPHILA
actggccagcatgagcacggacttcaagcaaatcctggaggtgcgcacggagaacctcaagcagcagaagacgcgacgtgatcagtttagccagggaccaggtccgttggccgcgcacaccgtctccccctcgacagccaagcagggatctttgcttctcagcgaggaaaaccaagcggtcagcatagatatggggagcagcgataccacaccactcctatcaacccagacacagatggccatctacgatgattccgataattacgtccagcagcgggcggagaccatgcaaaatatagaatctaccatcgttgagctcggcggaatattccagcagctggcacatatggttaaggagcaggaagagatcgtggagcgtattgacacgaatgtggcggatgcggaattgaatattgaggctgcccatggggagatcttgaaatactttcaatccgtctccaaaaatcgctggctgatgatcaaaatcttcggcgttctcatattcttcttcttgttcttcgttgtttttatgtcgtaatcaaacgccagttgcccattaaaagccccatgtacctatccatgtatacagctttttattttaatcaagattcaatcacaatattgtttattccaagctgtggcctcccgaaacgattgtaaaataaagttataaatacgttctaaagcaaaatacatttattttagcatgtggttctttggtgaatttttccattctaatggaagctctaaaattaaatataatttccaaaatataaagccgaatgataaatatgtttgctgatgtaagaaacttgtatattaccttagaaaacgtgtaatgcaagtatcaaattggagagagactatatctatgtttgccctgctgataaggtttaagtgccctttcataatctttattatcttaagtgctcgttgctccatgttcgtcgtgtttagccaaaaattccgctgtccctcatgctaaacagaaaaatgaaaattggttacattgatttgacttttatttaatgcttaaaatccaactacaccaaagatgcgatatgcaaaaaataatcaaaataaaaacatgttacaatctcttactgcagaaaagtattacaaattgtatgaaaaaaacaaagcttcaagatgtctttatggatttacactagaatttacaagtgaagtattgttcgcggttgatggggactcttccccaaaaaaggaagtcctctacccgagtttagacaactaatacacgacgctgatgcgttggcgccaacactgagatccccaggcaagagcttgcctatgtcgagatgagcgaataaaccatgctaaaattagcaattagaaacgttagacaaatgaggaccctggccacaatgaatctcaattagacttacccgtatatgtagtagaagaagctaatcagatagacggccagtttaatccaaccctcacgcatgttccggtacaaagtatcggttttcaggaccgtggtgggatcataaagtccgggtcccgacatcacagggcggtttttgtaactgaaagcgataggggtattacaaagcatgagtgcttaagggtgcttatgttgggcttgggtgaatcttgatctcctcggatctcaaatcacattatatcacacggtcaaatgagtcacttaccgccaaatatgataggctatgaggggtatgttgatgcatagcgaaaaccattcgccgcagaacaagaagagcaagttcagaaagatgtgcagaaggtattcgggcaaaaccagctgaaatgcaaacacatacattacagggcgcactgcgggtgtaagcagtaagtttactgaccggattgaggctattgcactgatcaattgggttcttataatccgttttaagttcgtcgaatgcaatgacatgaaatatggcgaaaaatatcaagaatgcatccccgatcagggccactatgtacgtgaaggcggtgaagttgaaggccatcttgtaaaatcgctggagcacgtcttccaggtgctaatcaaagtgacttgctaattattatcgtaaaattcggctttgcaattgtagcgctgggactcacttgttttttttttacaagggcggcgatgatgacagctgtgcgccagggatgcactaatctaaacgatcaggcagcacagatgtacggtcacattgcaaatgaggctaataaataatcagctatccattataaatcaaatataatttcatttaaagaagcaattttaatttctaacgaattataatgttttgtattaattttaattctctggtaattttctctacgcacaaaaaataccactaacagttagccgatgcggtcacactacatttccaaatcgaaccgccatttgtgttgcatctcgaaatctggaaaaaattcgatccaagtgttctatgagcttctgttttttaataataataaataaataaattcgataatcaactgacaccagaaaagagcggaacacaatgtcgcagttcaattttgtgagcgatttgcagaatgctctcatcatggacggcgagacgcgcggacctgcgcccaggtggaagaagaagctggaggcgtctctaaatggaagtgtgaataccactcggtcggtgctatccgtctcgtacaacaccagtttctcgggtgtccaggcgcccacgaaaactccgggcaagagcagcgagggcaagaccaagaagtccaacaccacgccctctaagacgccaggaggcggagatcgctttattccgaatcgggcggctaccaactttgagttagcacactttctggtaaggattccactcatccctccatcccgccctgtaagggcatccttattccagaccccttaagaatttattgaccacctgaccatctattaggtgaacaaagactccggcgataagtccgatgaggagaacgacaaggccacctcgagcaacagcaacgagagcaatgtccaggcttcggctcacaagggcgaccggcagaaactcatctctgaagtggcccaggtcggtgactccaagggcgggcgcattttgtgctaccaaaacaaggctcccgctgctccagaaacacacaacaatcccctgaaggtcgtgtactccatt

SEQ ID NO: 12389 - DNA, 823 bp, DROSOPHILA
ctggcgcacagctgtcatcatcgccgcccttgtaaaaaaaaaacaacacctggaagacgtgctccagcgattttacaagatggccttcaacttcaccgccttcacgtacatagtggccctgatcggggatgcattcttgatatttttcgccatatttcatgtcattgcattcgacgaacttaaaacggattataagaacccaattgatcagtgcaatagcctcaatccgctggttttgcccgaataccttctgcacatctttctgaacttgctcttcttgttctgcggcgaatggttttcgctatgcatcaacatacccctcatagcctatcatatttggcgttacaaaaaccgccctgtgatgtcgggacccggactttatgatcccaccacggtcctgaaaaccgatactttgtaccggaacatgcgtgagggttggattaaactggccgtctatctgattagcttcttctactacatatacggcatggtttattcgctcatctcgacataggcaagctcttgcctggggatctcagtgttggcgccaacgcatcagcgtcgtgtattagttgtctaaactcgggtagaggacttccttttttggggaagagtccccatcaaccgcgaacaatacttcacttgtaaattctagtgtaaatccataaagacatcttgaagctttgtttttttcatacaatttgtaatacttttctgcagtaagagattgtaacatgtttttattttgattattttttgcatatcgcatctttggtgtagttggattttaagcattaaataaaagtcaaatcaatgtaaccaa

SEQ ID NO: 12390 - protein, 144 aa, DROSOPHILA; identical to SEQ ID NO: 12387

SEQ ID NO: 12391 - DNA, 8461 bp, DROSOPHILA
actcatgactcttctcaagcctggagacctgcgctccaaagacttggccacattcctgtgggccagcgctcaactcaattgtgcattgactcctgaggaaatcagacaattggaactgaccgccctgcgcaagctggatcatggggagtacgaatatttccctgacaaccttgttgacacctgcctctctctgtgcactttgggtcactactctaaggatctgattaatgcagctgaagaactaaaagctgcccaaaaacgccagcgagcccaacccaaggtggatagtcgtttaattgtgctgcgatctgctgtggccattgagcagccttcaattgctaaagttaaaacagaacgagcttttaaagagtttgatggagcaccagcttatttgctaaaagatcgcccagacttgacgaaatacgcccaggagctgagtggcgacgcggatgtggagggcgtggatgtggtgtgtcccattgtcggaataaatttgccaagcttacgagtgcagacaatgggtgcccaggagagtgtgtactttgttgaactgctaaccgcagaacagactctgaaattcagcaagaaaccgacttcattaatacgtcttaagaaaagacttttggaatcccttggccgaaaagttgtagtagtaagcattatagagagttgaaactatataaacacagtttaacacatcgttttgtttcagctaaactcaacagaaatggccaccaatgcaaaggaactccgccagctcctagaaccggcagcaaatgcaggagaagaatccaaggttgcccaaggcgtgggcaactgaattgtgtgatataatatggggccatatcggccttctaggctagttacaaatcgtagctttatttaacagtgttttatgtacttgtacatattatttaaatattaatagcactaaacataatggtcaacaattaatgtataatacaaggaatgggctacaggtgtgtctcccccagctgtcctatcggatcgacttgatcttggccttcagcaccacgtaggacacaaatcggaaaaccaggatcatgactcccagcgcgatcacatcgttccagaactgatcacccctcatggtgatttcctctaagaatttctttggatacctataaacacaaagcagagttagcgcttgagaaaaagaaaagttagcagaatctaattacctgtaatggcagtacggcgcctcctcgcaggccaaggtacctcgatccaagccataaatggctgatatgaagccctcaagtccatatcttaagtatgatatgtgactgccccaccttaagtagcttggcagatcacgcagggtcactccaaagccggcgaacatcatcatgggaatcgttagcactggggccaagaacgttccattcaccacatcgaaccaggcaccaatcatcaaaccaaaactatgtcccacaaagacggtcagtaaactaatggagaagaacataaagaatctgatccactccatcggctgataactccaaaggtaaacgatgacagtgaagaagaaacaacttatgatctgtaaccaaaagggtcagttaaaaattgaaaatgggatattaaagatcgctacgcacagatatgggcaggtccacgagtgtcatggcagtgtagtaggctttgagtgagtaccagcgattgaagtgctccttgatcaatatggagatgtccatggggactggtcaaatgatattcaaataagttaatatgtctacgcaatcgactcaagtgagcttacaagtcagaacagtcaacatcatcgtggtcatggaatggtgcatcagtatggcaaacagaagattgtagttgtcgagcactcgtgatccttcacgtcccgtgtgatcgtacatagctccgaacagagcggccactgctatgttgactccgatcctcaagtgcgtcatggtcgtgtctcgtttggctttgatgaaacctcgtcgcaaaagcacagagcactggtttgagtagctggtgtcctccagggatcggcttttggttttctttggtatgggatactttctcatcaagacctcagcgcgcaacaccgcactgggattatggaaccaagtcaggcagcttccgttctcagtggcgagcttaagggtgtcgaccttgtcgtatccatactctccgcaagcgagctcgataactggagcaataaggattgtattagtgtaaattcactcagagatctgtgctggactcactgtaatccgctggattgtggtacatcggacagggcagatccaccgactgcaggaacggcaccaatttctgggtgctgccctggtagacgcagttgccagcggacaggacgtagacctgatcgaagatctggaacaacttggccgtcggctgatggatggtgcaaataatggtgcgtccttggctggtcaacttcttgagcagctccaggacctttgtgcacgagctactgtccaagccactgaaagaaagaaaagcaagatgtaaacattcctcagtttgttaaaaatggatatattggctcatacgttgtgggctcgtccaggaacatcacagtgggattattgatcaactccatggcaatggatagcctcttcttctgaccaccggacaggcgcattgtaagggtctgatcgtgattgtacagaccaaggagcagcagaatgtcctcgatctgcaagggtaaatccgcgatttatgactatgatctttaagtgaagatcaccccactcaccctgctctccttctcctcgtagctgactgtctgacccagtttaagatcggcggctatatgcatattctcgtttaccgtcagcagcggctgcagacgatcatcctgggtgatgtagcaggacatccgacggaaggaagctgcagggagggattaccatgaattctggatatattgaataaattaagtgaggtcatatactaacgcaaatcacgtcgccgaccattgagcaagatggagccatccactccggtcgtcttgaaacctgaaagggcatctagcaaagtggactttcctgcacccgaaggtcccatgatggcaatcagctggctgcctgggaactttccgcacacattgtgcaagatttccttggatcctaagaaattgcgaaattacttaaatgccatcgtaaaatatgatcataaaaacttaatagacattcagtgtgttttttttttatacggtcgtcggtatcaaggttcagggaaccaatggagaacccatgagtacgcgtacgagcgacgatattcatgaatcatctgcaggctataacttggctgaattaaacggctattgaggtaagatctcgagtaaatctacattaatccacttcagtgaataacctgttaactacacaactcgaaaacaattcaaatcagtaaacaattctaggtgatatacgtatcaagccatagaaaagagttgcaaatatagggaaaaagggtttagcttaattaactcaatctttcacagtaatcgtattgttatgttagcaatattacacattttagcacttctagtcaccaatttaacattccgatagcaatggccatatatccacctaccgaaaggttgattaattaattaccgccacgggttgaaaatttgtgcagttctaatcaagttaccaggggctaaacaatgtcgatatcttttgaactttgaaattagcaaaatgttctaaagccaaacccatcatatcgaattacaaatgctctactaactatcgtattggcaagttatttcttatcattttatggactcgacggaaagggaatttatgaatgactaactggcattgaatatatacaaccgggaagggggtgtgatcggaataagcggagtgatcggctcttatctaatcaatggaaaaccaagttggttaaagaactagcaagcaagtgtttggcaagtgattggtatgtggaggcactgccgaaaagaataaccttgtagtaaactttgttcggatgtaattatcttatggcactcgtacttaagaaacatttgaaatatagtatctgaaggatttgctttatctgagtatatctgtatcccttagaatactattaatgaaaagactttctagcatatgttttatcttctattataacagtagttttgtctagtcataatttagatattatttatgagactatattggtaggatataaagaattgaaggtcattcccgttcaaagagtagccgctgatcgtaaaacatatataaatgcccagctaattttaagttctccgctgccccaatcttatcgagccatatcttagatcatgcgatcgcaatggttagttagcgacaactcgcttcttgtagctcacctcgattgaagcccaatttgacggtgagggacagctccttgaactccatgtccacaggctcgcgagctggcagattattgagggcatcggtgtcgaagtgcacctcctcctccacgacaggttccagtggcggctgcttgctgggctcattcccattggtatagttcacctgtggcggtgtgggtatgggtggtggcgtaacactggactgggcattccgccatccgccactgttgccaactggcactgtggtgctgttatagacgcgactggaggtcacctccccgatctcgatgcccagaccgaggccggccactccgttgtcgctgccgaacaagaactgctcgcgcggtgtcgccattctgggattctaggatagcctgtcaactgtaatataataaaaatatatatttcggattcactgaaagttttctattacatcctaaaagcttaactctatatgaaactcttctcttgatgattagccagttggatctttgtctgcagatttgatggattgtgcaaggtgcgtggctaaaagtgggaatcagttggcaaccagttgctagccgatacaaaatatttagcttagcttattgaaacgggttccacgccagctgaatgtgcactttgatcgaaagctgggggagatcgatcaacctttgtcgtctaaccccgtcatattcacatggattattcacgattgcacggtgagattgttaattttaaagggcatgtaaagggaggaggatcgatggggatagcaactaatccagcgtagatgatgcttccgattaaccaaagacatggtgtcgaattggatggatgtcgaaaccatgcaattatcatccaccgttcgcattaagtgccagtttacataagcgaaatgtagcacgcagtttactccacatttcgcactgctgcaaaagacaattaaatgcgagtacatttaatgcacagatttgcgaaaagatcaaggtacaattgctcagacggaggcggaggcaaacaataaagcggcacaattgagtggaaatggaatgatggaatggcgatggtgagagtgccgtcgtatatgcacatctgccattgatccgtccatccaagcgatccactcgattctctagatccgatcccatcccatctgatccgatccgatccgagctgatcaaaacaaaagcattgttccaagcggcgagttaacaacaaatgtaataaatgcaataaatgtagctgcagctacatattgatgggctacagcttatcaaagtgggattgaaatgaaaattgtttaaatcaattattcataattaactgtgtggatgcaatccttttgcttggaaagtagatccagatatggcatggctgtagttacaccaatgtatagattgtatcttataggttgcgaatctgcgcttctgaaagttcatattataatcaatcttatacctgtgacgaatgtctaaataatatagcccgagcagtcttatcaggagctgggcaaattcctcgaccgggagatttccctttccgttttcgagtagttgggaaaggtaggggcttcgccagtgggaactgctccgcagccatgcacctaattaagttataacacagttacctatggtcaatgccccatatttcccgatgatgacctggatgtcacgaagggagtgacattgatggctcttaatcggctggctgtacatcattattgactgatgccggagtagatcccaccgtggtcacgttttgccgggcttgctattttcttggactcctttgttcgagcccggctttacatttcgtgtttgcctgcgactttcggagacttagatcggcctttaacaccacagcacttatgtgcacacatcacacatacgtacatatgtataccatgtatatcatttgtgtgctgatgctgcgttgaaacattgttttgtatagcttgtataccttgcaaaccggttcaccggatccccttctccgccagattttatgcggcagtgcagctgggaggagatggaaacgaaagcagcagctgtttgattcaagatcggaatatcggggtaatggggaaacgggagcaaatccctaccgattcaaacccattcgatgactcggaacagatttctgtttatgcatttctgataatgcgtgataattcggaaataacaaccgcatcccatctttggtcttcgattattgtcatattgattttgagtgcgattgccgcattctgtgacaaaactttgtgtcaactaatcgattttattcatttcacatgttacaaatctggagctcagagcgcgaaaagcgaacttggcagtttcggattgggggtcatcccaatcggatgtgacccacaagtgatcaggtctcgagtcgccaaaaagatacatttcacttgtatctattccatggcatatatcgtagcatgaatcattgagtcatttaacacttgccttcgtgcgattcgaatgagttttgtgtgttaacaaagactggcgtttatatctaaattcactgataagctcttggccaataaatttctgtcttaaaaacgtcaattcattttactgcgactggcgaagtaggtattacatcaatactccacttattactgaaatctttgaatatgtttttttttataaatttgcagtcacttagatgaaactctaatttccaaaatttaactctttttaaattcataaatttaatacgctgctctagtttttttttcagccacttattgtttctagtaaatttataaaatatgtcttgcttttgttggctcactcgtattgcggttgtcacagattaattgatagtgcgttttatttaaaacttatcacattaattacaccaataattttcattttttatacattaatttttgtatccttttctttggattcacttcatccccttgcatgagcacagctgtgtgtgtgcactcaagtggagtccttacccttaagagagtcaggattaacgcactctggaagggatttgcagggaaactactacttcgcacggacttaactcgcgatccgcacaaccgagtaacagcttcttcgaagcgacgtgcgcgactggcgtccagtcaacaaacagtgatcccagctagctctggtgctgcagcgccgaatggctgtatgacggtagcagttcccgttcccatacccatacccataccaatacccattcccgatcccaaaccgatcgtccagaagtcggagaatcgcttcgtcggcccagctgacgactcactggccacaaagaacacgatcggctgtctcagcgggtgtgtgtcgtgtatctcagctccccaagtggatgtgggtgtggatgtgtgtggagcgcgggctttatcgaaggcgttcagtggtggcagctctacatctatggcgggaaataaatcaactagtatgcatttaaattcagtaaataactttatttaacaaatcttttgattatcaatcaatcacaaacctgtttttaaagtagttattacttaagctactgcagctactgaagtggtaatccatttataaataagatgaatcatctttcagtttctgatctttgtacattgaactacaagctacaatcaaacatcttgtatctgctattaattggattgggtatcttaagagttagatatagaatacaatacaaaaccagttttttagtttatcatttttgttattgcaaaagtctaagtataaacaatgtgcaaatatttaagaaagcttcttgtaaactattaaacgtaacgggggagtaaaattaaattaaaatgaattagtaattatgccatattttattaaattttcctgcaggtgaaaatagctagattcgcagcactgaatccaaaaccaagatcgttcggcagtcgctgctcgcgtatatttcgcattggttattagtgtttagccgttgttatattgtcgttttccttcgctgataagagccgctcacgcacaccaacgcgcacggagcacacacacacgcacataggtattctcacctggctgattgagttttggctttttggcggcacacgatcacgatctcggcccg

SEQ ID NO: 12392 - DNA, 2208 bp, DROSOPHILA
tcgcttcgaagaagctgttactcggttgtgcggatcgcgagttaagtccgtgcgaagtagtagtttccctgcaaatcccttccagagtgcgttaatcctgactctcttaaggttgacaggctatcctagaatcccagaatggcgacaccgcgcgagcagttcttgttcggcagcgacaacggagtggccggcctcggtctgggcatcgagatcggggaggtgacctccagtcgcgtctataacagcaccacagtgccagttggcaacagtggcggatggcggaatgcccagtccagtgttacgccaccacccatacccacaccgccacaggtgaactataccaatgggaatgagcccagcaagcagccgccactggaacctgtcgtggaggaggaggtgcacttcgacaccgatgccctcaataatctgccagctcgcgagcctgtggacatggagttcaaggagctgtccctcaccgtcaaattgggcttcaatcgaggatccaaggaaatcttgcacaatgtgtgcggaaagttcccaggcagccagctgattgccatcatgggaccttcgggtgcaggaaagtccactttgctagatgccctttcaggtttcaagacgaccggagtggatggctccatcttgctcaatggtcggcgacgtgatttgccttccttccgtcggatgtcctgctacatcacccaggatgatcgtctgcagccgctgctgacggtaaacgagaatatgcatatagccgccgatcttaaactgggtcagacagtcagctacgaggagaaggagagcaggatcgaggacattctgctgctccttggtctgtacaatcacgatcagacccttacaatgcgcctgtccggtggtcagaagaagaggctatccattgccatggagttgatcaataatcccactgtgatgttcctggacgagcccacaactggcttggacagtagctcgtgcacaaaggtcctggagctgctcaagaagttgaccagccaaggacgcaccattatttgcaccatccatcagccgacggccaagttgttccagatcttcgatcaggtctacgtcctgtccgctggcaactgcgtctaccagggcagcacccagaaattggtgccgttcctgcagtcggtggatctgccctgtccgatgtaccacaatccagcggattacattatcgagctcgcttgcggagagtatggatacgacaaggtcgacacccttaagctcgccactgagaacggaagctgcctgacttggttccataatcccagtgcggtgttgcgcgctgaggtcttgatgagaaagtatcccataccaaagaaaaccaaaagccgatccctggaggacaccagctactcaaaccagtgctctgtgcttttgcgacgaggtttcatcaaagccaaacgagacacgaccatgacgcacttgaggatcggagtcaacatagcagtggccgctctgttcggagctatgtacgatcacacgggacgtgaaggatcacgagtgctcgacaactacaatcttctgtttgccatactgatgcaccattccatgaccacgatgatgttgactgttctgactttccccatggacatctccatattgatcaaggagcacttcaatcgctggtactcactcaaagcctactacactgccatgacactcgtggacctgcccatatctatcataagttgtttcttcttcactgtcatcgtttacctttggagttatcagccgatggagtggatcagattctttatgttcttctccattagtttactgaccgtctttgtgggacatagttttggtttgatgattggtgcctggttcgatgtggtgaatggaacgttcttggccccagtgctaacgattcccatgatgatgttcgccggctttggagtgaccctgcgtgatctgccaagctacttaaggtggggcagtcacatatcatacttaagatatggacttgagggcttcatatcagccatttatggcttggatcgaggtaccttggcctgcgaggaggcgccgtactgccattacaggtatccaaagaaattcttagaggaaatcaccatgaggggtgatcagttctggaacgatgtgatcgcgctgggagtcatgatcctggttttccgatttgtgtcctacgtggtgctgaaggccaagatcaagtcgatccgatag

SEQ ID NO: 12393 - protein, 689 aa, DROSOPHILA
MATPREQFLFGSDNGVAGLGLGIEIGEVTSSRVYNSTTVPVGNSGGWRNAQSSVTPPPIPTPPQVNYTNGNEPSKQPPLEPVVEEEVHFDTDALNNLPAREPVDMEFKELSLTVKLGFNRGSKEILHNVCGKFPGSQLIAIMGPSGAGKSTLLDALSGFKTTGVDGSILLNGRRRDLPSFRRMSCYITQDDRLQPLLTVNENMHIAADLKLGQTVSYEEKESRIEDILLLLGLYNHDQTLTMRLSGGQKKRLSIAMELINNPTVMFLDEPTTGLDSSSCTKVLELLKKLTSQGRTIICTIHQPTAKLFQIFDQVYVLSAGNCVYQGSTQKLVPFLQSVDLPCPMYHNPADYIIELACGEYGYDKVDTLKLATENGSCLTWFHNPSAVLRAEVLMRKYPIPKKTKSRSLEDTSYSNQCSVLLRRGFIKAKRDTTMTHLRIGVNIAVAALFGAMYDHTGREGSRVLDNYNLLFAILMHHSMTTMMLTVLTFPMDISILIKEHFNRWYSLKAYYTAMTLVDLPISIISCFFFTVIVYLWSYQPMEWIRFFMFFSISLLTVFVGHSFGLMIGAWFDVVNGTFLAPVLTIPMMMFAGFGVTLRDLPSYLRWGSHISYLRYGLEGFISAIYGLDRGTLACEEAPYCHYRYPKKFLEEITMRGDQFWNDVIALGVMILVFRFVSYVVLKAKIKSIR

SEQ ID NO: 12394 - DNA, 3709 bp, DROSOPHILA
atgcgatccaagttacgttgtccttgcggagtcagcttacgaccaccatccgggtgcctctccaccatgttagcagcttccaaggcttgaagagcctgctcatgtgttagatacatgctaagtaatattaaatataaccttaaagtacaaccatttcccactcaccttgcgaatacagccatccgatgagcgacagtgcttggacggacgaacaccgttgcgcttgcgcccgctatagaccttggtgaaggccccaacgccggcgggactgcgcaggtacaggtgtctcataatagaggcgcagcgagtgtagaaccagtcgtcgtcggtaggagcagtctccttgaacttgccagtcttcatatagacggcctgttcgggcacaaaaatttttccggattttttgagaaaagcagccatgtttttggtcagaacgtgctgatcgatttcctttactgtgactccaggcatgttgctctctacgttcttgaaagcacgtttttaaggctcatgggtccgatatatgtatgtatgtatttaaaaaagtcttaccttttgagaagaaaaaggtttgcttccggttagtttgctgactttagtcaaaatggacgattggcaagtgacgtttgaaagagggaccaggtcattgaccccaaaggattactttccgatagttttgtcgtgcagtattggtgaacttggcaattcttttcgaaaacttaacctataaacttggaaaggaacgcaatgtagcaaaactactgttcttggtgacagggggtttaaggtagactaacaaggacaattttatgacactgaagccctatggagtaagaatcaaagaactgctgtattttggtttgtataaatgaataaaacgttctacgctaattgaagagcattcgaagaggtttgaatacagcgccatagggtgaccagcttgtggagcattgaaggtatttcttgttttaagaatgatcacgggatggtcacactagaaatacagccaaacaaaacaacaaaaagcatttcgagcgctaacaaatatatatctttcgacttgactcattcgcattccggttgaccgtgtcgcgcctgcagcatgtctgaaaagccgactgttctgattttgggtggtaagtggtcccgctgcatcctcctcatcgtcatcctgcccccgctccccactccacacttccgcttatcagcatcgctgactgcatcgctgctcttcctcttcccgcaggctgcggcttcattggacgcaacttggccacttatctgctggacaatgaactggcgcaggaaatacgactggccgataagacccctccgcagatggcatggctaaacgaggagcagacgcgggtcttcgagagcgatcgggtggagttctgcagcgcgaacctaataaacgccggtaggtaatcactacattagggtggctcgttccaccaggatgcggatcacaactcctatggagatccaaaatccgcaattaacattcttgtgaaaggaaagcgctatcggatatagaattttcaagtaccaccttggtatcgctgcgcgtaacgagccaccctaatgcatttgttgcacctaaactggttatagaacgcttccctttgttttcatacagcctcatgcaaggcggcttttgcgccacaccccaccactggacgggcctgggacattgtcatcaattgtgcggccgagacgcgtgccaaccaggatgatgccgtatacaaggagggtatcctgaagctcagtttgaactgcgccaatgaggcggctaaccagcgggtcaaacgatacgtggaactcagctctggttgtgtgaacagcagcgaaaagacgccgttaaaagaggactgcaagacggatccctggacgggcgtggccaagcagaagctcaaggtggagaaggaactggccaacatcgacgatctcagttacacggtcgtccgtttgcccgtggtctatggcattggcgataagcgctatttgagtgagtgtccctcttcgctgatacccgataattgatgtaattgacaaagcccatgggttaatcccgaacccaccacccattgcctttcgtttacagtgccgcgcattataatcgctgccatatacaaatacctgaacgagacaatgaagctgctgtggaacgatgccatgcgtttgaatactgtgcacgtatcggacgtgtgcgctgccgtttggcaattggctcagagtcccaagaccgccggtcagatctacaacatctgcgatgattcagcatcgacgcagggcaccattagtaatcttttagtggatattttcgacatcaatttggatttcttcggccttgtaatgtcgaatttggcaaaagtaagttagcatttaatcggcgcactaagcttcagcttattgtttattattcgcttgaattttcagctttatcccacggacaccgtcagtgaaatcaacgacaagcacatggcaccctgggccgagatttgccagcgcaatggcatcgacaacaccccgctgacaccgtacctagatgaggagcagctccagcacaagcacctctacttggataacacgaaactgaaagactttggctacgtgctgcagcatccgaaagtcactcgcgagctgctcatggagatgattaacgactatgtgaagcagcaattgtttccgaaatcgttggttctttgattcactacttctatcaaaagattgcaccacgttgacatgcactcggacccggagacatttattccctgtagcttgtaatccactagttttttaaacgattatcaaacctcttccaatttgtatacggacacggatactctcacatgcacgctgtgctgtatctccgttttttttaatcacaaaagtgtacttatagtattatagaacccatatatttttgatacattccagtcgatccagcgatatatacgtttttgcgtacgagtattccattgtgattagctaagtgaccaaccgcaatcgacaattaaaatgcacttgtttagagtttagttttgtgtatatttgattattttaatgttacggcaacggagcgatcgtacgataaacgtgacttgacggtacgagacgttgcgatacataattgaaaatgcaattgcttcactttgacgctcattaacttaaaaattacagaaaatcaacaataataagctcgcaacttgttcaacttaatacgaaacacgggcgaaagttcgcttttgttttgctttgttttttaaaagagttattttggccagctccaattgccatagatataaattacgattcttgcatttcggttttgtgacttttcatctaagacggcggtgcatggagcaatagcaatagttatgctcttgagttcgattgcttaattaactagttaagagtctgggggctaatcagcacactcagcgggcttagaaggccaggccggcatcgcggtatgtggtgaagatcttctcaatggagttgacgtaggcagcggttctgaggtccaggcccaggttgtacttcatggctgtcttcatgatggcgcgggcggagcgctccatggtgtagtccaggccggagtgcacgatatccttctcggaggcgccggagatgcgcttctggaacgactcggagggggtcacggggatgcgaccgcccacacggccgaagcgacgctccagggact

SEQ ID NO: 12395 - DNA, 1218 bp, DROSOPHILA
atacagccaaacaaaacaacaaaaagcatttcgagcgctaacaaatatatatctttcgacttgactcattcgcattccggttgaccgtgtcgcgcctgcagcatgtctgaaaagccgactgttctgattttgggtggctgcggcttcattggacgcaacttggccacttatctgctggacaatgaactggcgcaggaaatacgactggccgataagacccctccgcagatggcatggctaaacgaggagcagacgcgggtcttcgagagcgatcgggtggagttctgcagcgcgaacctaataaacgccgcctcatgcaaggcggcttttgcgccacaccccaccactggacgggcctgggacattgtcatcaattgtgcggccgagacgcgtgccaaccaggatgatgccgtatacaaggagggtatcctgaagctcagtttgaactgcgccaatgaggcggctaaccagcgggtcaaacgatacgtggaactcagctctggttgtgtgaacagcagcgaaaagacgccgttaaaagaggactgcaagacggatccctggacgggcgtggccaagcagaagctcaaggtggagaaggaactggccaacatcgacgatctcagttacacggtcgtccgtttgcccgtggtctatggcattggcgataagcgctatttgatgccgcgcattataatcgctgccatatacaaatacctgaacgagacaatgaagctgctgtggaacgatgccatgcgtttgaatactgtgcacgtatcggacgtgtgcgctgccgtttggcaattggctcagagtcccaagaccgccggtcagatctacaacatctgcgatgattcagcatcgacgcagggcaccattagtaatcttttagtggatattttcgacatcaatttggatttcttcggccttgtaatgtcgaatttggcaaaactttatcccacggacaccgtcagtgaaatcaacgacaagcacatggcaccctgggccgagatttgccagcgcaatggcatcgacaacaccccgctgacaccgtacctagatgaggagcagctccagcacaagcacctctacttggataacacgaaactgaaagactttggctacgtgctgcagcatccgaaagtcactcgcgagctgctcatggagatgattaacgactatgtgaagcagcaattgtttccgaaatcgttggttctttga

SEQ ID NO: 12396 - protein, 371 aa, DROSOPHILA
MSEKPTVLILGGCGFIGRNLATYLLDNELAQEIRLADKTPPQMAWLNEEQTRVFESDRVEFCSANLINAASCKAAFAPHPTTGRAWDIVINCAAETRANQDDAVYKEGILKLSLNCANEAANQRVKRYVELSSGCVNSSEKTPLKEDCKTDPWTGVAKQKLKVEKELANIDDLSYTVVRLPVVYGIGDKRYLMPRIIIAAIYKYLNETMKLLWNDAMRLNTVHVSDVCAAVWQLAQSPKTAGQIYNICDDSASTQGTISNLLVDIFDINLDFFGLVMSNLAKLYPTDTVSEINDKHMAPWAEICQRNGIDNTPLTPYLDEEQLQHKHLYLDNTKLKDFGYVLQHPKVTRELLMEMINDYVKQQLFPKSLVL

SEQ ID NO: 12397 - DNA, 3034 bp, DROSOPHILA
taagcatgatggcacaaagcggaaatgaagatgtaaaataggcgtttcttgaaacagagaatctaaattttattgaaattttttgtttgcttattctaatatatatttatatattaatacaattatgatattttatgtattttataacaagcaactaaaagcaaagaaaaaaaacaaaagctgttaagatgttgatatatacacaagaaacgaaaacaaaacaacaaattacattagaatgtcttttaattttaaacgatgtaattgattattaaataatagtacagtacaagtcattgatggccttgtggtggcgtttttatctttaatgggggattactgaagttgaaattgaaattgctcttaaactcttaaaatgagtttaaaaaaatcatttaaaaaaatatgtttgattggttttaagttttgtttctgcaattttctgatatctacctctgtgacgaagtacatttggcttaatttaatatttaatattttctcattcggcacgcatcaataaaaaatgtcttcaagagtaaataacaattcaacatatgtatacatatagcgggatatacaatataagcggaagaaatttagctatttaaagcggctttcccgctaaacaagcttaacgacaaaattgtcgcaaaattttgtattggcaaagtattacaatggatgaaataccaataaatgcgcacttcaacgcattaaagaagacaccatatgctttttatgtttataagctttatttttttttagtttttgtgttttttgtattcttattctgtcgtatatcaaaaggatttttcttcaaacagacactttcgtggtgcgattcgtaactacgtggtttgtcgctagcactgataccaacaattactggacatctaattaggctacgaaatagctagattgccagcactgctgccaactcatagtcgctatcttgacccacagtcatatgtttattttgttgacgtttaccttttggcaaaaagcattgcgtgcaccaggctaggaagcctcccaacgtattcgcaatggatctgatcattctcgtggggattgccgtagctcttttagttgtgatcgtcacactgtacctgctgcaaaagaaaaacgccgccccaggtgagtcggatgcagatagctcgtccaactggcgactaaaacattgaccccaaaacagaaaccaaggtagctgcagctcctcaacgtggcgttccacagcgcgcccaggagggtgttccgcgtcgggctcaaatagctcgaaatcagcgcaatcgactgcgccagaatgttccagcggctccagtcgccgcggcagctggtgctcttccggctgccggcgactctgaccacgaggacgagggtcaggtcgatggtgatgaggcacgtgtgccccagggagcggtgctggatgagaaaatgggtgctaagaagcgtgccaagatggaggccaaggagcagaagcggcttcagcgggagcaggaactgcacgatcgcgaacagcgcaaggtgaaggaggcgaaggaggaggcggagcgcaagcagcaagaagaccttgaggcagaggccgagcgcaagcgggtggatgccgagcgcctggccaaagaggaacgggagcgcaaggagcacgaggagtacctgaagatgaaggctgccttcagtgtggaggaagagggcttcgaagagggcgacgccgacgaccaggacaacctcctggccgacttcattcagtacattagggacaacaaggtggtggtcctagaggatctggccgtggccttcaaattaaagacgcagcaggtcattgatcgcatccagaacctgcaggccgatggcaccctcaccggcgtcatagacgaccgcggcaagttcatctatgtttccgagaaggagctattggccgtggccaagttcataaaacaacgcggacgcgtctccatcgccgagctggccgagagcagcaacaacctgattaacctgacgcccatttctgccggcggcggcgaagccagctcctgatgagatttgttagccatttgtatattaaatttatatttagatgcgatgtgttggtagagtaacaagaacaaaacaattcaagattgcgtatcaactgtgttcgattccgtcttgcaatcctcacattcgcagatcaccaggaagctatcgtccctcaagtggacactacgattccgtcgtgctctggatagaagctttgtcaattggagattggaggcatagaagctgtccttaacattttcaggactctgcatggctggcttggtaaggaactttccaacaactgtgtgggtaggatgtgtgtgttttgttatcgactgactttcaagcagcccatccacttacattcttccacgttggctttgaccttatcgtttacaagctgctgaagctgctcctccgttgtttccgcatctttaaactggttgatcccttgctatgggtggttagaccttgtccgttggcttccacgacggtgatgagtgtcctaaacgcctctggtgtcgtgaactaattggttgggaaagcttgtaattcgatttgatagttgggagcaattgactgcgtatttaccctggacagcccgcttccaggtgtgaggaatttggtccagtgtgttttttgtgtttagtttactttgtatattgcgtcagaattctttttgctttgtactatataaagtatagttttctgattggtctgtattgttattttcgaaattgactttcaaacgggaaaccaaataagtatagcttcagtgaaaatggtactttctgcaagaacgataatagcgtttcagttcggcgatataaaaaaaatgataatagtaggggagccgggtgaacctcgcccccttactataaacgacataaagaacgtggttcgcgccaaatttgggatagtgaacttcgttttgcttaataaagaactggattatgtcataccggacgaagatctgctccagtaccttggcctgatgacacgtttctgcaattttgtc

SEQ ID NO: 12398 - DNA, 976 bp, DROSOPHILA
aaagcattgcgtgcaccaggctaggaagcctcccaacgtattcgcaatggatctgatcattctcgtggggattgccgtagctcttttagttgtgatcgtcacactgtacctgctgcaaaagaaaaacgccgccccagaaaccaaggtagctgcagctcctcaacgtggcgttccacagcgcgcccaggagggtgttccgcgtcgggctcaaatagctcgaaatcagcgcaatcgactgcgccagaatgttccagcggctccagtcgccgcggcagctggtgctcttccggctgccggcgactctgaccacgaggacgagggtcaggtcgatggtgatgaggcacgtgtgccccagggagcggtgctggatgagaaaatgggtgctaagaagcgtgccaagatggaggccaaggagcagaagcggcttcagcgggagcaggaactgcacgatcgcgaacagcgcaaggtgaaggaggcgaaggaggaggcggagcgcaagcagcaagaagaccttgaggcagaggccgagcgcaagcgggtggatgccgagcgcctggccaaagaggaacgggagcgcaaggagcacgaggagtacctgaagatgaaggctgccttcagtgtggaggaagagggcttcgaagagggcgacgccgacgaccaggacaacctcctggccgacttcattcagtacattagggacaacaaggtggtggtcctagaggatctggccgtggccttcaaattaaagacgcagcaggtcattgatcgcatccagaacctgcaggccgatggcaccctcaccggcgtcatagacgaccgcggcaagttcatctatgtttccgagaaggagctattggccgtggccaagttcataaaacaacgcggacgcgtctccatcgccgagctggccgagagcagcaacaacctgattaacctgacgcccatttctgccggcggcggcgaagccagctcctga

SEQ ID NO: 12399 - protein, 309 aa, DROSOPHILA
MDLIILVGIAVALLVVIVTLYLLQKKNAAPETKVAAAPQRGVPQRAQEGVPRRAQIARNQRNRLRQNVPAAPVAAAAGALPAAGDSDHEDEGQVDGDEARVPQGAVLDEKMGAKKRAKMEAKEQKRLQREQELHDREQRKVKEAKEEAERKQQEDLEAEAERKRVDAERLAKEERERKEHEEYLKMKAAFSVEEEGFEEGDADDQDNLLADFIQYIRDNKVVVLEDLAVAFKLKTQQVIDRIQNLQADGTLTGVIDDRGKFIYVSEKELLAVAKFIKQRGRVSIAELAESSNNLINLTPISAGGGEASS

SEQ ID NO: 12400 - DNA, 3938 bp, DROSOPHILA
atgcggactccaaacagctgccgttggcaactggacccggtcccatcataattatcctcattggataccttctggtagtttttaaggccggcaggaagttcatggagcatcgagaaccttataatctgcgaaaagtgcttaagtactataacatgttccagatattctacaatataatgatgctcctgcccgtgagttgaaattttgagcctacattcttttcttcaattgataaaagcttcttccgtagggatactacttcatgttggtattccaaccgtacaactttcgctgcatgactgtcctgcagcaggatcatccgctgaagaactgggagcgctgcatcagctatgcttactacataaacaagatcgttgacctgcttgacaccgtgttctgcgtgctgcgcaagaagtactcgcaaataacgtttttgcacgttttccaccacgtcctgatgccatccgccggatacttgataatacgattctatggctacggaggtcaactcttcttcctgtgctccttcaatgtattcgttcatatcttcatgtatgcctattactattcggccatcaagggcaatacggtgcgttggaagcggtacttgaccctcatgcaaatgctgcagttcctcctcatgtttggccattgcgccttaaccgccatgcagcggcagtgcactgcatcgcagggaaccctctttctggtcagctgctccgcgaccatcatgtttatcatgttcgccaacttttatttccagtgctacctgagaccgaagcataaggagaactaaaacttaaattaggtcgaaaattgaagatatactaatttagtcatacgtttttatgagccattttaatggtgaactttctagatttacaaaattgtgctttgtaattaaaaagataaatttcaaaaaaccgttttccattagggtttctcactacgaacatcaaatgagttatcgattacgggcagctccactttccgcatgcggtcacacttaaaagtgcaacaacgcgcgcgttgtcggcaaccgtcgaatatttgcaattagtcgcgaaatcaattagaaaactatagaattaaatcaaattattggtgatacctcgatggtctagcagttcggagcgcaaacatgtctgctagctcctccagcaacgcttgcaagctcttgctgctcggccgctgcctgcgcgccgtgctcctcagcgtggccatccaattcctgctgctcacagtgttcctgctgtttgtgaacttccaactgttgcatccgctcgcctgggtgacgggaacactgcgtctggtagccagttggtacacctggtttgccagcatccctctggtggcctccgtcgtgctctacggtgtgattctttgccagcagcacttgtcggagcgacgctactgcccaacccgctaccggtggctcctgcactacggtccacgcaaggtgctctttctgttcgcccaccttctggtcggtctgctgaccgcctggctctacacgggctatctgcacacagactatcagtaagtatacctacagttggtttgaattcggtcaatacctatgattccttttatttccagacacctgaaatataagtgctatggccaggattgcattagtgcttacaatgtctatctattaggcatcggtatgaccgccggctgctactactttgtctccgttcacatgcgcaaggagatctccattgaatttcccattgtggagcaatcgcgggcggagaagatgcgagagctgctctacgccagtttggccaaatctctattaagttcgctgctgcctacgatcagttacaccgccgtattttgtcttttcggacccatggtatgccacagacttagtcacattctctctgtggacatggacgagcgactggatggattcttcggagttgttaccaatgtgcgcctgcttttttacggctatttgctgaccgcacagattttgagcaacatgcacctaatgcgttgcttttacggcattctgctctcggaggatttgccactggtggtgactaaaccgcgagctgcttttgcccatgaacaggatataaccttggtagcgggtctcggagttttcaatgtgtatgtagtgcagtgccttgctgctcatcatttctacaagctggcgttgcgaaagaactcgccacaacgggcagagatattccagctgactgagccgggtaaccggccagcaagttggcgctccctctgcgaccaatgcttgagcattctcggcagctttaccgaagaactaaccgagtcgatgcagaagataagtatactcaagtgcgcccagagtctgccgatgccgaagataaccgaatcgcttacaactagcttgatggccgagaaggtgttgctgcggcaatacaaccagaaacacggcattcgacccattgtatcgcccagtcgcgaggttgctgttgaaagtccagcggatggcatccgtcattttcccaactggtgtgagcgtgtatccacgcagttggagcagtccctacaacggttgctacagcgcgttcccggcattgtgtacttattcaacgaacccgaaggtgccaagacgacgtttctgctggccaactccctgcccgtagtgtatatgactcaggctctggctcaggtgtgcgcagcctcgctcaaagaggatccatatggagtagtgcagaacgatttgcctgctatcatcaaggcgatcaacaagctgcgaaatgagctagataagctaagtagcgtgataggcaacataaggatatccagctctagctttaacgtgcttcgatgcgcagtgcgacgcagtctgtacgccatctgtttgtcgttttgcgactatctggacgatctgctaccccctggagaggaactgcgccagctgcaggacctcgtctgccaggagtaaacccatccatcactttatacactcatcttgtacactgttttgcatctctttagttgtttgtctgcggtaacaataaaaattaataaatataactacaaacgtccaatagttatagaatactattgacttttatacttaaagtacgaaatggtaacacgcgatttgatcataactagcactgatgaaatggtctgcaggttgaatgtgtacaagcgggcggccttactgttcctccatcgccactgccatcatgagcagggccagatcctgctctagctgccgctttggtcaaaggtcggctgcttttgtaggcagtgagctggcaacggcaacggtggctgcctctcccagagactgctccagctgcacggccacctcatccaggtgctggagagcctccttggccttgcggttgcgtccgtccacgaagatctgcgtgtccaggaagtgcagggcgcggaaggccataccgccttgcgggtcatataagctgtcgaactttttcggattcctggcgctggcactctggtccggcgtgtcgggatcgaagggcacgtattcctgaatcggctccttgtgccaccggaaaatgtttcgcgaatctgtaaggagttggtatatgattacgtgatacttgatttcggttgaaaggaaatggaacctagatcagccagcactcgcgtcatttctcgtatctgggcatcctgtcgctccagccgaaagttcatctccgtcagcatattggttagttccatcttctccgattgcgccaactcgtttttcttgttctccttgatggtttgactggaaagtggttggatcaatatagctctggaatggctttggatctctgtttaccaaccgtgagtactcgaaaatcaaaagaccggctccgatcgagaagatgatgaactcgccaagcagattggctcccagctcaatggccatcgcctcgttcagcggtggaacattaacgcgaccacccatgttcagggcccac

SEQ ID NO: 12401 - DNA, 1878 bp, DROSOPHILA
tcacacttaaaagtgcaacaacgcgcgcgttgtcggcaaccgtcgaatatttgcaattagtcgcgaaatcaattagaaaactatagaattaaatcaaattattggtgatacctcgatggtctagcagttcggagcgcaaacatgtctgctagctcctccagcaacgcttgcaagctcttgctgctcggccgctgcctgcgcgccgtgctcctcagcgtggccatccaattcctgctgctcacagtgttcctgctgtttgtgaacttccaactgttgcatccgctcgcctgggtgacgggaacactgcgtctggtagccagttggtacacctggtttgccagcatccctctggtggcctccgtcgtgctctacggtgtgattctttgccagcagcacttgtcggagcgacgctactgcccaacccgctaccggtggctcctgcactacggtccacgcaaggtgctctttctgttcgcccaccttctggtcggtctgctgaccgcctggctctacacgggctatctgcacacagactatcaacacctgaaatataagtgctatggccaggattgcattagtgcttacaatgtctatctattaggcatcggtatgaccgccggctgctactactttgtctccgttcacatgcgcaaggagatctccattgaatttcccattgtggagcaatcgcgggcggagaagatgcgagagctgctctacgccagtttggccaaatctctattaagttcgctgctgcctacgatcagttacaccgccgtattttgtcttttcggacccatggtatgccacagacttagtcacattctctctgtggacatggacgagcgactggatggattcttcggagttgttaccaatgtgcgcctgcttttttacggctatttgctgaccgcacagattttgagcaacatgcacctaatgcgttgcttttacggcattctgctctcggaggatttgccactggtggtgactaaaccgcgagctgcttttgcccatgaacaggatataaccttggtagcgggtctcggagttttcaatgtgtatgtagtgcagtgccttgctgctcatcatttctacaagctggcgttgcgaaagaactcgccacaacgggcagagatattccagctgactgagccgggtaaccggccagcaagttggcgctccctctgcgaccaatgcttgagcattctcggcagctttaccgaagaactaaccgagtcgatgcagaagataagtatactcaagtgcgcccagagtctgccgatgccgaagataaccgaatcgcttacaactagcttgatggccgagaaggtgttgctgcggcaatacaaccagaaacacggcattcgacccattgtatcgcccagtcgcgaggttgctgttgaaagtccagcggatggcatccgtcattttcccaactggtgtgagcgtgtatccacgcagttggagcagtccctacaacggttgctacagcgcgttcccggcattgtgtacttattcaacgaacccgaaggtgccaagacgacgtttctgctggccaactccctgcccgtagtgtatatgactcaggctctggctcaggtgtgcgcagcctcgctcaaagaggatccatatggagtagtgcagaacgatttgcctgctatcatcaaggcgatcaacaagctgcgaaatgagctagataagctaagtagcgtgataggcaacataaggatatccagctctagctttaacgtgcttcgatgcgcagtgcgacgcagtctgtacgccatctgtttgtcgttttgcgactatctggacgatctgctaccccctggagaggaactgcgccagctgcaggacctcgtctgccaggagtaa

SEQ ID NO: 12402 - protein, 578 aa, DROSOPHILA
MSASSSSNACKLLLLGRCLRAVLLSVAIQFLLLTVFLLFVNFQLLHPLAWVTGTLRLVASWYTWFASIPLVASVVLYGVILCQQHLSERRYCPTRYRWLLHYGPRKVLFLFAHLLVGLLTAWLYTGYLHTDYQHLKYKCYGQDCISAYNVYLLGIGMTAGCYYFVSVHMRKEISIEFPIVEQSRAEKMRELLYASLAKSLLSSLLPTISYTAVFCLFGPMVCHRLSHILSVDMDERLDGFFGVVTNVRLLFYGYLLTAQILSNMHLMRCFYGILLSEDLPLVVTKPRAAFAHEQDITLVAGLGVFNVYVVQCLAAHHFYKLALRKNSPQRAEIFQLTEPGNRPASWRSLCDQCLSILGSFTEELTESMQKISILKCAQSLPMPKITESLTTSLMAEKVLLRQYNQKHGIRPIVSPSREVAVESPADGIRHFPNWCERVSTQLEQSLQRLLQRVPGIVYLFNEPEGAKTTFLLANSLPVVYMTQALAQVCAASLKEDPYGVVQNDLPAIIKAINKLRNELDKLSSVIGNIRISSSSFNVLRCAVRRSLYAICLSFCDYLDDLLPPGEELRQLQDLVCQE

SEQ ID NO: 12403 - DNA, 7555 bp, DROSOPHILA
gtttgaacacagtttgattggaaattcgattacgagctcagcgaggtataacattccgtattcagacgaatattttttaagttatggcaaaaaaactgattatttgatgaccgatattcggaaaaatgtcttttgccaaaaacttgatatttacaatcggaattttggtcataacttcgctaaaaattgtcatatagatgaaagaacaactgttttgagcagctatttaccacggctaacgaacccaatcactttttgaaggatttaggaaaattaattttttggtcaattttcgcattttttgtaaggggtaacatcatcaaaatttgcaaaaattggagaaaaaattaaattcccatgtttgaacacagtttgattggaaatttaattacgagctcagcgaggtataacattccaaattcagacgaatattttttaagttatgccaaaaaaacggattgtttgatcaccgaattttgaaaaaaacggcttttagaaatgtaaatgttttcagcaatcaaaaagttatagtaccattattggaacttcggaatggaaaaccatttaatagctaaataaatccaaccaattaatctttatatattctccatattcagtcaaatttactattatcccactttcaaaaccattatagtagttcattcattggaaaccccttattattgtgttttctaaacatgcatttattgccttctatttacacatacatagtattacatagatgagatagagacccccagtcatcggtttatggcgattttgatgacctggagccgaagtagtcttagtagagatatcagagaataggatcagaagataggaagaaagatcagagcaagctggatatgatacgaggtgtttgggtagtaatagtaatagttcagatacagatacagatgcggatgcggatgcggatgggtcgtcgtcgatgcgatgaagtcagtgtttgctatctctctcgatcaatcctacccagaacctaatggtaaaggccgaggggcagtttagcgggcgcgaggagcttgggtgccgcataggccagtggcagtggtgcgggagccaggagcttggcaatgggcgcagccttgatcaccttctggcccaggggatcgcgacgcaccaccgcattgaagccgttgtgggcatccgaagtgtagtccacggtgcgcagatagccatcggcatcgaccagcgtgtactgaccctggacctgatcgcccttccgcgactccgtctggctcttgatgtcgccggtgtgctcgtcgtgcaccgagtaggcgaaatcgtagtgggcaggtgcctccacctctacggtcttcagcagtggcttcacaatggccgcgggtgagtggtagatgggcagctcgatggcggcggcggcaccaacacccaggatgaaaagcgatacgagctggaaatatttatagtttgtggttcagtatggctccatatggcatccatatccttctcacttacagcgaacattttggtttggacttggatttggtggatttgttgacttgatggctgctgctgcggctcctgcactgaactatgtctccaagtgtcgcgatcgcaacttttatagtcaaagcattgctctctggaaacaccacccacctccatccccatcccgatctcttgatgggtgccacgctccaagcacacgcaccacaacgagcaccacacactccccaaaaccaaaagccaaaaaccaaaaaccgatctgcgaacacctcacccagcgaaccggaatccagctaatgcaaaattgttattatatttctatatcatttattttttttttggcaatgtttctcgctgcggcaataaaacatttactctgctccactttgggcaacaatgtagccgcgttaagctcttgtctctggattgtcaatgggttcctatggatattcaactattcaatatcaagtgaaagtcaaggaaggtatttaaattgagtgagagaagcgtttattattattaatggattgtcattagttagcaatatggttttagttattaacagacaaaattgggtttcaaaattaagagcttttaattggtataaataatacgaaaactagaagacacttctttttaaattttattaatttgtaaactagggtaaaacacaagtactaaaacattttcacatttacatttttagtacctctttaacttattatatatattggttttaccccttttaaccctctcgccacctaatctccggtttcttctatcaatggcacctcaaattagacaccttaaaccgccagacaagttggctgacttattgaatggccacaggagaagtggtgtacagtggacatatgggtttatcgccgtcacatcaaacaaattgcacgttgacattcgcagatctcggggcgatcgacagaaatgcagctaagagctttgccgattttccacttaattaattaatcaaattgcaacatccgcccaagatcgccgctatgtctaaatctcgatctggatgtgggtctgggctggtcaggtggcggtgccgttgccttcgcctttcacgctacaaaggctcgctagcgaacacgttgccaaattcgatatgaagtaataagctggtcaagtcgaggtgggggtcaggtggagtttcgttggagcggagtaccttggtgcgtatgcataacaggcatatcttgcgccacattcgcttagaaccacattacgactctgagtgaagtcgcctaccaattcggcatccccgcctcctgcgcacgcacgcacttggacagatcggacaccgccgcctctccacctgatcgcagcctccagttccatgctacgcgcgggcgtgccggctgtcgcccgctgtccagcgtcgcccaacccaatcagcaacaagagacatataaattgaagtagtctctataaataataagttgtgtctacttagcgacatgtacactggcttagatcgtgtccgataccaaaggggatcgggggattcggtggaggatggaggagctgaaaagcgcacgtatgttttggcaaaactgtcaaatttactaagcgaatggtgcttaattcgctcgctaatgcacttgtagctcttgcattgcaaatctgaaacacttaagcttatacagattatatataataatattcaacttttggcatttctaaagttttttattatcgatttcagctgatttctatgttttcttgaaatatcaaaaaattgcaaatagattacatatgtatttcactgacatctttttggttttctttttttttttttcttcttttttgttaatcgttcagctgtgacaacaatacgacgcactacacataatcatttgtctcacatatgaattctttatgtagaaaaggttaagtaaatcgctagcgtattgtactatatagagccgtatgtgttcagtaattggcaattttgaaaacgttgaatctattggctgtgctttgcctgctctcagcaccacagctcgtccttaaaataataaaaataatatagaacacaattacaacaatgaaaacgagtgcatggtctgtgtcgcaggcaaatagccactgaggtaaaaaaaaaagcaaaagctgttaacaagaaaaggtgcgacggtcaccagactgatgcctacgctcctcataatgcgcccggtttcagggagaacgatagcttgggcctggaattgtttttgcctaatatgaccttctgctcttccttgacgcgcttctcctgctccttgcgcatgcgttgccgctcctcgtccataaggcgctgctcctcgattattgctaaccgttcttcggcctaaagaaaaaagaaatcaattatgatcataataatatggtttgtttgctatgaattcttaccagttttctttgcgcctcttcgattttgcgattgttttcggccaaaatttcttcgagctcttcgcgtttttgtttttcatcctcctataaaacccaaacaagaagacgattaataacaaaaatcgatcctttagcgagaagcttaatgctaattatagaaataaacagtctcttgacatcagcgatgcaaactgtgcgacgaattcgacgcacgtttgtggttgcagttttttgcttgatgagctgcaaaggcagttaaaatctagttttatgtttaacaataagttacaaagaatattttcggtagaaagtaaaacatttagtagtgtctaataagaatgtttaaagtaggttgttcttttagtttattacaataaaggagcacacaacataaacaaatgtactagtatttgctaaatggttggtcttcatttggtttttttttttttttattgttgctacttactatttaaataggtcattattccagtaaataggctaaatttgtgttaatttatggttttctttttttttttttttgcagattttcgatttgggattatttttgtggagtttttcgctattccagacgtacatatgtaatttgctcgcaaaaacaaaaagcttaaacacaaataagtggcaatccaatgcgtatccggtttcaaaaattcttacagacagagttctatagagctaaaccctggggggagtctttgagtctttgggtctgtgcgccgtcctttctcgcctgttatccttacggctgctgggcaacatcacacatcgctggcgtaggaaactcacccgttatcaaaagtggcagtgatttgatttgcatgcagcgtactgttgggactaaactcagtcggcccgcccacaactagagtgcctaactacccggactaacttagggacaccataccacttcgctgggctttggtatttctttgattcttttgatatttattgtttggtgtggaggaaatgcgtccgtggaccaatcgctcggcagcaggcttgctcaacttccggcatggcggcacaacgtggagtgcacgcgagtgttttgcgggtaaggatcacaaaacagccacacacacccacttgcatacgggacaagagcagcacgttcgttgcacgggcctactgaagcggaatttgcgcgcaataacaacaacaacgagttacgagaaccaataccaaaaaaattaaaatgatacagtatgtgggtaggaacgaacaaaagatgaagctaagagtatgcaataagtctgcaataatgggcatcaaaactttgacacatgcgacacttggcaatgtcgtcattttggcttttttggtaggaaaaataaaaagttacaaaattattggcaagaagaaaaaaaggggcaaaacgagccgtggcgttctcatctcggctcacagcatttagcttgctgcatcatgtggggagggctctgaaaagttgcgactggttagtgatgtacccggttagtgggcgcccttggcccagggttatgcaagcaatctagtacggggaggctgctgatgggacatgggttgatggatgaacagccagtgagccgcgactgagagcgccgccggatcgatttcgcgtgacgtggtggagacgactgtttgaactgctgttttggatttattcaagtgtacggtaaatgtggcattgtgtacgtgtttctgacagtgatagcagcagtcgtccagcggaatctgaatacgagcacctacctcgcgccggcgttcttcttcgcgtatctgctctcgccgccgctccagctccagcatcatttcgcgctccatctcagccttggcggtctcaacgcgtcgattgacctcctgttcgatttcgtcgcgacgcttttctagctcctcctcgacgcgcttttttaccagcatctctatgcgcttggcggcttcctcttcgattgtcttttgctcgagctccttcgcccgacgctgccgctccatctcggccaggcgttcgacctgcatctggttttgctgtaatggtagatcatagtttagttgctttcatcgaaacagttgtatcataagcgcagcatgagtgtccatcccggaaaaatgcgtgtatggaatgcgtacccatggagtgctcaagatgacagactatggacactatccacttacctcatccagcttcttaaagcggctgcgcttctgtttgctacgttgcgactcctgctcggagtactgactgtcgctgctcgacgagctggagcgttttcgggatttcaggatcgagggggagtgacggtagtcgcgctcagtgtgtcggtcgctgcggtgtctatcccgctcgcggtccctgtcccgttcgcgatgtcgtccatggttgttcacctccgaggacttgtctctatccgttcttgtgctgggccgctcgtggtcgtggtgggacttactgcgttttttgtgcttgctcttatggtggcgtcgcttgcccgacggactgggtgtacgtgaacgggagcccatggtgctggattgtgtgattgtataagatttcgagctagtcgaagggcttaacttggctgccacaacaaatcaatgagagcgaatttaatttctcgagcaattttcacagatgccttaaaacagtgtgcacaacgttggcatactggcctgacataattctggtattttttttgatacggtattttctgtgctttttttattttaatttctgtgttgcccaacattagaccggcaattgttttcagttcacattggtttgttttgatctaaaatcatttggtggaacttgtcgatcatgacttggttatccttaaagccgacgcactgcttggcctcctccttgggcagccacttgaggtcggtgtgctcctcggagagaatgggctcctggcagggattccgcagctccgctagccagtaaataacaatcttcggcttgtcttgcacctgataattcagggtcagcggagtgtccttgtatatgatcagatccttctcgtcgtacctatgagagcatttttgaaattaagcatgttttaaaagatatatcgttgtgcactttcccggcttcctctttcgtttctcgcagggcagtggtaaaatcatcctcgcctgggtccacatgtcccttgggagaactccagtggaaggagccgtaggaagccttcagcaataggtattgtatttccccacaaaggcggcgaaaaataacaaaaccagctgccttttccatgttgttgctatcaattaaccgaaacaggtgtttgaacagtgctcgaaagtctccaataacagtggtgcttttctagctgtttccctcttttgcttattagtagttcacttcgtgtgagaggaaattagtcagtgttgaaaagcgaatgcagatttaacgtatgcttgcggacttgcacgttgttttgtaaattcattacataaattgagaagaagtgcatccgatatgtacgccctgcttcgccgctttgccggcgtcaccaacttgggatgtcccatcagaacctacgcctcccttacgcccagagatgtattgcggagcagcgatgagaccggcacactgctgacccgcttcgccaagcacattgcactggagcgctacagggattcggatcacgtgttg

SEQ ID NO: 12404 - DNA, 1431 bp, DROSOPHILA
acgttgtgcacactgttttaaggcatctgtgaaaattgctcgagaaattaaattcgctctcattgatttgttgtggcagccaagttaagcccttcgactagctcgaaatcttatacaatcacacaatccagcaccatgggctcccgttcacgtacacccagtccgtcgggcaagcgacgccaccataagagcaagcacaaaaaacgcagtaagtcccaccacgaccacgagcggcccagcacaagaacggatagagacaagtcctcggaggtgaacaaccatggacgacatcgcgaacgggacagggaccgcgagcgggatagacaccgcagcgaccgacacactgagcgcgactaccgtcactccccctcgatcctgaaatcccgaaaacgctccagctcgtcgagcagcgacagtcagtactccgagcaggagtcgcaacgtagcaaacagaagcgcagccgctttaagaagctggatgagcaaaaccagatgcaggtcgaacgcctggccgagatggagcggcagcgtcgggcgaaggagctcgagcaaaagacaatcgaagaggaagccgccaagcgcatagagatgctggtaaaaaagcgcgtcgaggaggagctagaaaagcgtcgcgacgaaatcgaacaggaggtcaatcgacgcgttgagaccgccaaggctgagatggagcgcgaaatgatgctggagctggagcggcggcgagagcagatacgcgaagaagaacgccggcgcgaggtaggtgctcgtattcagattccgctggacgactgctgctatcactgtcagaaacacgaggatgaaaaacaaaaacgcgaagagctcgaagaaattttggccgaaaacaatcgcaaaatcgaagaggcgcaaagaaaactggccgaagaacggttagcaataatcgaggagcagcgccttatggacgaggagcggcaacgcatgcgcaaggagcaggagaagcgcgtcaaggaagagcagaagctcgtatcgcttttcatcctgggtgttggtgccgccgccgccatcgagctgcccatctaccactcacccgcggccattgtgaagccactgctgaagaccgtagaggtggaggcacctgcccactacgatttcgcctactcggtgcacgacgagcacaccggcgacatcaagagccagacggagtcgcggaagggcgatcaggtccagggtcagtacacgctggtcgatgccgatggctatctgcgcaccgtggactacacttcggatgcccacaacggcttcaatgcggtggtgcgtcgcgatcccctgggccagaaggtgatcaaggctgcgcccattgccaagctcctggctcccgcaccactgccactggcctatgcggcacccaagctcctcgcgcccgctaaactgcccctcggcctttaccattag

SEQ ID NO: 12405 - protein, 431 aa, DROSOPHILA
MGSRSRTPSPSGKRRHHKSKHKKRSKSHHDHERPSTRTDRDKSSEVNNHGRHRERDRDRERDRHRSDRHTERDYRHSPSILKSRKRSSSSSSDSQYSEQESQRSKQKRSRFKKLDEQNQMQVERLAEMERQRRAKELEQKTIEEEAAKRIEMLVKKRVEEELEKRRDEIEQEVNRRVETAKAEMEREMMLELERRREQIREEERRREVGARIQIPLDDCCYHCQKHEDEKQKREELEEILAENNRKIEEAQRKLAEERLAIIEEQRLMDEERQRMRKEQEKRVKEEQKLVSLFILGVGAAAAIELPIYHSPAAIVKPLLKTVEVEAPAHYDFAYSVHDEHTGDIKSQTESRKGDQVQGQYTLVDADGYLRTVDYTSDAHNGFNAVVRRDPLGQKVIKAAPIAKLLAPAPLPLAYAAPKLLAPAKLPLGLYH

SEQ ID NO: 12406 - DNA, 3137 bp, DROSOPHILA
ggataaagcggcacatatctatcagcccgaaccgcttgaagtggaagactgtgtgcaacctcaacttcagccacgtgatgatgtaaatcagaattatcataatgaaatgaatgagcacggcatataccgtgaggataatcatgatggtgagttcagccaatgtttacaacatgctatcgtaaataaaatataatctcattgcagatacctacagcgtaatgatgagtctcttaagcatttggcgtaataatccgaaaatcacgggaatcgatgccattgattttataaaaacgtttgatagtcgcatcaaggcttcgttagcctttctccatttgttgtgtgagttcgaaaaagaacaaaatgtgtgttggaaataacgtatagcttaaatttcagatcttgttcgagaccattttatagagatatcaaagcgagctaattcgctggaaatgtaccaaattactcttggcaaagagtccgctaagctaatagacaatcttatgctgagtgagactctgtgaatatttttagataatttttttcaagattaccaaacaactttgtagttgacaatcttccacatttttgttgttgttttgttttctgttattgctattgtgttataacatataagttgagccaatctctaacctagatggctttaatctactctttttccatacaatcttatggtacaattgagcaacgatgtcctggataattcgtttcatttcaagaattgaaaaattctatagatgttacttgttgctgtctataaaaatagtttttttttcattatcatattagtttcgtgtacccattaaaagttgtttgttatctttgttactattacgttatcgtagctataattcattaacatttggagtaattctctaaaccgtaattgttgtctttgttacaaaatctcaatttctctgacaacaccaaaaaataaacaagttacaaaaacaaaggaatacagagtgtttggcacaattgcttaaattccgatctgctgggccagacccgaatagatgtgcagcgtgcagaatccaatgacggccgccaccagcgctttaacagccaccgttagccaaggtccaatggtcagaatgtggagcatgccctccagccagacgcctttgaagacagtcaccgccagaagtagactaaccagcggctttaatgccttgttcaaatcgtgacgggtgaagagccagatcagggtggccgtagtgatgtgctgcaccagaagcacgttcgattccagacacttgaggatgtagatccaactgaactcggtgcctcgggcacccacccacagcatgatacctcgggaaagaatcacttcggcggtggcccctgcggaagtatacgaaaatatttagtttttactaaatttttggaagttgtcatacatatatgggttggggtattaaaggttgagtaggcattggctcttgtaacattaatatatctgaacagagtacttttcaatctttaaaagccaccctcatcattaattaagtttaaataagttggttcgttcaacctacatccaagtccagccgttatgagctttgagtggcccttgccgggtatgcgactcaagattagggcgaatccaagcagatcggcgatgtccatgctgcagcgaagaatctcctgcagaccaaagaaaccacaacatgacctcaataattgggtgaaggtaaacaaagataagcacacgtaccgcaaagaagttgaactcgccgctggaggatggagcgtccgagtagaagaatgtggccagcaccagcatcttgacgagctgtgtgaatatataaatgcctcccgcctgcacgcacttccagaaggctccatattctgatctgtgattaaataataagccgggaaagttcacaaatagttttttattgacctggtagagctgcggacttggcagtcggcaaatcaccagtaaccagaagtaaactcacaggccggagtatttataggtgaagtagtacggcgtcagcagggccacacaatttccaaagtgatacagtgtcattttctttgataaattatggctattttattttggcttaattaagagaagaattaaaagttgaaaagaaaaaaactagcgttgcttgccgtgggttatcgatatgtgcttaacagggctgacggcatgtcaggcagactataaaaaacaagctagttttgcagacaatattttacaataaatattttaataataactattataaataaatattttgaaatattggaaaacgtgtgtctttccgaacgaaaagaagtagcaactgttttaatctgtttcgtgcctatcgatagttgcttaaatatcaacacgtcatcgtaatctatcatctggaggtgtgttcgtgtgtgtgagaagagtgtgtgtgtgtgcgtttgagtgagttttctgcaacctttagcaattattatgaattttttgacaaaaccattgggaaatacttgaacggagaccaaattttactttgtttaggacacacaaacctgccagctaagtgacgagccaaacatcaaacggtaaaccagtgcattaaaggagaaaaacaaaggggaaattttcgcaaagaaaagtccaacagatcatttcgttcgtgtgcatatgaaaaacagcaacgtcaactccctggtaaaagctgcaatctgaaatgagatgcaaacccgaagacgccttcatcaaacagaccagcaggattacagcagtagcagtacctataccattcaagaggatcaacagggaggagcaggcgcaggatctgtgggcacgggaacagctggcggatcggtaggactattagcacagtccctggttccaccaccaactggtcacgaggcggccatccacattggagacaactaccagtcgggcgattccatttccactcccgattactccgacgacaagtacggcaaggcggcccgccagtggaacctacgcgccttctcgggccacgcactgcgcactttaagtgccgctgccgccgtggtcaccggcaatcaaccgggcatcaataacgatagccaaagcaactatagctaccccgcttccattccgactagttcacagttttaccaatcgaaggaggagc

SEQ ID NO: 12407 - DNA, 765 bp, DROSOPHILA
caacgctagtttttttcttttcaacttttaattcttctcttaattaagccaaaataaaatagccataatttatcaaagaaaatgacactgtatcactttggaaattgtgtggccctgctgacgccgtactacttcacctataaatactccggcctatcagaatatggagccttctggaagtgcgtgcaggcgggaggcatttatatattcacacagctcgtcaagatgctggtgctggccacattcttctactcggacgctccatcctccagcggcgagttcaacttctttgcggagattcttcgctgcagcatggacatcgccgatctgcttggattcgccctaatcttgagtcgcatacccggcaagggccactcaaagctcataacggctggacttggatgggccaccgccgaagtgattctttcccgaggtatcatgctgtgggtgggtgcccgaggcaccgagttcagttggatctacatcctcaagtgtctggaatcgaacgtgcttctggtgcagcacatcactacggccaccctgatctggctcttcacccgtcacgatttgaacaaggcattaaagccgctggttagtctacttctggcggtgactgtcttcaaaggcgtctggctggagggcatgctccacattctgaccattggaccttggctaacggtggctgttaaagcgctggtggcggccgtcattggattctgcacgctgcacatctattcgggtctggcccagcagatcggaatttaa

SEQ ID NO: 12408 - protein, 227 aa, DROSOPHILA
MTLYHFGNCVALLTPYYFTYKYSGLSEYGAFWKCVQAGGIYIFTQLVKMLVLATFFYSDAPSSSGEFNFFAEILRCSMDIADLLGFALILSRIPGKGHSKLITAGLGWATAEVILSRGIMLWVGARGTEFSWIYILKCLESNVLLVQHITTATLIWLFTRHDLNKALKPLVSLLLAVTVFKGVWLEGMLHILTIGPWLTVAVKALVAAVIGFCTLHIYSGLAQQIGI

SEQ ID NO: 12409 - DNA, 4786 bp, DROSOPHILA
cgtaaaataacctacttatttgtttgttaagaactgaggttttccgaattagtataaagatttgttgtacgcgtatgactcatttccaaccttttaagctttgacaaaatcgacgtacgttgcctactagacacacgtgactaaataatcactaatcaagcactttaaaaattgccgtaaggtgcaaaaagcagaattagcattagagctgttagcacggccacgcttgacaccaattgtttgatttatactttcattactacttactagtagaaacagaaataggcagtaaaaggttctgccttttcattttgagggtatacacagatgtatattttactaggccacaaaattgcagtaagttaaataaagcctcagttaaatgcattagcattagcatggaagtacaggaagaatagtttcaagctctaaaaattgaaacagtgatcttaagcccaagtccccgagacatttaataaggtggtacgttttaattagccgcctgggaccaagatctccagcaccatctccatcaccaagtcgaggaagcatccaaagcgagtcggatcacttgggacagctgccggtagttggtaggcggttatgtgatgagtatgtcgggtcgcactggggtcgcgataagtcaaatcggatggctgggtggcttccacttcacgactttacgggggaatttaataatgtcgtttgtatttcgctactgtctactgtctactgtctattgacttttgcatttgctttgttttctacagctgcgacggcgattagtttcaagctatttttgttatccacccaccacccaccgcccaccgctccgcccacaaatccctattatttgctaatgccgagcatctgtgtttgtgcctttttttattttttttattttacgtttgtctttgcaatttcgatttgattggatttgttttgttttcttcccataaataagagcccgccacccatcgcagctctcagacgttgattcgcatttgcatcggtcaggttgggctatccaacggatgtggaataacttcacctaacgaggaagtcaattaaaaaaaacatcattcaatctaaacgtatcaaattaaatattaaacaatctatcgaaatgggtcgtatctttggcgtagttgctctaattctgatggccggcttatgtttggcagcggaaatagaattgccaccagttgagttcaagccggttcgagaaatacgtgagtgtcattatacatatgtgaaaaatcaaaccctatattaaaattaagaaataagaacaacagaaacaattcttgggaagtgcaaacttagtgcatttaaacaaaataaatgttaaagcaaaatagaatattaatacatttattctaaaatcttattttaaaaatacaatttctttggatactgcaaaaattgcggagattggctttgtcgtttttaatattaatttgatacggccatttaaaattaaaaggtaatctctaaatttctataaaaaatttataatttcaagcgttgtttcaaacaattttaaaaagtacaaattgttaatgcgacactttagtatactctgacgatagcaagtcgttcaatttgtgatattatcagttaaatagaaaattcgaacatacaaaattgacttcgtgatagcaataatcatgtgaagcacgcaactttgtgtgaattttataacaaagcaattcaaccgtctgacagtcaaagtttaagcccagattaacttaaaacaatagaattgcacaacattagatacattgcaatatattgcataccattaacgaaaatcctcttatattttattgataataaagtatttaatatattggctgaactttttagggatttttaattgttcatgaagcccgttttgtaaaactcaacatgtaaatgagatagataagattgaaatttgtattcttcacatcgcaacagaataataaacagaagtttatatagaaaagaatttgctaaaaaacatacttgaaaaattattatttataattaaatataatatttaaaaacatatacacctaagtaaatataaattatgtcaaagtaaaacgtgatgtccttgagctttaattcactattaagacactatgttacaaattcaattataattatctaaatatagttctttggcatacgcagacagaccatgacaaacacaaaatgtagattgtcatgttcatatatatataaaggtattgtcttcaaacagttttggccaaaaataaacacacagtcatttaaattacctcattgtccaggccacaattgcaaatgtttttttatacgatattcgccgaccgagtcacttgctgttgtagatataaatatagcttttttatggtagaagttaaaaatatatgacaagttcgccgcttaagtctttttttgccggacatgtcacttccgccggtaaggtagacttctcccaaggtagaccaataggaaaattgccgagacgaacttgagacaacgagcagaacgaaactcttaaatgatatgcatgaattttcgctcaactcactgacaaaatcaaatctaatcaacaaattaattgcgcatgacgttgacaattatgtgagcgacgaaacgtttaagccaaagtcgaactgaaaattctcggctagaaaactgtcacgttctgatcataggcacatcgatcgtacgcgatatggctaacgtgttttatgctgtactaaatatgtcaaggttcccatgctcaccaatttaatttttgttttttttttttttgcttggctcggcattcggcagctggggatattccgacctgccgggagggtgacatcaacatcagcgagtgcatcaagcagggcctccagcagataacgccacgcatgaagtacggcatcagcgagctgaacattccgccactcgatcccttcgagatgggaaagagctcctatagctacacctccggcctgctccagggacggatttccatgaagaacgttgtgatccacggcctcagcgagggcatcgtggacaaggtcaacttccggctgaaggatggacgcgtgcgcatggagatcctttcgcatgtgccacaaatgttcgtcgagggcttgtacaaggcggacatcaagctcaacgatctcaagctgaatcccaagggcgccttcaacattaccatgagtaagtaacgcagcagaacacatgtaactgcatgttaagtattattaggtcacataacagtttgctattaatattattatattattcaatgtttttgcttcgctttttttcttctgcagctgatgtcgcgatgagggcgagacccattggcgagctctacgagcgtgatggtcacacctatctgcgcctgaccaaactggagactgagcccaaggtgggtgacctgaaattctacgccaatggactagttcccgatccggtgctgagtacgtaatagccaatcagtacttacttatagtacttactaaactgctttgttttcgttcagacgatgtcatcttggactttatcaatcagtactggcgccagctttaccaggccatgcttcccgagacattggacacctggcagccgctgatcctgaagtccaccaatgacttctttgctgcactaccgttcgatatgcttgttaccaagaattgagatacctaactttaatattgttttactatttataccttccggattcatctgttctactcaaggtgttaacatagtttgtaccgaaataaagatacaattacctaaatataaaatatttagaaaatattcttatctatgtttgccagtttatgtagaatgtgtattttctagagtgaaaggttgcacttacactaaacaatcagtcatgagtcaatttacaagtcaagagcaattaaatagggcttgagtggcagattgaaaaagtggggctataatggtcacataaaaggtaataaattgaaattttttattggtttattggtagttaggaatcgaaccgaatggatggaaaactattggatcgaataatggaagtcacttagtaactatcctataagcaataacttaagacactaatggttttatgcaacccgattgaattgtacttaattgtataacttttcacagggcgttcaatggcatatacaagcttaaagcttctcagaatataatagatctaattttactttctagctatactatatattgtgaagttcatagtacaactaactttaaatatgactcacttaatgacgagacttctttaagctcaatttgccggccctacaatgtcaccattgaatagccaaaatcggtagaccattattaatatacgtactttgtaattaatataagaattaatgacgaatcattgttgccatttgctgtagtaccttcaatatatttttccatttaataatacgacattataaatcaggcagaccgagccggtttggcattcagtcaaagtctagctgtttgccggctaatgtttctgatttacaagtaaaatatactaagctagattctaacttgcattgtgtcgcagtgtgctaatttggagaataaaatagctcgacttgcagtctggaagcttcagttgtagtttaacgttctagcagtaggttgaaagtcgaattcgagtcccaaaaaggatatagtttagtagtagaatgtattgtactattggattgctcagcctgctggccttgggatgcagtgcagctcccacggataaaaactactttgctggtaggtatatcatatattc

SEQ ID NO: 12410 - DNA, 1026 bp, DROSOPHILA
gcatttgcatcggtcaggttgggctatccaacggatgtggaataacttcacctaacgaggaagtcaattaaaaaaaacatcattcaatctaaacgtatcaaattaaatattaaacaatctatcgaaatgggtcgtatctttggcgtagttgctctaattctgatggccggcttatgtttggcagcggaaatagaattgccaccagttgagttcaagccggttcgagaaatacctggggatattccgacctgccgggagggtgacatcaacatcagcgagtgcatcaagcagggcctccagcagataacgccacgcatgaagtacggcatcagcgagctgaacattccgccactcgatcccttcgagatgggaaagagctcctatagctacacctccggcctgctccagggacggatttccatgaagaacgttgtgatccacggcctcagcgagggcatcgtggacaaggtcaacttccggctgaaggatggacgcgtgcgcatggagatcctttcgcatgtgccacaaatgttcgtcgagggcttgtacaaggcggacatcaagctcaacgatctcaagctgaatcccaagggcgccttcaacattaccatgactgatgtcgcgatgagggcgagacccattggcgagctctacgagcgtgatggtcacacctatctgcgcctgaccaaactggagactgagcccaaggtgggtgacctgaaattctacgccaatggactagttcccgatccggtgctgaacgatgtcatcttggactttatcaatcagtactggcgccagctttaccaggccatgcttcccgagacattggacacctggcagccgctgatcctgaagtccaccaatgacttctttgctgcactaccgttcgatatgcttgttaccaagaattgagatacctaactttaatattgttttactatttataccttccggattcatctgttctactcaaggtgttaacatagtttgtaccgaaataaagatacaattacctaaatataa

SEQ ID NO: 12411 - protein, 262 aa, DROSOPHILA
MGRIFGVVALILMAGLCLAAEIELPPVEFKPVREIPGDIPTCREGDINISECIKQGLQQITPRMKYGISELNIPPLDPFEMGKSSYSYTSGLLQGRISMKNVVIHGLSEGIVDKVNFRLKDGRVRMEILSHVPQMFVEGLYKADIKLNDLKLNPKGAFNITMTDVAMRARPIGELYERDGHTYLRLTKLETEPKVGDLKFYANGLVPDPVLNDVILDFINQYWRQLYQAMLPETLDTWQPLILKSTNDFFAALPFDMLVTKN

SEQ ID NO: 12412 - DNA, 2930 bp, DROSOPHILA
ctccaatacaagtgcttatagcggatccaatagctacacatacactccggtgaccaaaaagggttactggcagttcactctgcaggacatttacgtgggcggcaccaaagtgagcggctcggtgcaggccattgtggattccggaacttcattgatcacagctccgacggccatctacaacaagatcaacaaggtcatcggatgcagggctacctccagcggagagtgttggatgaagtgcgccaagaaaatacccgacttcacctttgtcatcgcgggcaagaagttcgtcgtcaagggtaacaaaatgaaattaaaggtgaggaccaacagaggcaggacagtctgcatatcggcggtaactgaagttcccgacgagccagtgatcctgggcgatgccttcatccggcatttctgcacggaattcgacttggccaacaatcgcattggattcgctgccactacgtattccacttagacttatctgtattaacttataatgcagctgatctcgcatagacgatcattttaaattgtagtacacttgtaacttgaagcttcctgttcctatgtaacttctaaaattgttgtcaagttaaatcattttgctaagtatgtatatataactttttcatatattaaaagtattcgttttaaataaaaatagctaagatgcagaaccatttgaaagctttcggtctatccatttacctagttaattacctcgcccagctgcaaagttacgtgtgcgcaattccaattgtaaagcttaaaattaagagtaatattttcagttctgcaagtaaattcatagaagatgcttcgagttttgtgtttcttgctcgcgtttctgagtttagtctttgctactcagaaaattctgaaggtaccgctttacgttaggagaagtttcaatgaaagtgaagtcttcctggccagaagtgcaaccgaaggaggtgaaacacttcagcttcagctgctgctacagacgcacaacaatatggaatattatgggacaatagccatgggaaatcctaggcaaaactttactgtgatctttgacacgggatcttcgaatacgtggctaccctctgtgaactgtccgatgagtaattcggcttgtcaaaatcaccgcaagtacaactcttctcgatcaagtagttatattcctgatggaagaaacttcacactgcgatatgggtcgggaatggtggttggctatctatcgaaggacaccatgcacattgctggagctgagttaccccatttcacattcggcgaaagtctgttccttcaacactttgcctttagttccgtaaaattcgatggactagtgggcttgggcctgggagtcttgtcctggtccaatacgacaccatttctggaacttctgtgcgcacaacgattgcttgagaaatgtgtattttcggtttacctccgtcgagatccgcgggagatagtctttggaggatttgatgaatctaaatttgagggaaaactgcactatgtgccagtaagccaatggcatacgtggagtcttcagatatccaaatcttcagtgggaactaaacaaattggtgggaaaagtaatgccattttggacacgggaacatcactggttctggtgccgcaacaaacatatcataacctgctgaataccctatcagctaagctacaaaatggttattttgtggtggcatgcaaaagtggatctctgccaaatatcaatattctcatcggagacaaggtatttcccctaacatccagcgattatataatggaagtgcttttggatcgtaaaccagcgtgtgttttggccattgctcccattaacaggggattttgggtactcggcgatatctttctgcgccgatactatacggttttcgatgctacagaaaagaggattggattggctaaggccaagtaattgataagtacataaagtgtatatattacctatagatgttatatttattattagactgtgtgacaaaaaagccattccagttacattaaaagtataagtctatgatattatttcaaacatttttaaattccgaattgttttttattaacacgaaatcatttgccaatgtaccactgttcgcacaatttaattgtgtaattgccaattgctttgtttattcaattaaatgtactcgcactatttatctctactttacgcaaacattgaagtgcgttcaaccaccacattaaccaattcaatttggaatgccagacgaattgggccattaaagtgctccatttgcaggtgctataaaacaatcgcggccagaatctttgtcaattagttggaaggggctttacaaacggttcggatcgatttgaattcgcctggtcgggccagtgatgcactgcctcatttcgctgtggttgtccctgtggatcttgtgcctgttttgggcgaagtgccagggccaactgattcgcattcccatgcaatttcaggcctctttcatggccagtcggcgtcaacaccgtgccggcagatcatccctcttggccaagtacaatgtggttggaggacaggaggtaacgtcaaggaatggtggcgccacagaaacgctcgataaccgattgaacttggagtacgctggacccattagcattggatcgccgggtcagccttttaatatgctgtttgacaccggatctgccaatctctgggtgccaagcgctgagtgttcaccgaagagtgtggcctgtcaccatcatcatcgctacaacgccagtgcctcgagtacctttgttccggacggtcggagattttccatcgcctatggaactggaagtctgtcgggaagattggcccaggatacggttgccattggccaattggtggtgcagaatcaaacctttggcatggccacgcacgagccgggtccaacctttgtggataccaattt

SEQ ID NO: 12413 - DNA, 930 bp, DROSOPHILA
atggaatattatgggacaatagccatgggaaatcctaggcaaaactttactgtgatctttgacacgggatcttcgaatacgtggctaccctctgtgaactgtccgatgagtaattcggcttgtcaaaatcaccgcaagtacaactcttctcgatcaagtagttatattcctgatggaagaaacttcacactgcgatatgggtcgggaatggtggttggctatctatcgaaggacaccatgcacattgctggagctgagttaccccatttcacattcggcgaaagtctgttccttcaacactttgcctttagttccgtaaaattcgatggactagtgggcttgggcctgggagtcttgtcctggtccaatacgacaccatttctggaacttctgtgcgcacaacgattgcttgagaaatgtgtattttcggtttacctccgtcgagatccgcgggagatagtctttggaggatttgatgaatctaaatttgagggaaaactgcactatgtgccagtaagccaatggcatacgtggagtcttcagatatccaaatcttcagtgggaactaaacaaattggtgggaaaagtaatgccattttggacacgggaacatcactggttctggtgccgcaacaaacatatcataacctgctgaataccctatcagctaagctacaaaatggttattttgtggtggcatgcaaaagtggatctctgccaaatatcaatattctcatcggagacaaggtatttcccctaacatccagcgattatataatggaagtgcttttggatcgtaaaccagcgtgtgttttggccattgctcccattaacaggggattttgggtactcggcgatatctttctgcgccgatactatacggttttcgatgctacagaaaagaggattggattggctaaggccaagtaa

SEQ ID NO: 12414 - protein, 309 aa, DROSOPHILA
MEYYGTIAMGNPRQNFTVIFDTGSSNTWLPSVNCPMSNSACQNHRKYNSSRSSSYIPDGRNFTLRYGSGMVVGYLSKDTMHIAGAELPHFTFGESLFLQHFAFSSVKFDGLVGLGLGVLSWSNTTPFLELLCAQRLLEKCVFSVYLRRDPREIVFGGFDESKFEGKLHYVPVSQWHTWSLQISKSSVGTKQIGGKSNAILDTGTSLVLVPQQTYHNLLNTLSAKLQNGYFVVACKSGSLPNINILIGDKVFPLTSSDYIMEVLLDRKPACVLAIAPINRGFWVLGDIFLRRYYTVFDATEKRIGLAKAK

SEQ ID NO: 12415 - DNA, 5569 bp, DROSOPHILA
gcgaggaactcatagcgcgagtgcatctcgttgaacagtgcaaaatcggcgatagtcagcttgttggccaccaggtaggtcaccggggcaatggacttgtccaggaaggagagagcccaggatatgtcatcctcgcaggtcagtgagaaagacagccagtgatcaatctgtgtccgttcgatggccgtttccccgtacagcttgtagtccggagcagcgcgagcgagggcgcgcagcacatcgttgttggagtggcacaccaacaggcgattatctgggaactgcagcgaagtctcctccttgctccacactatctccacgggcaccgtgccattgattaggtgcgccgtcgccaggccacctagttgaatgactcaattaatatcacacgataccggggctgatgcaataaaagagggttcgaatggattgccgaatatattgtgtacataaatagaccccgatgcggatataacctcactaagtgcaaatcctccgggcactgaaggtcacagcagccggcatccgtttgatactcacttatgggcggattgttaaggttcgctttgagctttattgacatgttcgcaggttgtttgtttgcaattgaaatcaaactgatgaaatttcggcttttaaacggcacgagtacggccagctgctaacgtctacacagtccaatagagatggacaaggagaactgcagttgccgtgcgatagttctctgtgaatgataaatatcgcacggatcagttacagcgaaagattattaataactttcaaaatattaaatattatttcaacacaacttacctatcaacacaattagatctaccttaaaagtggtaaataatttctgaatacaaaaataatgtttaatcattatattactagctctgtttgcttgaagcccactgtacttgccattcccttgaacacgtcggcagatgtagtgcgaatggcagcagtgcacgaagaagaactttctatgtgtgttttgctcgctggctgcatggaaaaataagatttttccatatattttgtaatcccagcccacggaaaaacttcaccacacagagaaaaacaaaaataaatggtaaggcttaagaaaaatttgcggaaaaagtgattttttcgttatcgaatgttatttgtgtgttgacgatgcggtggctccaggtgtacaagtatgtgtgtgttggtggggctgctcaatgactgtgtcggtgaaaattgggagcttcgctggccttaaaagatatgaaaaatgcattacgaccgtaaaatcaatatacgttccggacttacgaacttgctaccttattccagatgcttttcatgctgctgtttagtcggcagggcaaactgcggttacaaaagtggtacatggcctatccggataaggtgaaaaagaagatcacccgggaactggtcactacgatactggcccgcaagcccaaaatgtgctcctttctggagtggaaggactgcaaaattgtctacaaaaggtgggtaaaatcttatgaatattctaaagaataattataatacatgcattcacgtttgttgttttataggtatgccagcttgtatttctgttgcgccatcgagcagaacgacaacgaactgctgacactggagatcattcatcgctatgtggagctgttggataagtacttcggcagcgtaagttactaacaccattttgcaatggaagcgttaaagagtgttatatttatcatttgctgaacaggtctgcgagctggacattatctttaactttgaaaaagcatactttatcctggatgagctgctcattggcggcgaaatccaggagacgtccaaaaagaacgtacttaaggcgattgcctcgcaggatctgctccaagaggtcagtacacccgagacatatgatctgtaatgcctaaaacggttgtgtcactctacctatgccggatattgtttattgttttatatatttattcaacttgatggtttttagtttcgttacctcgttagtgtttgtttgcatctatattattatgcctatctataacgtttacaatgtcatacctcatcaaatcacggtttttctttatactctactcttacctacttctcgttcttatttctctaatctgtgcaatcaaaactaatctctataaacaaaacaactctaaccactcgaagcaagaagagttcttttactcgctgcaatagatcctaagtccagtgtgcgtgtgtgtccttgcagcagcgttgtcattatctttaagttccgaatctgatgtaaaccacctcggctggcacacacgcactcaatcgatttttttatttgcatgccgtcttgagtttcgaaacttgcctactcgaaaacgaattgtgaattgtgagaatctaccaggaaatattaaatcgccacagtattgaacttgccatagatgttgctgtgcagtaaaactaaaacaaaaactaaaaccttgtttgccatttatagtacaatttttagcctgtgtttattttgtgaccgtaactcttgtaagtctcctaacccgatttgtagcaatatgtcgatcgtagttggcttgattattttgcatgacctttgtagatgaatttctaatgttcaactaaacatattcttgccataccataagccatatataaatgtgtaacccatgtaccctctctcttgttattattaacgcttaccctacccgccactgcatatatcgatgttaacacaactactaccaccacgaacaaccaccacaggacttcaatgagtatctcaactaatcaatgaaaacaataaataaataccaagaagaaaagaaaacccatcccaaagaaacagtgtaaagaacataaagttatattcccgatctgcaaagagttagtggagagtcgataggtcagatcagtcaatccttcgtccagctgtatatatatgtgtatattgcccagcttctatttccctgccttccccgcgctgcgctgtgatgttcatccatataatatgcatttcgtgtttccaagttgtgccgtacatgaaagaaaagcaaaacaagatcgaaattggtttcttttttggacacattctacttacacatacacctactactcttactaccactactactctctttccttctactcttctcgttcttattgttcttattctctgtactccaggacgaagccgttgagggcactttaagagacattggactcctctaaagaactagaacaccctagaaattatgtagttgatattacacgcacaccccgacacaataacacacacagttacaccccagcgataacgtgtgctgcacttggcactttacagcactgctccatccactcctcaacactagtgtgtgatttggctgttgtacagcactgaagcgctgaaaaaaaaattataagcaagaagacgccaagcagcgtgaggctccaaaaagcaataatactatatagtaacatcagagcatctggtatgcggtttttcatacactctatctcgtaaatttcacgcacagacacaatagattcagaaaagttcatgcaaaacaagccaacctcacgtagttccacctggggttcctgaactgaattaatattcctcttcctatctacattttataatcgaaagatcattccaatcaatcaccaaatgggcaataactaatttagtggggaaatatatgcaatactattcttacaatagaaacatgtaagctttaatgttgattaaatgagaacgatatataattgaaaattgtaataataaccgaataaaaaaatctagtttatctatatctacaagtatatatatatatatatatgtttatgtatgtgtgttgtacgttttagccaaattttctgtgttttgtaactgagaaaaacaagttaaaataaaaaccaagtatttttgaaaaaaaaatcctaattgtactcgtatgctatatgaaaatggtaagacctggtgaacctcagttttctttttagtgtctttgttaaacgtttagttttgattgttgtctttgctgttgttgtgactgaccaatttgactgctctaaactcttgacgcccacattgttccacctccactgatctgatctctgagctccactccctctaaactgtctatctacctatatgtctggcttagcgcacccgtttggtgtcctttcgtttttagttgctactatataccaccctttttcatagtctttttcatagttagcccccagtatcgatacttttatttggtttccttttaccccaagcgctgtaaagtatagtaacatgtaactgaagctaagcattctccctttccaggatgagaccccgcagagtttcttcgacgatcacggcctgggctaagttggctctatgcaaaagtaacgccagaaaggcattatctatattgaacccatttaaagtcgccttaattgtatgtgtatttaacgtaacccaaaagtataccggttctattgtaatttaaccaccctgtgtcagcataaaaaacattgtgtatagaagtgctgttaaacctattcctaatttcgcttggcaaatgcaatttgcaatacatttaatttcacaaaaaagcatcaatatcggttgctcacacacgttcatatttgtaaagattaacttaatgataagcaaagtaaagcgatgcgattaatcgacggtgtgctcaactctatagttgtaagttaaaagccctataaatatataaaaattgctgtatccaaagtaaccaatcaaaactctgtttactttatgcattctttgctgcaaataaagatggtatcgagcgtgagagtttttatatttcagtactactcttttctgttgggacaatagtacgtcatggttatgacgcggaataagcacaagaaagtaggcaatggtttttgaaaagttcgtttttatgagattttactaacttaaattataaaatataagaaaatgcattttcttactgattttaatattgaatgtaaaactcatttttttcaaaaaacctacatttctaaccttcaattaagccttaatttaaaataatggtcgttctttgggccaatttcctctcttagcttggccacatttattttggggccaagttggcagctcgccgaccaacaaattgttgatttcatttttatttggggagggggggtcgccagagagcatcctgactgcgaacgagagagatagagagcgacctggctctctccctaacgggagctccccaacatttccccctgtttgttgttgggcacgcacgcacacaggaattcggcgaactcaacacactcagcgtcgagcgagagggcgcgattggccccacggcgtgtgcgagcgggacgcagcgagagcgccaggcggagcagcggcgaaggcagcgataaaggcgctgcgccgcgagaaagttgcagacccgtccgcagagcgcaccatcgtcttcagcggagcacacacagcagctaggtgtgctcttccgtacgtaacggttgcggattttcactggatttccattttcacacagcc

SEQ ID NO: 12416 - DNA, 743 bp, DROSOPHILA
ctcgctggctgcatggaaaaataagatttttccatatattttgtaatcccagcccacggaaaaacttcaccacacagagaaaaacaaaaataaatgatgcttttcatgctgctgtttagtcggcagggcaaactgcggttacaaaagtggtacatggcctatccggataaggtgaaaaagaagatcacccgggaactggtcactacgatactggcccgcaagcccaaaatgtgctcctttctggagtggaaggactgcaaaattgtctacaaaaggtatgccagcttgtatttctgttgcgccatcgagcagaacgacaacgaactgctgacactggagatcattcatcgctatgtggagctgttggataagtacttcggcagcgtctgcgagctggacattatctttaactttgaaaaagcatactttatcctggatgagctgctcattggcggcgaaatccaggagacgtccaaaaagaacgtacttaaggcgattgcctcgcaggatctgctccaagaggatgagaccccgcagagtttcttcgacgatcacggcctgggctaagttggctctatgcaaaagtaacgccagaaaggcattatctatattgaacccatttaaagtcgccttaattgtatgtgtatttaacgtaacccaaaagtataccggttctattgtaatttaaccaccctgtgtcagcataaaaaacattgtgtatagaagtgctgttaaacctattc

SEQ ID NO: 12417 - protein, 153 aa, DROSOPHILA
MLLFSRQGKLRLQKWYMAYPDKVKKKITRELVTTILARKPKMCSFLEWKDCKIVYKRYASLYFCCAIEQNDNELLTLEIIHRYVELLDKYFGSVCELDIIFNFEKAYFILDELLIGGEIQETSKKNVLKAIASQDLLQEDETPQSFFDDHGLG

SEQ ID NO: 12418 - DNA, 13803 bp, DROSOPHILA
atcgacgattcggtgttgtccagtggcgatagcaggctcatccgcaccagcgagggcagcacgggccgaatctccgcctccggatagctggccagcagggtgatgtccagattctgcatggcgcagaaaacgcgcggcgatacatcgtacatcctcaccggcattttgtcctcgtcgtcgttgtcgttgcgttccaacttgttgcacccggcaatgctcgtgtgctcggttgtcccgctctattggcctggccggcggggtgtccgtgctggagatgccggcgcgggtctgctttaatctcggcgatctgtagttggggcagggaatgccggagaatccgagaatccactgcgatccgcatccaaaaaatcaacacacgtcagtgtggccagttggagaggctgcaaatataccagcaattactacattttattattttattattataaaaatactatactgctctcataggtgaaggttaacaaagagatgcgcagctaaagaaaaatattaacaattattgcaagaggctaacaactattagtactattaagttagtaaaatctttactgttattattagcaataaggcttatattctcccaaaaagccaacatattaaaaaaagttaaatataaataagttatgtttgtatataagcatttctgtaacgaaaatcttaggaaaataagaacattttggttctgataaaaatttaattaatattatttaaatagctcgaagtaatagagtacatgtggcgtaaacaattgtttatgtaatattaggttatacaaatatgaaggaatatttaagttaaataatatataaaaatcttaagttccaccgttttggctaatttatagccagatcatgtggcacggccacactgcgcagtaggcgttttttagcgccttctcgcgctggttcacttcgttcactcgttcgcaacgcgatgttttgaatacatacattttttccattctcgccaagtgaagttcatccgccagaccgaagatttttagttgaacgtgctaaatctatgaaattaactgtgttttatgaatcaattagggcgagcggagctgcaaaattatcgagtaggtaagtgaaagtcgccgcagtgcagtaaaaacggcgcgaaattcgaaacgcaagcggtcgaacggggaaaatgtgaaatagaccaacgcccaagtgaataggccacgaaaaaggagccaccaataaaaggcagaagtggcaaaagagagcaaaaagtatctaacgaatgtgtgagcgactcttactcttggtgtgcctgtgtgtgtgtttttggtttgagaattagaagtgtgctaaaatatgaaaagcaagtgatttctcgcatacatttctacgtacataataaaaacatcatcgattaaaattgcctgctaactcatatatttcgacgctgtcgccgtcgctgccggcgtcgctgtctctgccaccgatgatgacatcattcggttttcgttgagagcgcgtagcgtgcgtgagtgtgtgtgtatgtttgttcgagtaatcgaattggacgagtgtagttcgcatttttttttttattttttaaattacttggtgtaaatgtgcctgaatggcaggaccgaaactctagagctgtgaattaaacgcatgaatgacatgttgctgtgcaagaagaagaagcgcaagccttaagtaacgtttgcgtcagttgttcgttccgttggtgataaaaagcgaagaacacggctatcgcctaatcggagatatatatatatatatacatgtgtatcatacgttgaggttccgtgtgcttgtgagttttatgaaatacaagcggtgcgctcttttttcttccccgtagatacgcatacgcctatgcacttggctgaaatacagttacgtgctcaccaacacatcggctaaaaataacacacactccccatttcccatttcccttgcaccccgctcttctcacccacccggccctctgaggtcacgagttgaagtttcatttcgaagttacgagttaaaagatataaatatactgagctgcacttgcccaatgtttgtttgcttatgtgtttgtttgtgcttcaccttgtcgctgatgttgttgcattgttgttgtttatgacaaatcacacacgtacagttgtaaacacaacacacacacccgcacacaaacctacaaacatacaggcattcaatcaattgatcgccgaaaactcattaacttgctcataaatggcagggaaaactggtttttccttagcaaagcctcagctttggtggtggtttcatttccaagtttccaaagttgaactcttggcctgtttaattgaactcgcagttgcacacacgccccgctctctctcttccgctcacactgtgtctctcttcatcgctctctgtgatgaactcacactggaaacaagaggatcggatcggccatcataattaagtctagaaagcaccaacaattgaaggtggtaaggtggggtgggtggttggggtgtgtaaggggaagagagctagcccgtgagagcgtcttgtgcagtttccacccctctatcccttgctcacttccacttccagcactcctactctaactgcaccaccttccagatacagatatatagatacaatagtactctccctctttctctttctcctctctccatctctatctatcgctctgcgctccagttttgttgttgctcgctctcgctctctcaaagttttaagcttcgttttaataaaaatattacgtaatactaagatagaagctgctgcgtgcgtgtgcgtgtgtgctgattttgcttttgtttgttttaacaattctcgctcgcactatggttcttgatgttcttcattttgggtgttgttgtcgcggtgctctcataaaacttagtacaaatgaaatcagcagcttagttaattgtgtaagcgagaagaggaagagcgaagaacgaagagtagaggagggcgataacgaagcgatgggaaaaagttatgtttgctgcttttgttgttgttgtgtgcgtagaagggaatgaccccggcacctgtgcaaacgcgaatgtatataaaggtcaaaggacattagcacaaaaacccactgttatacacagcaaaaggggcctgattcaatcagtgattctatttttgtcctaggtcggcaagcttatattacttaattccattaatcaagcaattaaattgttattctaatcgagttgcggtcattcattaaagaattcattattcatcttacaaataattttcaaaaatatcatactgaattgcatttactgtaaataaaatattgtgaatgaataaaagttgaaaacatgaactgacataatatttctaataatttactaaaattttgtagaggcagtattttatttggggaaattttgagttctgaattaagtactgtgttctcctaatttgtaatgtgaaagccgcggagaaagtgcggcaataaaaaaacaaaaaaatatgtcaagtggaaaaagtacagcccaagtacttcgcccattttcattgcaacctaaaagcttgcaaaagtgtgaaaaacgctgcgatgtgtgaaaccgaatgaattttcgagggccaactgccgtgtgaataggtcgtaatttcaaatcgtcggctacgtcgataaaaaaccagtgaaatactagtatacaagcccatgtaaatgagtgatagacatacgtgtgtcccgtaaaacaaaaagctcgccgatggaaaaatggaaactgaatgggcccagcatgaatatgatttatgaaaatgtgaaatgtgcgatgtgtgttcacagttgaggtcataaagatagcagcgaactttagcattcaagctaaaacttattagctacgacgttatatactttttgtgcctttttattgttagtctaattataaaaaaaagagcaagtatttatagttataaaatcaataacaagaatttgtttaatgcacctctttgagggccaacagtaaactatttgtcaatgaatgagccattaaataacaattaaatacaataaccactggtgcatttacatggatgacacccctaaatgaatgaaacccgcatataaagcaaaccctcagtaattagctacttgttatgtggatacattatacactcatatacagatgtacctatatcttttttaccccccacatcaccaccgtctgctatataattcgttttgtctgccgtttcgatagtttttgtgaattgaatttcctgcaatttcacggttttgccatacgaatccggttgggggaggtccgccccagttttatgtattcttttttttttttgttttatttttttttcttttgccacagagtgatgtaatcgctttaagtcatagtgacaattacgatcggacattctagtggtgaccccggcgacccgcgtgacgccatcccatgccatggcagcccaaacccaaacccaaaactgacataaatgaatcaccagccgctgctgacaattatctaaccgattttcccaccgcctcttccagtgattctcttctgaaggcaacacattcggtttggacttgaaggattaactcataggaacgacaaacggagaagtggcgagctcccgtgaaacgaaacgacaaaacccaacattagaaactctaagacgtataaactagcagctattaactaactaataagcacgaaaccactgtggaaaccgtagatccccagccatgacgacggacatttcgattgttcgctgggatcccagccagggtcctggcaacgagtacatcgatgagtacgagtacgatggcggcaactccagttcccgactgttcgagcggtccaggatcaaggctctggccgaggagcgtgagagtgtgcaaaagaagacattcaccaagtgggtcaattcgcatctgtgccgggtcaactgccgcattgccgatctctatgtggatatgcgggatggcaagcacctgatcaaactgctggaggtcctctccggcgagcgactgcccaagcccaccaagggcaagatgcgtatccactgcctggagaacgtggacaaggctctgcagttcctgcgcgaacagcgcgttcatctggagaatattggctcccatgacatagtcgatggcaatgcttccctcaatttgggcctgatttggaccatcatcctgcgcttccagatccaggacatcaccatcgaggaggtggacaacaaggagaccaagtccgccaaggacgccctgctgctctggtgccagatgaagactgccggctatcacaatgtgaacgtgcgcaacttcaccacctcgtggcgcgatggcctggcctttaatgccatcatccacaaacaccgtccggatttggttcagttcgagaaactctcgaagacgaacgccatccacaacctaaacaatgccttcgacgtggccgaggacaaactgggcctggccaagctccttgatgccgaggatgtgttcgtcgagcatccggacgagaagtccatcatcacctacgtggtcacctactatcactactttagcaaactcaagcaggagacggtgcagggcaagcgtatcggtaaggtggtcggcattgccatggagaacgacaaaatggtccacgactacgagaacttcacaagcgatctgctcaagtggatcgaaacgaccatccagtcgctgggcgagcgggagttcgaaaactcgctggccggcgtccaagggcagttggcccagttctccaactaccgcaccatcgagaagccgcccaagtttgtggaaaagggcaacctcgaggtgctccttttcaccctgcagtccaagatgcgggccaacaaccagaagccctacacacccaaagagggcaagatgatttcggacatcaacaaggcctgggagcgtctggagaaggccgagcacgaacgcgaattggccctgcgcgaggagctcatccggcaggagaaactggagcagctagccgcccgcttcgaccgcaaggcgtccatgcgtgagacctggctgtcggagaatcaacgtctggtcagccaggataactttggtttcgatctggcggccgttgaggcggcggccaagaagcacgaagccatcgaaaccgacatcttcgcctacgaggagcgcgtccaggccgtggttgccgtttgcgatgaactggaatcggagcgttatcacgatgtgaagcgcatccttctgcgcaaggacaacgttatgcgcttgtggacctatttgttggagcttctgagagcgcgccgcatgcgcctggagatctcgttgcagctgcagcagaacttccaggagatgctgtacatcctcgacaacatggaggagatcaagcagctgctgatgaccgacgattatggcaagcatctgatgggcgtggaggatctgctgcagaagcactcgcttgtcgaagccgatatcaatatcctgggcgagcgcgtcaaggtggttgttcagaactcgcagaagttcctgagcgacgacccagagtcgtacaaaccgtgcgatcccgagatcattgtctcgcgcgtccagcaactggaggatgcttacgcagagttggtccgtttggccgtggaacgtcgcagccgcctggaggagagccgcaaactctggcagttctactgggacaccgccgacgaggagaactggatcaaggagaaggagcagatcgtctccaccgacgaggtgggtcacgacctgaccaccgtcaatctgatgctcagcaagcacaaggccctggagtcggagatcacgtcgcacgatccccagctgcaaaatgtggccaaggtcggttcggagctgatcaccgagggtcactttggtgccgatcgcatcaaggatcgattgaaggagatcctcaacaagtgggaccaccttctggacctcaccaagtaccgccgccagcgcttggagaatgccgtcgagtacttccagctgtttgccgatgccgacgatgtggacaactggatgttggacaccctgcgcattgtttccagcgaggatgttggtcgcgacgaggctaacgtacagtccctcctaaagaagcacaaggacgtggccgacgagctgaagaattacgccgaagtgatcgatgccctgcacaaacaggcggagagcctgaagctaaacgaggcggaaaaggccaatgtggacaaacgcctggaggcgatcgacaacaggtacaaggagcttaccgaactggccaagctgcgcaagcagcgactgctcgacgccctcagcctgtacaagctgatgtccgaagcggatggcgtggagcaatggatcaaggagaagaccaagatgctggacacgatgactcctggcaaggacatcgaggatgtggagatcatgaagcatcgcttcgagggcttcgacaaggaaatgaacgccaatgcctcgcgcgtggccgtcgttaatcagctggcccgccagctgctccacgtcgagcatcccaactccgatgagattctggagaggcagaaccacctcaaccaggagtggtcgacactgcgcgagaaggccgaggccaagatggatgatctgaagtccgcccatggcgtccagaccttctacattgagtgccgcgagaccatttcgtggattgaggataagaagcgcatccttaccgagaccgacagtctggagatggatctgaccggtgtgatgaccctgcagcgtcgccttagcggcatggaccgcgacttggccgccattcaggccaagctctcgagcttggagcgcgaagccaacagcatcgaggatgagcatcctgaggaggccaagatcatccgcgagcgcattgcccagatcgagttgatttgggagcagctcacccagatgctcaaggagcgcgactcgaaactggaggaggccggcgatctgcatcgcttcttgcgcgatctggatcacttccagacttggttgaccaagacccagacagatgtagcttccgaggacactcccacttccctgccggaggctgagaagcttctgaaccagcatcaatcgatccgcgaggagatcgacaactacactgaggactacaagaacatgatggagtacggcgagcgactgacctccgagggaagcacctcagacgatccacagtacatgttcttgagggagcgcctgaatgccctgaaggatggctgggaggagctgcaccagatgtgggagaacagacaggtgctgttgtcgcagagcttggaccagcaactgttcaaccgcgatgcccgccagacggaggtgttgctcagccaacaggagcacttcctcagcaaggatgatacccccgtcaacctggagcaggctgagaaccagttgaagcgccacgaggccttcctcaccaccatggaagctaacgacgacaagatcaacaccctgctgcaggtggccgacaccctggtggaaaaggatcacttcgatgcggacaagattggcaagcgtgcggagaacattaccggacgtcgggatgacaaccgtcagcgtgctctggaccaacacgagaagctgaagaatcaggtgaaactgcacgagttcctgcaggatctcgaagagctggccgagtgggtgcaggagaaatacgccacttcacaggacgagtcgtacaggagcgcaaagaccatccactccaagtggacgcgccatcaggccttcgaggcagagattgccgccaacaaggagcgcctattcgaggcagagaagtctgcccaggagctatccaaggagaagcccgagttcaaggacgtcatcgagcccaagcttaaggagctggcgaagcaattcgacgacctggaggtgcacaccaaggagaagggcgccatgctgttcgacgccaaccgcgaggtgcttgtccagcagacatgcgacgacatcgactcctacatcaccgacctggagaagcaaattgtcagcggagacactgccaacgatctgacatccgtgaacatcctgatgcagaagcagcaggttatccagacccagatggcggtgaaggctcgccaagtggaggagatcgacaagcagaccgaatacctccagaagactgtgcccgaggagaagatcgaaccgattgtggtgaagaagacggccgtgctcgagcgctttgagaagatcaaggcgccgcttctggagcgccagaaggcgctggagaagaagaaggaggccttccagttctgtcgcgatgtcgaggacgagaagctctggattgacgagaagctgccggtggccaactcaccggattacggcaactccctgttcaacgtacatgtgctgaagaagaagaaccagtcgctggccacagagatcgacaaccacgagccgcgcatcaatgcaatctgcaacaatggccgcaagctgatcgacgagggccacgaggatgccaagaagttcgaggcgctgatcagcgatctgacccagaagtggcaggagctgaaggacgccatcgagaaccgacggaagcatctgctggagtcggagaaggtgcagcagtacttcttcgatgcccaggaggcggagtcctggatgagcgagcaggagctctacatgatggtcgaggatcgcggcaaggacgagatcagtgcccagaacctgatgaagaagcacgaaaacctggagcaatccgtagaggactacgccaacaccattcgccagctcggcgaggtggcgcgtcagttcagcggggatgacatctcctccggcgatgccgtggccgtcaagcaatcgcagctggataagctttacgctggtctcaaggatctggctggggagaggagggctcgcctcaacgaggctctgcagctgttcatgctgagccgcgaggtcgatgatctggagcaatggattaccgatcgcgaggttgtcgccggttcccaggaattgggccaggactttgaccacgtcactctgctgtcggagcgcttcaacgagtttgcccgcgacacagaggccgttggcggcgagcgagtggccaaggtgaacggcattgccgataatcttatccaggccggacactctgattccgccacgattgccgaatggaaggacaacctcaacgaatcgtggcaggatctgctggagctgatcgagacacgcactcagatgctggccgcttctcgggagctgcacaaattcttccacgactgcaaggatgtgttgggacgcatcctcgagaagcagcacggtgtgtccgatgaactgggacgcgatgccggctccgtgtcgacgctgcagcgcaagcactacaacttcctgcaggacctcatcaccctatactcacaagtccagcagatccaggaggaatccgccaagctgcaggacgcctatgccggtgataaggccaaggaaatcaccaatcgcgaacaggaggtgctccatgcctgggacaacctccaggctatgtgcgatgcccgcaaacagaaactggccgacacaggcgacttattccgcttcttcaacatggtgcgcatcctgatgatctggatggaggacctcgtccgccaaatgaacacatcagagaagccgcgcgacgtgtccggcgtggagctgctgatgaacaaccaccagagccttaaggccgagatcgacacacgggaggacaacttcggtgcgtgcatctcgctgggcaaggagctgctcacccgcaaccactacgcctccgccgatatcaaggatcgcctgatgacgctgagcaatagccgcaatgccctgctccgccgctgggaggagcgctgggagaatctccagctgagtgagtaaactctatacttcaaaacgtacgcccttgttaatcaccgtttttgcattgatttcttgtagtcctggaggtgtaccagttcgccagagacgctgccgtggccgaggcctggctgatcgcccaggagccttacctgctctcttcggagctgggccacacaatcgacgaggtggagaacctgattaagaagcacgaggcctttgaaaagtctgccgccgcccaagaggagcgcttcagtgctcttgagcgtttgacaacagtgagtgcatagttgggaatatatttttatttggataacccataacattcaaacgattattttcgctttcagtttgagcttaaggaaatgaagaggcgccaggagctggcggaagaggctgagcgacaacgcatcaaggaggagcaggaggccaaggccgcctcggaggcggcggaacaggctaaacgagaggctgagcgacgcgacgacgtggatgttggtgcctcgcacgacgattcaggtatgcagtataaactgttacgtaatatacataggattgttgaaaataataccgaaatatgcaatgttgaatgcaacattataatggcattcaacatttattgaataagtgtttattttcaacaaaactatatcatagtccagttgtcccctttgccatattcgcacccaaatccatatccacatctatcccagccgcagtgtcaagaccccagtcaagatagcactcaagatcccgctgcgaatttagtctaaccaaaatatctctaaacgttttctgtcattcaatcatgcctacttaaccaaactcaaaccaatctcatcctgccacggattaaccaactaaccaatcaacttaaacccatgaagccgccaaagacacggccgtcgagttcgagcgcgttgtcgagatccaaacaggtattaagcattgcctttcgcatctaagtgattacatggaagttattcatttcgtttgtgtttatttttaatgtgacgatgtgacgacaaactaattgatttcttgtgtgttccgcagaacgaggcggaaccccaggcgccggcgagggtcacgaaggatatgtgacacgaaagcacgagtgggactcgaccaccaagaaggcctccaaccgatcttgggataaggtaagtcgatttccttttcactaatgaataaaagagcattcctaagaacttgcgtagcaactggctactttattaattttgaaataatcaccaattaacttttctgtttgtcaggtatacatggctgccaaggccggacgcatttcgttctacaaagatcagaagggttataagagtaatcccgaattgaccttccgcggtgagcccagctacgatctgcaaaacgctgccatcgaaattgccagtgattacaccaagaagaagcacgttctgcgagtcaagtgagtagcagaaatgatcagtatttggcatatactcatatacttatcgaatatactttctttcttcattaaccattccccacacaggctcgccaacggtgccttgttcttgctgcaggcccatgacgacaccgagatgtcccagtgggtgacctccctgaaagcccagagcgattcgacagcggtggccgccagcagatcccagactctgcccgccacctcacaaaaggacgaaccaaagcgcagatcgttttttactttaaagaaaaagtaaagtaacagccgtaacgcaaccataagcaagagcagctaattaaaacaaataacaaataacatgaaatgatataatacaaatgcaaaacgacaacaaattatacagcaaaaattaagaagaagcaaatatatatatttttttttcatatatttaaaacttatttcgtaatgagaaaaaaacaaaaaccgacaaaaacttgcaagagaagaacgagcaaaacataaacaattattatgcttatcaaatttgcacgataaatactgctattatgattaaacgtatgtatcttatttatttaaacaaatacaaagtaatataaagattaaaaaaaaatacaaaaaacaaacaaaaaatttgaggaaaccaactcgtgtatgcatttcaatgtattcgataaataaacgaaatattcctttaaagtacaccaattgccggcgaattgatcaattaccgctatcgcctatcgattttggctatcgaagtgcaatttattgcgaaggtttctcgattgctattttcaaacaaaatattcgtcggtttcggggatgatttactggcttttcttttttgctggagaggatctagaattaatcatcacactggtcagccgattgaaaggaatctcgaagagcaccgtcattactatggcccaaaggtaacagaccactgaacaggagatagccagcattatctagaagcaaaaatagtggattgatcaaatggagccccataaagatgagtgagatttgtgattgactcaccatcatggtgttgtccggatacacttcattgctaaaggagtggtagacgtacatgattacaatcggattcaataggtagatggcgtaggtgaacttgctgatccgctgcacttgctccgactgcaggagcgccagcagccagcgggtaggagcatatgagtcgctgttgtccggcttggtgccgcaaatgatgaggtggctggccgccgtgctcaccagaatccgcagaacgaccatgaagctgagaatgatactgatggccggcagttgatccatggtcacttgccttgccagccagccaatgcacgcaatggcccccagtctgatccaccaattaggcattaccaaatcaaagggagtgcccgtacccttgacttggaagaaggcataggagccacctattatgtaggcgagcatgcggatcaacggactcatgtacgaccactcgttggtgtgatacatctcctcgaaattggcgcctacctcgttgacctccatgaagacaatcgaaaacaaagcgctgatcactaccagcaggc

SEQ ID NO: 12419 - DNA, 7474 bp, DROSOPHILA
atccgccagaccgaagatttttagttgaacgtgctaaatctatgaaattaactgtgttttatgaatcaattagggcgagcggagctgcaaaattatcgagtagtgattctcttctgaaggcaacacattcggtttggacttgaaggattaactcataggaacgacaaacggagaagtggcgagctcccgtgaaacgaaacgacaaaacccaacattagaaactctaagacgtataaactagcagctattaactaactaataagcacgaaaccactgtggaaaccgtagatccccagccatgacgacggacatttcgattgttcgctgggatcccagccagggtcctggcaacgagtacatcgatgagtacgagtacgatggcggcaactccagttcccgactgttcgagcggtccaggatcaaggctctggccgaggagcgtgagagtgtgcaaaagaagacattcaccaagtgggtcaattcgcatctgtgccgggtcaactgccgcattgccgatctctatgtggatatgcgggatggcaagcacctgatcaaactgctggaggtcctctccggcgagcgactgcccaagcccaccaagggcaagatgcgtatccactgcctggagaacgtggacaaggctctgcagttcctgcgcgaacagcgcgttcatctggagaatattggctcccatgacatagtcgatggcaatgcttccctcaatttgggcctgatttggaccatcatcctgcgcttccagatccaggacatcaccatcgaggaggtggacaacaaggagaccaagtccgccaaggacgccctgctgctctggtgccagatgaagactgccggctatcacaatgtgaacgtgcgcaacttcaccacctcgtggcgcgatggcctggcctttaatgccatcatccacaaacaccgtccggatttggttcagttcgagaaactctcgaagacgaacgccatccacaacctaaacaatgccttcgacgtggccgaggacaaactgggcctggccaagctccttgatgccgaggatgtgttcgtcgagcatccggacgagaagtccatcatcacctacgtggtcacctactatcactactttagcaaactcaagcaggagacggtgcagggcaagcgtatcggtaaggtggtcggcattgccatggagaacgacaaaatggtccacgactacgagaacttcacaagcgatctgctcaagtggatcgaaacgaccatccagtcgctgggcgagcgggagttcgaaaactcgctggccggcgtccaagggcagttggcccagttctccaactaccgcaccatcgagaagccgcccaagtttgtggaaaagggcaacctcgaggtgctccttttcaccctgcagtccaagatgcgggccaacaaccagaagccctacacacccaaagagggcaagatgatttcggacatcaacaaggcctgggagcgtctggagaaggccgagcacgaacgcgaattggccctgcgcgaggagctcatccggcaggagaaactggagcagctagccgcccgcttcgaccgcaaggcgtccatgcgtgagacctggctgtcggagaatcaacgtctggtcagccaggataactttggtttcgatctggcggccgttgaggcggcggccaagaagcacgaagccatcgaaaccgacatcttcgcctacgaggagcgcgtccaggccgtggttgccgtttgcgatgaactggaatcggagcgttatcacgatgtgaagcgcatccttctgcgcaaggacaacgttatgcgcttgtggacctatttgttggagcttctgagagcgcgccgcatgcgcctggagatctcgttgcagctgcagcagaacttccaggagatgctgtacatcctcgacaacatggaggagatcaagcagctgctgatgaccgacgattatggcaagcatctgatgggcgtggaggatctgctgcagaagcactcgcttgtcgaagccgatatcaatatcctgggcgagcgcgtcaaggtggttgttcagaactcgcagaagttcctgagcgacgacccagagtcgtacaaaccgtgcgatcccgagatcattgtctcgcgcgtccagcaactggaggatgcttacgcagagttggtccgtttggccgtggaacgtcgcagccgcctggaggagagccgcaaactctggcagttctactgggacaccgccgacgaggagaactggatcaaggagaaggagcagatcgtctccaccgacgaggtgggtcacgacctgaccaccgtcaatctgatgctcagcaagcacaaggccctggagtcggagatcacgtcgcacgatccccagctgcaaaatgtggccaaggtcggttcggagctgatcaccgagggtcactttggtgccgatcgcatcaaggatcgattgaaggagatcctcaacaagtgggaccaccttctggacctcaccaagtaccgccgccagcgcttggagaatgccgtcgagtacttccagctgtttgccgatgccgacgatgtggacaactggatgttggacaccctgcgcattgtttccagcgaggatgttggtcgcgacgaggctaacgtacagtccctcctaaagaagcacaaggacgtggccgacgagctgaagaattacgccgaagtgatcgatgccctgcacaaacaggcggagagcctgaagctaaacgaggcggaaaaggccaatgtggacaaacgcctggaggcgatcgacaacaggtacaaggagcttaccgaactggccaagctgcgcaagcagcgactgctcgacgccctcagcctgtacaagctgatgtccgaagcggatggcgtggagcaatggatcaaggagaagaccaagatgctggacacgatgactcctggcaaggacatcgaggatgtggagatcatgaagcatcgcttcgagggcttcgacaaggaaatgaacgccaatgcctcgcgcgtggccgtcgttaatcagctggcccgccagctgctccacgtcgagcatcccaactccgatgagattctggagaggcagaaccacctcaaccaggagtggtcgacactgcgcgagaaggccgaggccaagatggatgatctgaagtccgcccatggcgtccagaccttctacattgagtgccgcgagaccatttcgtggattgaggataagaagcgcatccttaccgagaccgacagtctggagatggatctgaccggtgtgatgaccctgcagcgtcgccttagcggcatggaccgcgacttggccgccattcaggccaagctctcgagcttggagcgcgaagccaacagcatcgaggatgagcatcctgaggaggccaagatcatccgcgagcgcattgcccagatcgagttgatttgggagcagctcacccagatgctcaaggagcgcgactcgaaactggaggaggccggcgatctgcatcgcttcttgcgcgatctggatcacttccagacttggttgaccaagacccagacagatgtagcttccgaggacactcccacttccctgccggaggctgagaagcttctgaaccagcatcaatcgatccgcgaggagatcgacaactacactgaggactacaagaacatgatggagtacggcgagcgactgacctccgagggaagcacctcagacgatccacagtacatgttcttgagggagcgcctgaatgccctgaaggatggctgggaggagctgcaccagatgtgggagaacagacaggtgctgttgtcgcagagcttggaccagcaactgttcaaccgcgatgcccgccagacggaggtgttgctcagccaacaggagcacttcctcagcaaggatgatacccccgtcaacctggagcaggctgagaaccagttgaagcgccacgaggccttcctcaccaccatggaagctaacgacgacaagatcaacaccctgctgcaggtggccgacaccctggtggaaaaggatcacttcgatgcggacaagattggcaagcgtgcggagaacattaccggacgtcgggatgacaaccgtcagcgtgctctggaccaacacgagaagctgaagaatcaggtgaaactgcacgagttcctgcaggatctcgaagagctggccgagtgggtgcaggagaaatacgccacttcacaggacgagtcgtacaggagcgcaaagaccatccactccaagtggacgcgccatcaggccttcgaggcagagattgccgccaacaaggagcgcctattcgaggcagagaagtctgcccaggagctatccaaggagaagcccgagttcaaggacgtcatcgagcccaagcttaaggagctggcgaagcaattcgacgacctggaggtgcacaccaaggagaagggcgccatgctgttcgacgccaaccgcgaggtgcttgtccagcagacatgcgacgacatcgactcctacatcaccgacctggagaagcaaattgtcagcggagacactgccaacgatctgacatccgtgaacatcctgatgcagaagcagcaggttatccagacccagatggcggtgaaggctcgccaagtggaggagatcgacaagcagaccgaatacctccagaagactgtgcccgaggagaagatcgaaccgattgtggtgaagaagacggccgtgctcgagcgctttgagaagatcaaggcgccgcttctggagcgccagaaggcgctggagaagaagaaggaggccttccagttctgtcgcgatgtcgaggacgagaagctctggattgacgagaagctgccggtggccaactcaccggattacggcaactccctgttcaacgtacatgtgctgaagaagaagaaccagtcgctggccacagagatcgacaaccacgagccgcgcatcaatgcaatctgcaacaatggccgcaagctgatcgacgagggccacgaggatgccaagaagttcgaggcgctgatcagcgatctgacccagaagtggcaggagctgaaggacgccatcgagaaccgacggaagcatctgctggagtcggagaaggtgcagcagtacttcttcgatgcccaggaggcggagtcctggatgagcgagcaggagctctacatgatggtcgaggatcgcggcaaggacgagatcagtgcccagaacctgatgaagaagcacgaaaacctggagcaatccgtagaggactacgccaacaccattcgccagctcggcgaggtggcgcgtcagttcagcggggatgacatctcctccggcgatgccgtggccgtcaagcaatcgcagctggataagctttacgctggtctcaaggatctggctggggagaggagggctcgcctcaacgaggctctgcagctgttcatgctgagccgcgaggtcgatgatctggagcaatggattaccgatcgcgaggttgtcgccggttcccaggaattgggccaggactttgaccacgtcactctgctgtcggagcgcttcaacgagtttgcccgcgacacagaggccgttggcggcgagcgagtggccaaggtgaacggcattgccgataatcttatccaggccggacactctgattccgccacgattgccgaatggaaggacaacctcaacgaatcgtggcaggatctgctggagctgatcgagacacgcactcagatgctggccgcttctcgggagctgcacaaattcttccacgactgcaaggatgtgttgggacgcatcctcgagaagcagcacggtgtgtccgatgaactgggacgcgatgccggctccgtgtcgacgctgcagcgcaagcactacaacttcctgcaggacctcatcaccctatactcacaagtccagcagatccaggaggaatccgccaagctgcaggacgcctatgccggtgataaggccaaggaaatcaccaatcgcgaacaggaggtgctccatgcctgggacaacctccaggctatgtgcgatgcccgcaaacagaaactggccgacacaggcgacttattccgcttcttcaacatggtgcgcatcctgatgatctggatggaggacctcgtccgccaaatgaacacatcagagaagccgcgcgacgtgtccggcgtggagctgctgatgaacaaccaccagagccttaaggccgagatcgacacacgggaggacaacttcggtgcgtgcatctcgctgggcaaggagctgctcacccgcaaccactacgcctccgccgatatcaaggatcgcctgatgacgctgagcaatagccgcaatgccctgctccgccgctgggaggagcgctgggagaatctccagctgatcctggaggtgtaccagttcgccagagacgctgccgtggccgaggcctggctgatcgcccaggagccttacctgctctcttcggagctgggccacacaatcgacgaggtggagaacctgattaagaagcacgaggcctttgaaaagtctgccgccgcccaagaggagcgcttcagtgctcttgagcgtttgacaacatttgagcttaaggaaatgaagaggcgccaggagctggcggaagaggctgagcgacaacgcatcaaggaggagcaggaggccaaggccgcctcggaggcggcggaacaggctaaacgagaggctgagcgacgcgacgacgtggatgttggtgcctcgcacgacgattcagaacgaggcggaaccccaggcgccggcgagggtcacgaaggatatgtgacacgaaagcacgagtgggactcgaccaccaagaaggcctccaaccgatcttgggataaggtatacatggctgccaaggccggacgcatttcgttctacaaagatcagaagggttataagagtaatcccgaattgaccttccgcggtgagcccagctacgatctgcaaaacgctgccatcgaaattgccagtgattacaccaagaagaagcacgttctgcgagtcaagctcgccaacggtgccttgttcttgctgcaggcccatgacgacaccgagatgtcccagtgggtgacctccctgaaagcccagagcgattcgacagcggtggccgccagcagatcccagactctgcccgccacctcacaaaaggacgaaccaaagcgcagatcgttttttactttaaagaaaaagtaaagtaacagccgtaacgcaaccataagcaagagcagctaattaaaacaaataacaaataacatgaaatgatataatacaaatgcaaaacgacaacaaattatacagcaaaaattaagaagaagcaaatatatatatttttttttcatatatttaaaacttatttcgtaatgagaaaaaaacaaaaaccgacaaaaacttgcaagagaagaacgagcaaaacataaacaattattatgcttatcaaatttgcacgataaatactgctattatgattaaacgtatgtatcttatttatttaaa

SEQ ID NO: 12420 - protein, 2291 aa, DROSOPHILA
MTTDISIVRWDPSQGPGNEYIDEYEYDGGNSSSRLFERSRIKALAEERESVQKKTFTKWVNSHLCRVNCRIADLYVDMRDGKHLIKLLEVLSGERLPKPTKGKMRIHCLENVDKALQFLREQRVHLENIGSHDIVDGNASLNLGLIWTIILRFQIQDITIEEVDNKETKSAKDALLLWCQMKTAGYHNVNVRNFTTSWRDGLAFNAIIHKHRPDLVQFEKLSKTNAIHNLNNAFDVAEDKLGLAKLLDAEDVFVEHPDEKSIITYVVTYYHYFSKLKQETVQGKRIGKVVGIAMENDKMVHDYENFTSDLLKWIETTIQSLGEREFENSLAGVQGQLAQFSNYRTIEKPPKFVEKGNLEVLLFTLQSKMRANNQKPYTPKEGKMISDINKAWERLEKAEHERELALREELIRQEKLEQLAARFDRKASMRETWLSENQRLVSQDNFGFDLAAVEAAAKKHEAIETDIFAYEERVQAVVAVCDELESERYHDVKRILLRKDNVMRLWTYLLELLRARRMRLEISLQLQQNFQEMLYILDNMEEIKQLLMTDDYGKHLMGVEDLLQKHSLVEADINILGERVKVVVQNSQKFLSDDPESYKPCDPEIIVSRVQQLEDAYAELVRLAVERRSRLEESRKLWQFYWDTADEENWIKEKEQIVSTDEVGHDLTTVNLMLSKHKALESEITSHDPQLQNVAKVGSELITEGHFGADRIKDRLKEILNKWDHLLDLTKYRRQRLENAVEYFQLFADADDVDNWMLDTLRIVSSEDVGRDEANVQSLLKKHKDVADELKNYAEVIDALHKQAESLKLNEAEKANVDKRLEAIDNRYKELTELAKLRKQRLLDALSLYKLMSEADGVEQWIKEKTKMLDTMTPGKDIEDVEIMKHRFEGFDKEMNANASRVAVVNQLARQLLHVEHPNSDEILERQNHLNQEWSTLREKAEAKMDDLKSAHGVQTFYIECRETISWIEDKKRILTETDSLEMDLTGVMTLQRRLSGMDRDLAAIQAKLSSLEREANSIEDEHPEEAKIIRERIAQIELIWEQLTQMLKERDSKLEEAGDLHRFLRDLDHFQTWLTKTQTDVASEDTPTSLPEAEKLLNQHQSIREEIDNYTEDYKNMMEYGERLTSEGSTSDDPQYMFLRERLNALKDGWEELHQMWENRQVLLSQSLDQQLFNRDARQTEVLLSQQEHFLSKDDTPVNLEQAENQLKRHEAFLTTMEANDDKINTLLQVADTLVEKDHFDADKIGKRAENITGRRDDNRQRALDQHEKLKNQVKLHEFLQDLEELAEWVQEKYATSQDESYRSAKTIHSKWTRHQAFEAEIAANKERLFEAEKSAQELSKEKPEFKDVIEPKLKELAKQFDDLEVHTKEKGAMLFDANREVLVQQTCDDIDSYITDLEKQIVSGDTANDLTSVNILMQKQQVIQTQMAVKARQVEEIDKQTEYLQKTVPEEKIEPIVVKKTAVLERFEKIKAPLLERQKALEKKKEAFQFCRDVEDEKLWIDEKLPVANSPDYGNSLFNVHVLKKKNQSLATEIDNHEPRINAICNNGRKLIDEGHEDAKKFEALISDLTQKWQELKDAIENRRKHLLESEKVQQYFFDAQEAESWMSEQELYMMVEDRGKDEISAQNLMKKHENLEQSVEDYANTIRQLGEVARQFSGDDISSGDAVAVKQSQLDKLYAGLKDLAGERRARLNEALQLFMLSREVDDLEQWITDREVVAGSQELGQDFDHVTLLSERFNEFARDTEAVGGERVAKVNGIADNLIQAGHSDSATIAEWKDNLNESWQDLLELIETRTQMLAASRELHKFFHDCKDVLGRILEKQHGVSDELGRDAGSVSTLQRKHYNFLQDLITLYSQVQQIQEESAKLQDAYAGDKAKEITNREQEVLHAWDNLQAMCDARKQKLADTGDLFRFFNMVRILMIWMEDLVRQMNTSEKPRDVSGVELLMNNHQSLKAEIDTREDNFGACISLGKELLTRNHYASADIKDRLMTLSNSRNALLRRWEERWENLQLILEVYQFARDAAVAEAWLIAQEPYLLSSELGHTIDEVENLIKKHEAFEKSAAAQEERFSALERLTTFELKEMKRRQELAEEAERQRIKEEQEAKAASEAAEQAKREAERRDDVDVGASHDDSERGGTPGAGEGHEGYVTRKHEWDSTTKKASNRSWDKVYMAAKAGRISFYKDQKGYKSNPELTFRGEPSYDLQNAAIEIASDYTKKKHVLRVKLANGALFLLQAHDDTEMSQWVTSLKAQSDSTAVAASRSQTLPATSQKDEPKRRSFFTLKKK

SEQ ID NO: 12421 - DNA, 3188 bp, DROSOPHILA
caccatttctggaacttctgtgcgcacaacgattgcttgagaaatgtgtattttcggtttacctccgtcgagatccgcgggagatagtctttggaggatttgatgaatctaaatttgagggaaaactgcactatgtgccagtaagccaatggcatacgtggagtcttcagatatccaaatcttcagtgggaactaaacaaattggtgggaaaagtaatgccattttggacacgggaacatcactggttctggtgccgcaacaaacatatcataacctgctgaataccctatcagctaagctacaaaatggttattttgtggtggcatgcaaaagtggatctctgccaaatatcaatattctcatcggagacaaggtatttcccctaacatccagcgattatataatggaagtgcttttggatcgtaaaccagcgtgtgttttggccattgctcccattaacaggggattttgggtactcggcgatatctttctgcgccgatactatacggttttcgatgctacagaaaagaggattggattggctaaggccaagtaattgataagtacataaagtgtatatattacctatagatgttatatttattattagactgtgtgacaaaaaagccattccagttacattaaaagtataagtctatgatattatttcaaacatttttaaattccgaattgttttttattaacacgaaatcatttgccaatgtaccactgttcgcacaatttaattgtgtaattgccaattgctttgtttattcaattaaatgtactcgcactatttatctctactttacgcaaacattgaagtgcgttcaaccaccacattaaccaattcaatttggaatgccagacgaattgggccattaaagtgctccatttgcaggtgctataaaacaatcgcggccagaatctttgtcaattagttggaaggggctttacaaacggttcggatcgatttgaattcgcctggtcgggccagtgatgcactgcctcatttcgctgtggttgtccctgtggatcttgtgcctgttttgggcgaagtgccagggccaactgattcgcattcccatgcaatttcaggcctctttcatggccagtcggcgtcaacaccgtgccggcagatcatccctcttggccaagtacaatgtggttggaggacaggaggtaacgtcaaggaatggtggcgccacagaaacgctcgataaccgattgaacttggagtacgctggacccattagcattggatcgccgggtcagccttttaatatgctgtttgacaccggatctgccaatctctgggtgccaagcgctgagtgttcaccgaagagtgtggcctgtcaccatcatcatcgctacaacgccagtgcctcgagtacctttgttccggacggtcggagattttccatcgcctatggaactggaagtctgtcgggaagattggcccaggatacggttgccattggccaattggtggtgcagaatcaaacctttggcatggccacgcacgagccgggtccaacctttgtggataccaatttcgcgggaatcgtgggactgggcttccggccaatagctgagctgggaattaagccattgttcgagagcatgtgtgaccagcagctggtggatgagtgtgttttttcgttttatctaaagcgcaatggcagcgaaaggaagggtggagaactacttttcggtggggtggataagaccaagttttcgggatccctaacctacgtgcccctcactcatgcggggtattggcagttccctttggatgtcattgaagttgccggtactagaatcaatcagaatcgacaggccatcgcggatacgggtacatctctcttggcagctcctcccagagaatacctaataattaatagtctccttggtggcttgcccacctcaaataacgaatatttgctcaactgttctgagatcgatagtttgcccgaaatcgtgttcatcattggaggtcagcgatttggcctgcagcccagagattatgtaatgagtgctacaaacgacgatggatcaagtatttgcctatctgctttcaccttaatggacgcggagttctggattctgggagacgttttcatcggtcgatattacaccgccttcgatgccggccaacggcgaattggctttgccccagcagcttgagtttttctaagtatcgtttatgactagcaacaaatatctgttctatttaatgacaaagcttggacatgaaacgtggccgtagagaaatcacgagagttggttatagtgaggaaacacagctaaaccagttagtgaaaacaaaaaaacagctgatcaacccacgttcacgtttggtatattatttgattagctacgggtatcccctactgagagatatatatgctatatctgtacaaatgtaaaatatgttctacttttagatatatttcacgaatatttaaaacttttataagttgcctgcttcgttgaccttgccttaactttacatttttttattattttatcaaatcactaattgtaccgctacaatttattaaatagtaatcaataatatatttaaatattttgcttaacttcttttctttaattgatatttacaacaatattataattaaatgtattgtatcgtaataagagtgatagcgtgagagcccagtaaactctgatgagaatcgtttatatatatgtatgagctctcttatctttgtctattcattttaaatccacgaatacgtgtgaatcgcgtatacaaataatattaaaatcaccgactattctgcatatgctcacactgaaaaatcccactcagtccctagaatcgccaaagctgcttatataaaagagtctcacgctgttcatcagttagttatagaaatatattcaatatgaaatcgcttttctctctgtgcctgctgctcggactggctttaagccaagttagtgctagttgcccggaaagctgtcctgatacggaggatgtggtgtgggcccttggaggcggatgcaatgtttttcgcaataaatgctacttcgacaaggcgaactgtaatccagattatggtgcgaacatattattagccatataacttgatgtttgattactaatcaaatgttatagagttgaccatcacaacaaaggaggagtgccaaaagctgtgcg

SEQ ID NO: 12422 - DNA, 1188 bp, DROSOPHILA
atgcactgcctcatttcgctgtggttgtccctgtggatcttgtgcctgttttgggcgaagtgccagggccaactgattcgcattcccatgcaatttcaggcctctttcatggccagtcggcgtcaacaccgtgccggcagatcatccctcttggccaagtacaatgtggttggaggacaggaggtaacgtcaaggaatggtggcgccacagaaacgctcgataaccgattgaacttggagtacgctggacccattagcattggatcgccgggtcagccttttaatatgctgtttgacaccggatctgccaatctctgggtgccaagcgctgagtgttcaccgaagagtgtggcctgtcaccatcatcatcgctacaacgccagtgcctcgagtacctttgttccggacggtcggagattttccatcgcctatggaactggaagtctgtcgggaagattggcccaggatacggttgccattggccaattggtggtgcagaatcaaacctttggcatggccacgcacgagccgggtccaacctttgtggataccaatttcgcgggaatcgtgggactgggcttccggccaatagctgagctgggaattaagccattgttcgagagcatgtgtgaccagcagctggtggatgagtgtgttttttcgttttatctaaagcgcaatggcagcgaaaggaagggtggagaactacttttcggtggggtggataagaccaagttttcgggatccctaacctacgtgcccctcactcatgcggggtattggcagttccctttggatgtcattgaagttgccggtactagaatcaatcagaatcgacaggccatcgcggatacgggtacatctctcttggcagctcctcccagagaatacctaataattaatagtctccttggtggcttgcccacctcaaataacgaatatttgctcaactgttctgagatcgatagtttgcccgaaatcgtgttcatcattggaggtcagcgatttggcctgcagcccagagattatgtaatgagtgctacaaacgacgatggatcaagtatttgcctatctgctttcaccttaatggacgcggagttctggattctgggagacgttttcatcggtcgatattacaccgccttcgatgccggccaacggcgaattggctttgccccagcagcttga

SEQ ID NO: 12423 - protein, 395 aa, DROSOPHILA
MHCLISLWLSLWILCLFWAKCQGQLIRIPMQFQASFMASRRQHRAGRSSLLAKYNVVGGQEVTSRNGGATETLDNRLNLEYAGPISIGSPGQPFNMLFDTGSANLWVPSAECSPKSVACHHHHRYNASASSTFVPDGRRFSIAYGTGSLSGRLAQDTVAIGQLVVQNQTFGMATHEPGPTFVDTNFAGIVGLGFRPIAELGIKPLFESMCDQQLVDECVFSFYLKRNGSERKGGELLFGGVDKTKFSGSLTYVPLTHAGYWQFPLDVIEVAGTRINQNRQAIADTGTSLLAAPPREYLIINSLLGGLPTSNNEYLLNCSEIDSLPEIVFIIGGQRFGLQPRDYVMSATNDDGSSICLSAFTLMDAEFWILGDVFIGRYYTAFDAGQRRIGFAPAA

SEQ ID NO: 12424 - DNA, 2621 bp, DROSOPHILA
tcagtataaatattattcatcctattaatggaatagcacatatttcgtatcttattatattatattaaatattatttaaactaattaaagatagaaaagcgtaactccatgcatgtccaatataattcactaaaattatccacttctgttgaccacgtgacgtttgctttggggttttagagttacaattacctaacttcaattaactaatataattacaacagaataatacagtagcttaattacttacatattatttgtgaagtccgcgagatagatttagtagcactttgtaaacaaataaatctaaatagatatatatcttcttcagtgatccctttcttaacaggaacttaacattttattttaatatgaaacgtgaataaaaagctgaagaaatatggtcacaattccagtttatgagattatttatattttgggtcacacattttaaaataagttttaggtacataacagttaaaacacttgtatacctaacattagtcgtttccaagtaatcacacctgttaaatacacacattgtaaaatagtttacttttaatattccgtgactctaaactacacgtccagtcacacagtctttactagaatcagttgagaattatagggcaaaatcaaaataaaaatattaaaagaccattatatttaagaccatttgtaaagatgtaagcatgcgaatgggttcagtcaactcgggttgacctgagggtttagaattcagagctctaggtaaagaaactcccgagttgaacgttcctagcctgcatataccacaaggttgtgatttatgccctgcttgagagtatttatattatttaattagctgcccactagtgatgctattgcggtgcttatcttttaattaatttctaattaaaatgggtttcttattaagtttaaattattggactcggtttctattgtgctctgggtataaaaccgaaaaggttcctgtgaatcagcatcagttgaagaaaatatggctctgcgtttcgttttcttgctgagtgcttggatggtccttgcccaaggatcctttctgcgcagatcggatattattatcttagaagcgaaggttccccagaaaggatatctgcctgtcgaagatgcttcagtgcatcaaatcgttcctaacgagtcattgtctgcaggaaaagaacatcaacatcaacgagtacatctgtatcaatttcaatcgcatcctcacgagcacggaccccattatcacctagaagggcaccatcacctatctgagccccaccatcatcatcagttgtctgaatcgcatgatcctatccacggatcccctcagcaccactatcatggttcacatcctaaccaacaactcgaggcaccatttcaagaagttcatggatcccaccatcagcatccaatccaccacaaccatctggaggcaccatatcacggaactcatggtgttcatcatcatcgcaactgccacgccaccatccattgccccagggttcatagtccagcttatgccaccgatggtcatctctgctacagggtggagaactcctgcgcactggccgttttgaactgcctgcgtcgcaatgaacttaagccaggttggttataaacatatctaaaacattttcacaaatgatattattgtttaattgcagttttgagacacatcggtcatcacgaatgccatcgtctgcccagcgcttacagggcccactaattctaagctcaagataactaaatataaatataaatatttatataaatatagatataaatatctaatataatatcctaagttgtattgttttctttttctgaaatataatattgtcaaatgaaataattttgttgttgtcggtgttgtgtgtactatttacataaatctggttgtcctatgtatgataatcttatgcataaacctatattcggaagcctagatcttttaaatctttaaagatagaaggtatttaaagatatggtatcatttaccatatatataaaacaaaaaaggctagcctcccctcaggtcctcctcatattaatatcagggccattttatgccaatcgaaacaactgtaacttattaaatagataacaaattaaaatgcattacaaaacaatcaatattaaatgccttagtagattttctcgactattagatacccattactcgttgccatttaagaataaacgccttagtcgattttctcgactattagatacccatcagtcgttgaagtctggcttcagatatagatcctattctgcatacataatggacggacggacggaaatgttggcacgatcaacaaaatatatactacaaaatgattgaaaatttgctgttttaaactaatctagtattgttttgtggtacattaaatattcgaatttatcaagtaatggacttcaaatataataatacattttaaaaatttggttagtctactttaaataattacattatattacaataaatttatttttaattaataaggggaaaaccagtatttggcttgcataatcaagatgagatgagttcaaagtgcaataaactgggtcagcttagaatttggatcagattgcatgacatcacatactataattac

SEQ ID NO: 12425 - DNA, 621 bp, DROSOPHILA
atggctctgcgtttcgttttcttgctgagtgcttggatggtccttgcccaaggatcctttctgcgcagatcggatattattatcttagaagcgaaggttccccagaaaggatatctgcctgtcgaagatgcttcagtgcatcaaatcgttcctaacgagtcattgtctgcaggaaaagaacatcaacatcaacgagtacatctgtatcaatttcaatcgcatcctcacgagcacggaccccattatcacctagaagggcaccatcacctatctgagccccaccatcatcatcagttgtctgaatcgcatgatcctatccacggatcccctcagcaccactatcatggttcacatcctaaccaacaactcgaggcaccatttcaagaagttcatggatcccaccatcagcatccaatccaccacaaccatctggaggcaccatatcacggaactcatggtgttcatcatcatcgcaactgccacgccaccatccattgccccagggttcatagtccagcttatgccaccgatggtcatctctgctacagggtggagaactcctgcgcactggccgttttgaactgcctgcgtcgcaatgaacttaagccaggttggttataa

SEQ ID NO: 12426 - protein, 206 aa, DROSOPHILA
MALRFVFLLSAWMVLAQGSFLRRSDIIILEAKVPQKGYLPVEDASVHQIVPNESLSAGKEHQHQRVHLYQFQSHPHEHGPHYHLEGHHHLSEPHHHHQLSESHDPIHGSPQHHYHGSHPNQQLEAPFQEVHGSHHQHPIHHNHLEAPYHGTHGVHHHRNCHATIHCPRVHSPAYATDGHLCYRVENSCALAVLNCLRRNELKPGWL

SEQ ID NO: 12427 - DNA, 2928 bp, DROSOPHILA
agatgccccacacctgctacgagtgccacaaaagcttcaaatgcattgcccaattaacacagcatataagaacacatactggcgagaaaccctaccaatgcagcttttgtatccagagattcgcccaaaagtacaatcttaaagtccacgaaagaacgcacacgggcgacaagccttttcagtgtgagatctgctcaaagcagttttccgcgttaggcaatttccaggcgcaccagaagattcatttaggagtgcgggatcaggtatgctcgctatgtcagaaaggtttctacaccgccggtgatctctccaagcacatgataacccatacgggcatcaaaaaccatcactgcgatgtctgcggcaaggctttcagcaggcgaagagatatgcggactcataaattgaagcttcatcctctggagtccagtacaaaccatgatatagtggatgatgatgatgatgaggctatagacacggatcccgtgggtctggacaccctcgatcacgcccacttcaagtgtccggattgcgacaaggcatttgatacggcggacagcctaagtctacattttcgcacgcatgcggcgaataataatctactgaatttgccgttgcctcctgcaccacctatgtcgcatcactaccatcacgatgcactgcatcatctcggcccaccgaatcccgccacacaaatgggaatggctgcaatggctcacatgttggcaccgccgccgcctccaccgccaacgccaagtgaaggacgttacactatgctgcaccacacggcggcacaaagactacattattagagtatagctacgaagatttatcttaatcataattattgttttagattatgttttgatattgaacacttttatttagtttgtctatataaaatggaatattttgtcatgtttgcttttatatctttacaataaatacatgtagaaatttggcaagcacagcttctattaagattattacttaaatgcaagaactaaaatcactaaaaactccccgcgcgtacttgtcgcatacttgtcgtcgatataaaaatgtcattgttgtataaactaagcttgatttgtgttttctgtaggtaaaaattgtagtatctcaatattggtttgtttggtattggtatgcatcgttggtatcggcttaatccagtttgaatatgtatataaaaagctcaaaaatcaatcagagaactatcataaaatattgcttttgacaacggcccggattgattgatcccagagatcgaaacctctctacttgagcttggctttcagccactcctcggtgagttcgtctagttcgcgtatctcgtagacgcgtgtgagatctacttcgcgctgaagagcgctcttcgtgcaggcgtacatcatctgcaattcgatctgaaacagagagttatgaattatagaatatatttgagcattgctaaactcccacctggctatccctgggtgtgtagaatatgaagcacattgggtacgaaatgcgctgatcgtcatggaccattttatacgtatagatgacatatcggggctggtgtcctggcaatgtatcctgcagctcgtccaccgaaatatcgtcgatgaactcgtccagcaccaccgtttgcttctcccggtcgactttcactgcaagggacaatggagtggtcataaaaactacacacatctgttaccatgacaatcaaggcttacatatcaaagccgcattatttttgctcttgctgaatcgaaacttcttcaattcctccagaacttcgttgcttatgtcgcatatctggttatcactctgtatgaaatcgatataattgattaatgaattggaatcaccaaagttatctgctaacaacaatcgtcgattgaaaaacaaaaacaaaaacacgcccacactctattagtcatgttttcattttggtaattgatttccgaccctatatacacttcctaccataactttagctatgaagttagggatgcgatctgtaaagtgtgctgcactaccgaatttttggcagttaattgtaggaatgcaatatcacttgtccttaaggaatcgtttaaatactgtcgtttattctgagttttgttttgttgttcctgcagtgagaccgttcactgaacgccaaataatattctgtgctgcatcaaaaatatgtgaagtgttgttaaacgacgtttctgataaattaaaaaataataacaatatttgctaaaggtttttttttcattaagcttttttctttacggcaacattggtattatttatggaatttattaaaaataattgaaatgtattttttagattgaaataggaacgctcttttttaaaaatgttttgtagatatacttaaaacttatcattattttatagtaggtaaaaatcgttcgtatacgatatttggatcatgtttgtcctctctagtggctgatggactgtcaaaaaagtaccgttactttagggttgttacagagagcactaacttataaatagttaatactataatctatgtgcttaatgtcgtagttacaatgagcttgaatttatatgagagcaacatccttaattcctgctggaaagcgggagggcgcaaaccgaggaaatcggcatttggccaacttaatcgaaatgagatcgctgatgtggatgtagtcgcctgctggtaattaaatattaaatataatgaatttttttaacatttcattatattcaattgttttcaacatttatctacatttcagcaagcaaatcaccgaattaattgaggaaaatgcattaagaaaacgccagaaacgatccaatgttttggccgcaagaaaccggcaaaatgttattttcaaggacatttcccgcttggtttttggagttgcggatatttttagatgccaagtggatctacttttg

SEQ ID NO: 12428 - DNA, 706 bp, DROSOPHILA
atgactaatagaagtgataaccagatatgcgacataagcaacgaagttctggaggaattgaagaagtttcgattcagcaagagcaaaaataatgcggctttgatattgaaagtcgaccgggagaagcaaacggtggtgctggacgagttcatcgacgatatttcggtggacgagctgcaggatacattgccaggacaccagccccgatatgtcatctatacgtataaaatggtccatgacgatcagcgcatttcgtacccaatgtgcttcatattctacacacccagggatagccagatcgaattgcagatgatgtacgcctgcacgaagagcgctcttcagcgcgaagtagatctcacacgcgtctacgagatacgcgaactagacgaactcaccgaggagtggctgaaagccaagctcaagtagagaggtttcgatctctgggatcaatcaatccgggccgttgtcaaaagcaatattttatgatagttctctgattgatttttgagctttttatatacatattcaaactggattaagccgataccaacgatgcataccaataccaaacaaaccaatattgagatactacaatttttacctacagaaaacacaaatcaagcttagtttatacaacaatgacatttttatatcgacgacaagtatgcgacaagtacgcgcggggagtttttagtgattttagttc

SEQ ID NO: 12429 - protein, 141 aa, DROSOPHILA
MTNRSDNQICDISNEVLEELKKFRFSKSKNNAALILKVDREKQTVVLDEFIDDISVDELQDTLPGHQPRYVIYTYKMVHDDQRISYPMCFIFYTPRDSQIELQMMYACTKSALQREVDLTRVYEIRELDELTEEWLKAKLK

SEQ ID NO: 12430 - DNA, 5518 bp, DROSOPHILA
agcgactggaaggactgcaattgctcgaggaactcctccttcttggtgctctgctggtaaagagccatcaggcggacaatcagcattatgctacccgtctcgggcggatagtgcatctttttccaagtctcattcagtacattgatgggatgtgtgtcgtcggagtggaaggcgcccatgcaagccacgcggtggtagcgcttctgcgcctccattaggcagtcctcggagcagtagcgcaccttgcaccgtgggcactgggtgaactgggccacccactgggcggtgggatcgtgttgaagcagcggcacctccactttgggatcactggccaggcggcgcacattctctaacaccgtctccagtggccgcatgcagtggtcacacgccgcatagccgtaggccacgttccacgagaactgccgggacacgaacggttcctcctcgaagatcacctcgtccttcgcgaaatttttggtcgcgatcatcgcacgtccctgatgaattttttaatgtattcagggatagtatggtgacgggacttgacctaccttgccgggcaactcccgaatttcaaaattattcattgtttactcggctttttggctttgtttttgccaatccaattgcacgtgtagtgcagtgtggccgcaccctcgagcacgaatataaaatactatggtatttaagccgttaaggtttcctataaaatatttaaagtttaatttcataaacttttccttccgggctaaaatcaagtaatgggtcatgaagatgcaacttattcaattagtttcttcatagatctaaaaaaactatagtcagtgcctgattagttgggttgatattttttagatgcaattcaaagattcgtgtagctcaaacaacagggtgcaccttgtgtatttataaaaccaattctaaccgaaattgactgaacatggttattgcgatgtcagtatatcgatgtcttgagctatcgatagcacaaggtgcaattgtccgaaccaaacgatatacaaatcctgagaagagaggagaaaagaaagacttatttggtcctcgcaaattgccacatccgattccccggcctactagaaatggcagacgaagcgggcagccaagccgatggcaagcggcagtttatctgcggcgtgatcgagggattctacggccggccgtggaccacggagcagcgcaaggacctgttccgcaagctgaaatccatgggcatggggtccagtccttcgtacatgtacgcaccaaaggacgactacaagcaccgcgcctactggcgagagctatacaccgttgaggaggcggatcacctttccagtaaataacctttgaactcagctagtccttttgttaagtgccttccatgcaggtctcattgcagcggccaaggaggcgggcatcaccttttactacgcgttatcgcccggactggacatgacctacagcagccccaaggagatcgcaacgttgaagcgcaagctggaccaggttgcgcagtttgggtgtgaggcctacgccctgctctttgacgacatcgagtcggagctctcaaaggcggacaaggaggtctttcagacgtttgctaacgcgcacgtgtcggtgaccaacgagatatacacgcatctgggcagccccaggtttctcttctgccccacccagtactgtgcctcgcgagcggtgccaacggtccaggaatcggagtacctcaataccctgggctccaagctgaacaacgagatcgatattttgtggacgggggataaggttatctccaagaacatatcccttgagtcgattcaagagattaccgaggtgctgcgccgtccgccgtgcatctgggacaatcttcatgccaacgactacgaccagaagcgaatcttcatgggaccgtacagcggtcgatcgccggagcttattccccacctgcgtggtgttatgaccaatcccaactgcgaattctatggcaattttgttgccatccattcgctggccttctggtcgcgctgcagcctggactcgaaagtgaacagctcgctaagtgcagacataaaactggagactgaaaacgatgatgacctaccggcggagtttctctctaagaacgtttaccacccacgcttggctctcaagtgagtaaaactaggtaaataacgcaagaaaagctaacgaatcatttaaatcatctttaagaaacgctataacggagtggctaccggagttcttcatgaaaaaggaggcctggggaccgatcaccaagccccagcctcaagtccaaatggtgatgcccattattcccatcataccctccataaatacctgcatgagtctcaccaccaccacaaccacatcgacgagctccaggacggttccacccacggtcaacaccactcaacttcaagctctggctgacgtttggtaacaagagtttaattttatatataaacagctgtatatcaatatttatattttcattacagcgttgttacctcttccctgactcctatctcaaatccagtaatgaactccctggtctcacccacaaaagtgatcacgaacgatgacatcatcaatcccattccgaccacagcggccagcaacattgaactacccaagaaaataccgatctccgttgtcccagtgcccattatggagacaaagagtgtggaggcttccgtggaactggctttggacaatgcggttttcgatgacaatgaaattgagcccaatagtgattccgtgaaggagcggctagagctggaggtgaacctagaggggaagcaggaaccggtggccaatcttagtgtggacacaatgctggacgatgacagtcttagtcccctaagtggcgtagtcaatgagccaatggagtgcagcagcagtatcacatcacaggtctctccaagggaggaggaggccattaaagtggtggccgacgatgttctcatggagtccgttaacgatgtgcatgtaagtatgcatctgtatgtatccggcatctcattacctcttcgtttcttgcttttcctcttttagagtatgcatgtggagagtgggacttcgtcgccgatctcaaatgcggaaatgcgcgaggaaactgaagctcagtctgataggactaacgataataagtatgtcttttgaattctccattttggagtgagagtttgtaaagatttcccatctcagtaccatcgaaggcgaaggaataaccgttgacgatttggttcttctctgcgacctgttctatctgcccttcgaacatggcagtcgcggccacaagctgctcgtggaattcaactggctgaagggcaacgctaatgtgatactgcaggaccggtctgccggcggcggaggcgatgcaattaaatcagacaagccggaggttagcgagtggcaccagcgtcgcgagcagttcgaccaactctgcagtgctgtagtagagctcctaattaagatcgccaattgcccgaacaaggagatttgccacgagctgtactcgtatatgtgggacatctccggcgccctatctctgctcaattgctatgttaagtggctggctctcggccatttcccgcaaaatacgtcttcctacacagagggcagctacacatgtaagtgaaccaaccgatcgatattttagcgttgccctaatatacttaaaacgtgtcagggtttagcaagggctggaaggaggcgttcatgtctggtgatcaggagccgtgggtctttagaggcggcctcattgccgacctgcaacgcctgatgcctgtggactcgggcaacgacctgttcgtgtacaagcttccggaacagcccacggccaactactatctcttgagaccttactgcaattcggacgaacagcaagtcaacgatttgtgcactcgcctgtatttgcagtggcggggagagctggacggaggcaggcacattccgttcccgctgccggcgaatgtgccaaacattgtggcggatgggctgatcggtggatatctcaccctcagtccgcaactgtgcattgtggcctacgacgagagtaaccgtatcattggatattcatgcgccgccctggatgtcaacatatttcgacgcaacctggagctgtgctggtacacggaactgcgtgagaagtactctagagatatttgtccactggagggtggcgaggaggttgtacagctcgtcacctcccttgtggagagttatcatgacagcagcggtaacggggctctggaccagtgtcccgtagaggtgagcggctccttccctgccgtgttgatctccggaactttgcgcgaagcggaggagcgcgactcgggaataaccaagcggatgctcaccgtacttctggccgccctgcgtgcgaacggctgctttggtgctcacgttcgcgttccgcaacaagatgtcgcccaggtgaacttttattccagaatcggtttcgtggatgtctatcgcgaggaggccaccaagtgtatttacatgggtcgccgtttctagcgtagctggttgccaccttcactgcctccacttttaatgttccttcatctttggtattccggctagcggtgctagctactcacgtcatgtcctcgtcctttttgtattcccttgaggtataaagtttgtataactgaccaacccttccagcatttatcgtaagcattgttttcttactgagaaaaacaataaaaataccaatttaataaaacttttgctagcttttgttcaggtcgtagaaccagacggtgtttactccgtcctctataatcttcacgtgctctaggctgggtagtggaaagcggcaggcgataatcttggtgttgtgcggacactcagcaatgagtttgtgttctagatcttgcatcatctgctcaaccccaaaaatgaccacgaagttgtagtcctttatatcgaacttccagagatctcgccgaaaaaatctcgtccgtttggaaacgctgtgacgcagcgcggccaggcgcgagtagtagaccagccatgggtttagctccacgccatctgcttttagagcaccacaatgctgtgccgcagctggaaagaattacataagttatctgcaatgtttttaaatggactaggtgaagcgtacttacccactacaatccgtccgtcgccggatccaatgtccagcagttttccggccgaattcttgggcaggaagctgagaacgttctgtatttgctcggtcgtcgctggcacataaggcaagcaaatcctccggaatgcaggcgccacaaaggaggcgcacacaatcgacagaccgatacctactccgcccgttgctgctatcaggatcttgccgcccgtggacatgccacttttcggcgtcttggcaagcggattcggagcagattcgttgaggagttccatttctattatcagaaattcatgtttacctcaattgcttagtattcagcgattatttatcgatagctggtagccctgcagggggcgctgttacaacggcgttttgcac

SEQ ID NO: 12431 - DNA, 3160 bp, DROSOPHILA
gtccgaaccaaacgatatacaaatcctgagaagagaggagaaaagaaagacttatttggtcctcgcaaattgccacatccgattccccggcctactagaaatggcagacgaagcgggcagccaagccgatggcaagcggcagtttatctgcggcgtgatcgagggattctacggccggccgtggaccacggagcagcgcaaggacctgttccgcaagctgaaatccatgggcatggggtccagtccttcgtacatgtacgcaccaaaggacgactacaagcaccgcgcctactggcgagagctatacaccgttgaggaggcggatcacctttccagtctcattgcagcggccaaggaggcgggcatcaccttttactacgcgttatcgcccggactggacatgacctacagcagccccaaggagatcgcaacgttgaagcgcaagctggaccaggttgcgcagtttgggtgtgaggcctacgccctgctctttgacgacatcgagtcggagctctcaaaggcggacaaggaggtctttcagacgtttgctaacgcgcacgtgtcggtgaccaacgagatatacacgcatctgggcagccccaggtttctcttctgccccacccagtactgtgcctcgcgagcggtgccaacggtccaggaatcggagtacctcaataccctgggctccaagctgaacaacgagatcgatattttgtggacgggggataaggttatctccaagaacatatcccttgagtcgattcaagagattaccgaggtgctgcgccgtccgccgtgcatctgggacaatcttcatgccaacgactacgaccagaagcgaatcttcatgggaccgtacagcggtcgatcgccggagcttattccccacctgcgtggtgttatgaccaatcccaactgcgaattctatggcaattttgttgccatccattcgctggccttctggtcgcgctgcagcctggactcgaaagtgaacagctcgctaagtgcagacataaaactggagactgaaaacgatgatgacctaccggcggagtttctctctaagaacgtttaccacccacgcttggctctcaaaaacgctataacggagtggctaccggagttcttcatgaaaaaggaggcctggggaccgatcaccaagccccagcctcaagtccaaatggtgatgcccattattcccatcataccctccataaatacctgcatgagtctcaccaccaccacaaccacatcgacgagctccaggacggttccacccacggtcaacaccactcaacttcaagctctggctgacgtttgcgttgttacctcttccctgactcctatctcaaatccagtaatgaactccctggtctcacccacaaaagtgatcacgaacgatgacatcatcaatcccattccgaccacagcggccagcaacattgaactacccaagaaaataccgatctccgttgtcccagtgcccattatggagacaaagagtgtggaggcttccgtggaactggctttggacaatgcggttttcgatgacaatgaaattgagcccaatagtgattccgtgaaggagcggctagagctggaggtgaacctagaggggaagcaggaaccggtggccaatcttagtgtggacacaatgctggacgatgacagtcttagtcccctaagtggcgtagtcaatgagccaatggagtgcagcagcagtatcacatcacaggtctctccaagggaggaggaggccattaaagtggtggccgacgatgttctcatggagtccgttaacgatgtgcatagtatgcatgtggagagtgggacttcgtcgccgatctcaaatgcggaaatgcgcgaggaaactgaagctcagtctgataggactaacgataataataccatcgaaggcgaaggaataaccgttgacgatttggttcttctctgcgacctgttctatctgcccttcgaacatggcagtcgcggccacaagctgctcgtggaattcaactggctgaagggcaacgctaatgtgatactgcaggaccggtctgccggcggcggaggcgatgcaattaaatcagacaagccggaggttagcgagtggcaccagcgtcgcgagcagttcgaccaactctgcagtgctgtagtagagctcctaattaagatcgccaattgcccgaacaaggagatttgccacgagctgtactcgtatatgtgggacatctccggcgccctatctctgctcaattgctatgttaagtggctggctctcggccatttcccgcaaaatacgtcttcctacacagagggcagctacacatggtttagcaagggctggaaggaggcgttcatgtctggtgatcaggagccgtgggtctttagaggcggcctcattgccgacctgcaacgcctgatgcctgtggactcgggcaacgacctgttcgtgtacaagcttccggaacagcccacggccaactactatctcttgagaccttactgcaattcggacgaacagcaagtcaacgatttgtgcactcgcctgtatttgcagtggcggggagagctggacggaggcaggcacattccgttcccgctgccggcgaatgtgccaaacattgtggcggatgggctgatcggtggatatctcaccctcagtccgcaactgtgcattgtggcctacgacgagagtaaccgtatcattggatattcatgcgccgccctggatgtcaacatatttcgacgcaacctggagctgtgctggtacacggaactgcgtgagaagtactctagagatatttgtccactggagggtggcgaggaggttgtacagctcgtcacctcccttgtggagagttatcatgacagcagcggtaacggggctctggaccagtgtcccgtagaggtgagcggctccttccctgccgtgttgatctccggaactttgcgcgaagcggaggagcgcgactcgggaataaccaagcggatgctcaccgtacttctggccgccctgcgtgcgaacggctgctttggtgctcacgttcgcgttccgcaacaagatgtcgcccaggtgaacttttattccagaatcggtttcgtggatgtctatcgcgaggaggccaccaagtgtatttacatgggtcgccgtttctag

SEQ ID NO: 12432 - protein, 1019 aa, DROSOPHILA
MADEAGSQADGKRQFICGVIEGFYGRPWTTEQRKDLFRKLKSMGMGSSPSYMYAPKDDYKHRAYWRELYTVEEADHLSSLIAAAKEAGITFYYALSPGLDMTYSSPKEIATLKRKLDQVAQFGCEAYALLFDDIESELSKADKEVFQTFANAHVSVTNEIYTHLGSPRFLFCPTQYCASRAVPTVQESEYLNTLGSKLNNEIDILWTGDKVISKNISLESIQEITEVLRRPPCIWDNLHANDYDQKRIFMGPYSGRSPELIPHLRGVMTNPNCEFYGNFVAIHSLAFWSRCSLDSKVNSSLSADIKLETENDDDLPAEFLSKNVYHPRLALKNAITEWLPEFFMKKEAWGPITKPQPQVQMVMPIIPIIPSINTCMSLTTTTTTSTSSRTVPPTVNTTQLQALADVCVVTSSLTPISNPVMNSLVSPTKVITNDDIINPIPTTAASNIELPKKIPISVVPVPIMETKSVEASVELALDNAVFDDNEIEPNSDSVKERLELEVNLEGKQEPVANLSVDTMLDDDSLSPLSGVVNEPMECSSSITSQVSPREEEAIKVVADDVLMESVNDVHSMHVESGTSSPISNAEMREETEAQSDRTNDNNTIEGEGITVDDLVLLCDLFYLPFEHGSRGHKLLVEFNWLKGNANVILQDRSAGGGGDAIKSDKPEVSEWHQRREQFDQLCSAVVELLIKIANCPNKEICHELYSYMWDISGALSLLNCYVKWLALGHFPQNTSSYTEGSYTWFSKGWKEAFMSGDQEPWVFRGGLIADLQRLMPVDSGNDLFVYKLPEQPTANYYLLRPYCNSDEQQVNDLCTRLYLQWRGELDGGRHIPFPLPANVPNIVADGLIGGYLTLSPQLCIVAYDESNRIIGYSCAALDVNIFRRNLELCWYTELREKYSRDICPLEGGEEVVQLVTSLVESYHDSSGNGALDQCPVEVSGSFPAVLISGTLREAEERDSGITKRMLTVLLAALRANGCFGAHVRVPQQDVAQVNFYSRIGFVDVYREEATKCIYMGRRF

SEQ ID NO: 12433 - DNA, 6138 bp, DROSOPHILA
tcttaaatcgtttagataattgttaaattcaattgtagaaaatgtcccaattgaacatttttaaattcgaaataaacttttcccatgctacaacccaaaataaagcatttttttccttcaaattaagtcagaattaatatggactatttaaaaaagaacatttttttttttagaaaaaagagatttgttccgccactgggatttttatccactatagaaattccaacccatttagaaaatcgataaggtttctcttaatttttagcactttattactgatacactgcattccttttagcatttttcagcgaacatttgaaattaaaacagaacagaatgcacaagagtatatagcttagttgccaatttctgggactaaactaatttagtggagctttattagtgttgtttttgatattcatttacgagtttactacgggaaaacttccattgagatgcgactgtgattttgttcttttacttttctcttgctggcaattaaacgtttaaatattcggttttttctattcatttgctcttttaaaattaacatacatctattattaccttgtaaatatctaatatttataatatttaactttattcccttcctcattccacattcaatcttctgtttgtttattttttactcacaatttgttgtgagcttgtctctagttaataagccgagaaaccttcctatcttcaatcacactgggcccgagcatttgtggtgaacagcaggagttgggatgcgatagagacatcaaaatcaaaatgggtttcaaggatatattttgggaacagcagttaaacatttgtatcaggagctccgctcaagtgtgccttaaaattactcgcccaaataatgcattcttttattacattagccaaaaactttttgtaatcgtgtaaatttaaaatggttttccactttcgtttgtttttgtactgctgccagtgtgtgaaatttcaatatttcacgcttttacaaatttttaattttgctttttgtttattatttcttgtgccttaaggttaaatacatcttttcttgttaaacgtcaaatcaaaatgcactacagtttaggtgtttcttttttatcggatttttacaagtttctctttgcttaatttacacacttcgcagagctgtcgtttgcacatactttcaggaaaatagaaaatgatgtgcatgcgtgcgcacggttggacaaataaaaagttatatatacagatgaatatatataagaatggatagtcgactgccgctgacgttaggattaaggtgaactgcagatagcttttaggataggagtacaaatcatatacttataggagacaactacttggagttacatttcgcgaaccatgcccaacttctttctgcatcggcgtacaacgtcctgactttgctatcgcctgttttgtgttgtatgtgtacagagcctggacccttcttcgactttaaagtggacttgtcaacgcgtcgttttatgtcgcaattaactaagaattgggaaataaattgagtttcagtaaaacagaaattataaatatgcttgtaacttaccgctttcactgtcgccttgatgaagtctttcttgtctgttaggtcaaagtctggatattttgcataaacttgtttgcacacggttttcatcgtaatctcctcaagattggctttatccagaatctctttgacatatccgcgtatttgttcatcctgcaaatagacgttcgatgaggataacacattacgattgcgattactggctaccaaccgttgggaatgcctgtttgccctttttggttagtggctcatcctcgtcggattcatctttgtcatcgacatcatcatcttcctcggacgattccttctttgattttttcgatcgactatcggctgcggattacattaattgttatttcatacggttttcatattacttttaacataccctttccagctggttttgacttgttgttagctttgctatttttcgcaggcgtaatgggcttcttgctctttttgggacgttcctcctgaaaaattggcatatacttgataaaacaccaaatgctcgatattaaattaaatttacatacttcgctttgatcgctggcaaaatcggagacatcctcctcctcttcatcctcggatacctcctcatcttcgctatctgaatctttacgcttgcgggaagctgcacctcgtcctctaccccttcgtccagctgacgcaggagctgccggtcgtccacgtttacccacggaaccacgtttacgttttgggacctggggatttagttatttttttttatataggtcacttggtcatacgtttataatacatacatcactatcggcatcggaaacttccgattcctcttcttcctcggaatcagagtttcttctgcgacttttgcgcgcaggacgaccgcgtccaccgcggcttgggactttgcgacctgctgcaccagcaccaccaccacgaccaccgtcagagtcggaattggcagaaggattgtactataagcaaaacgacaaatgagccaaattgtgcgcatggtttctgggcgaaggatacttacatctgagcccgactcggagtcatcatttcgtctccttttgggaactgcaactttctgctcgctatcgtcagagctggagaaatctacataggcggacatttctgaaatttaaaacgtaaacatgtttagatatatacaatacttttgatttagatgagcatactctttcctgccgtcgcgcgccttggacgtccggtggaattgcgtgcagagcctctgccagcgccgccgctagactttccgctcttgcgcttcttgtcctcttcactgggcgggtcctcctcatcttcatccagatcctcgtcctcggcatcttcctcctcctcctcatcaccctgctccaagcaaagcgactcgtccggttccattaggaatttgagcactcgaaggacagtctcgttcttgctgcccttgcgatcgagggtaaggatctcgcagatgctgcgcaggcccttattatccacctttttgatggcctccagctttttgttgtactccgctgaatccttggcaaactcgaaaccggcaaaggatcgcaagttcttcttgaccacattgttcttgccttgggcgccaaagcagatctataaatgaggtgtgaaattagtttttgacaagttgttggcaaaaatgtttctcagctaacttactgcatgcaatgtttgcagaccatctacacgagtcttgttgatattctcattaatgcgatcaatctcggcgagagcgacgacattctcatcatcctcggccacctcgttgttcttgtccaggccatcgttctcgtctccatcgtcatcttcggcatcctcatcatcctcgtcctcttcgtcgtcgtcctcctccttagccaccttgccattcttggccttgggctcaggtttcttgggcttatcggctcccgattttggcttggactcatcagtggcatcctttatcttgtcctctgcatctaatttcggtttcttcttctcgctctcttcatcgctagctttctcatcagcctcatcttctggctcatcgccgtcttccgagttctcctcgtccttttcggagttgtcctcctttttagcatccttattgttggacttctttattaccggcgagggggatttctcctttttgtccgctgcagctataatattaattgtaattattattatttgtaagagttcaaatgtaataaaataaaaaagatgttaaaataataaaatgtcttcaaccttgggacgtccaatgctaatttcgtttgggagcgcaagggaacatgaatattgaagttttgctgtacctcggcattaaactacgcagaacccatttaaaggatttagcatgaacaaaagccaaggaaggaaggaggaaggaaagttaagagaactcaatcatcaaactctaataatggttttgtaaacatcgacacggagggggatcgaaccacatgccaacatcagcatagcgcggtaaacaagagagacacaaggagcgacgctttagaccgcagcgccacatcggaactctcccaataagtagaccaaagcgaacaagaggacgagagaggaaaagaactttcccgaagagagagcgaaatagttcggcgcgttttttaaaatgcgcggtaaattcactttgatttttgtttttctctctcgttcttcacacacacagttagttagattgtgtgttcgcctggctttgccttttaattttttatttacctgcatccgattcggtatttgaaacagccgttgagtctcctttggcttttttatcagcgacgtcatcagtggcggcagaggcagaggcgtcgacagcggcgggggattcggctgcatctttggagcccctttccggctgtgcccccacggctttcgccacccccgcagtaaccgatgcattttccacatcgcttaccttatcggcggcattttctttggctgccgtttctgccgctttgttagcatccttttcgtgcggcgatggcatggaaagatacaaagtcagaattggattacacttgctaattttttggcggccaatacgatgggtttcggtgcgcctatttcttttttaatcgaatcgcaatttgagtgtgagttaggtcttcggcgattgcgagtttgtgtatgcgtgtcttcttcgccgagcgagcaagcgagtgagagagggagcaagaaatgagagaggcgatagaaaaaacaacattgcaaatctatgaggcgcacacacacacactagtcatcccgctcgcacccactcgcatcggcatctcgagccacaacgacgccatgtttatacacacaaccgaacggcgggagagaaccgatagtcgggcagttagcctcgcggataatttgttgcgctctatttacacacaaaatacgttagcaatcccgccgttttcatttcacctcgctggcacacactttccggcgctttttcccacatttttcacctttttacataccatatttctaatggcttttctgtttttccgtcagccgacacacattcaatctgctcactagaagaggtgtcacaatcgatagtattgcagccgacaagcactaaaaaatacccggcaaaataatgggtgcccttttcgttgctcacttttggcgggctttttacaagggaattaagttggtatacatgttcagttgttaataccattttatgattctttattttaaaatgcatttaaattctttcttgatagtgtccagtcaactctatcgctattatcctaagctaaccacattgcttacctgtaattatattataattcatatgttagtctgatctgaatacaatatttatataccccaataaaaatattcaaaagaaaactatttaattctggtatattttgattaacgataatattattctaatgtattagtaacactgatctaaataaaaaaatatttatatacgtatattataatagtcgaaagaaatactttctttttaaacaaaatgactggtattaaccagtcctatatatttctgaaatattttgctttttaatgaatcggactaaattatatatatatatgcataaaaaacatatttgaaggagacacttgctttttaaatgatttgttaaccaaaaccatctaattttggaatattttgcagaccggtagtcatattttaattcatcagtcacgctgatctaaatgttaatatttatatacgttcataaaaatattcgaaagaaaatgaaataaatatgtaaaaactaacaatttagcgaataaaaaattttttgacgttctggtatttatgtattgaaaaggcggtcactcttgttggcaaaaaagcgcgcggcgtgttttcacaaacaaaacaatttgataaacccctggctatacttaatataatcatatatttaattaattacaagtgttaagttaaaataaaatcgccatgggaattttgggcttatctaagctcattgccgatctggcgccacaggcgattcgcgaaagtgagatgaagcattttttcggtgagtccggttctatttgctaaatataaacaaaac

SEQ ID NO: 12434 - DNA, 2560 bp, DROSOPHILA
actatcgattgtgacacctcttctagtgagcagattgaatgtgtgtcggctgacggaaaaacagaaaagccattagaaatatggatgctaacaaagcggcagaaacggcagccaaagaaaatgccgccgataaggtaagcgatgtggaaaatgcatcggttactgcgggggtggcgaaagccgtgggggcacagccggaaaggggctccaaagatgcagccgaatcccccgccgctgtcgacgcctctgcctctgccgccactgatgacgtcgctgataaaaaagccaaaggagactcaacggctgtttcaaataccgaatcggatgcagcggacaaaaaggagaaatccccctcgccggtaataaagaagtccaacaataaggatgctaaaaaggaggacaactccgaaaaggacgaggagaactcggaagacggcgatgagccagaagatgaggctgatgagaaagctagcgatgaagagagcgagaagaagaaaccgaaattagatgcagaggacaagataaaggatgccactgatgagtccaagccaaaatcgggagccgataagcccaagaaacctgagcccaaggccaagaatggcaaggtggctaaggaggaggacgacgacgaagaggacgaggatgatgaggatgccgaagatgacgatggagacgagaacgatggcctggacaagaacaacgaggtggccgaggatgatgagaatgtcgtcgctctcgccgagattgatcgcattaatgagaatatcaacaagactcgtgtagatggtctgcaaacattgcatgcaatctgctttggcgcccaaggcaagaacaatgtggtcaagaagaacttgcgatcctttgccggtttcgagtttgccaaggattcagcggagtacaacaaaaagctggaggccatcaaaaaggtggataataagggcctgcgcagcatctgcgagatccttaccctcgatcgcaagggcagcaagaacgagactgtccttcgagtgctcaaattcctaatggaaccggacgagtcgctttgcttggagcagggtgatgaggaggaggaggaagatgccgaggacgaggatctggatgaagatgaggaggacccgcccagtgaagaggacaagaagcgcaagagcggaaagtctagcggcggcgctggcagaggctctgcacgcaattccaccggacgtccaaggcgcgcgacggcaggaaagaaaatgtccgcctatgtagatttctccagctctgacgatagcgagcagaaagttgcagttcccaaaaggagacgaaatgatgactccgagtcgggctcagattacaatccttctgccaattccgactctgacggtggtcgtggtggtggtgctggtgcagcaggtcgcaaagtcccaagccgcggtggacgcggtcgtcctgcgcgcaaaagtcgcagaagaaactctgattccgaggaagaagaggaatcggaagtttccgatgccgatagtgatgtcccaaaacgtaaacgtggttccgtgggtaaacgtggacgaccggcagctcctgcgtcagctggacgaaggggtagaggacgaggtgcagcttcccgcaagcgtaaagattcagatagcgaagatgaggaggtatccgaggatgaagaggaggaggatgtctccgattttgccagcgatcaaagcgaagaggaacgtcccaaaaagagcaagaagcccattacgcctgcgaaaaatagcaaagctaacaacaagtcaaaaccagctggaaaggccgatagtcgatcgaaaaaatcaaagaaggaatcgtccgaggaagatgatgatgtcgatgacaaagatgaatccgacgaggatgagccactaaccaaaaagggcaaacaggcattcccaacggatgaacaaatacgcggatatgtcaaagagattctggataaagccaatcttgaggagattacgatgaaaaccgtgtgcaaacaagtttatgcaaaatatccagactttgacctaacagacaagaaagacttcatcaaggcgacagtgaaagcgttaattgcgacataaaacgacgcgttgacaagtccactttaaagtcgaagaagggtccaggctctgtacacatacaacacaaaacaggcgatagcaaagtcaggacgttgtacgccgatgcagaaagaagttgggcatggttcgcgaaatgtaactccaagtagttgtctcctataagtatatgatttgtactcctatcctaaaagctatctgcagttcaccttaatcctaacgtcagcggcagtcgactatccattcttatatatattcatctgtatatataactttttatttgtccaaccgtgcgcacgcatgcacatcattttctattttcctgaaagtatgtgcaaacgacagctctgcgaagtgtgtaaattaagcaaagagaaacttgtaaaaatccgataaaaaagaaacacctaaactgtagtgcattttgatttgacgtttaacaagaaaagatgtatttaaccttaaggcacaagaaataataaacaaaaagcaaaatt

SEQ ID NO: 12435 - protein, 661 aa, DROSOPHILA
MDANKAAETAAKENAADKVSDVENASVTAGVAKAVGAQPERGSKDAAESPAAVDASASAATDDVADKKAKGDSTAVSNTESDAADKKEKSPSPVIKKSNNKDAKKEDNSEKDEENSEDGDEPEDEADEKASDEESEKKKPKLDAEDKIKDATDESKPKSGADKPKKPEPKAKNGKVAKEEDDDEEDEDDEDAEDDDGDENDGLDKNNEVAEDDENVVALAEIDRINENINKTRVDGLQTLHAICFGAQGKNNVVKKNLRSFAGFEFAKDSAEYNKKLEAIKKVDNKGLRSICEILTLDRKGSKNETVLRVLKFLMEPDESLCLEQGDEEEEEDAEDEDLDEDEEDPPSEEDKKRKSGKSSGGAGRGSARNSTGRPRRATAGKKMSAYVDFSSSDDSEQKVAVPKRRRNDDSESGSDYNPSANSDSDGGRGGGAGAAGRKVPSRGGRGRPARKSRRRNSDSEEEEESEVSDADSDVPKRKRGSVGKRGRPAAPASAGRRGRGRGAASRKRKDSDSEDEEVSEDEEEEDVSDFASDQSEEERPKKSKKPITPAKNSKANNKSKPAGKADSRSKKSKKESSEEDDDVDDKDESDEDEPLTKKGKQAFPTDEQIRGYVKEILDKANLEEITMKTVCKQVYAKYPDFDLTDKKDFIKATVKALIAT

SEQ ID NO: 12436 - DNA, 21214 bp, DROSOPHILA
tcaaacaaatttagacattgtgttgcatcattcactttatgtggatgtagacctcagcaaaatttcagacaagtaaattaccaattaaattcacttttaatgattgtgtgtatttgtagcaataatttgcaatgggtatatatgcattgctatttgaaatttgttaaacaaagtttagtttaattataaagaatatctatgtttttttctttctacttaaagaacccacatttttccccatatccataccatttttaaattcaatcattataaactgccaaacgaaactacaatatataaaatgcaaatatttagcatttatcaatgctaaaccgaatgtaagatttacggtacgtctttaattgaccaatgttcgaaacaattaataactttttatagaaacaagcagagcgagcgcacgttaatgacaagatgcactcagaaattgtgtcagattttaataataggcgacaccggcgctgacacttgctcagataaattgttaacaggttctcgggccgggacagactcgtgatttctatggacgcaaattggttgcgcactaatagttctgacctcggccatgaaaggatttgcagttgccttgcacttacactcggattcccacacgaaatcataccgagaacccacaatgccacgtgcgcacattcaaagtggcaaatcataatttcgttttttgggtcgtccgctaattggaccagacatacgatggagacgagaaaattgtgggccaaatgcatggaggaggggcacgacactagctactactttgaaggacgcggagtgctctaaaattgtgacaaggtgtgacgaaggcaaaggcaaaggcacaacgaacagatgtggtggtcaggtgcagctcggaaataaaaggctgacacaaatacattttctaattgcttggcaaggtgtgaaatattcaataatattgatgctgttgctctagttgttgttgttggtagttcacatatggtaagcactaattatcggtggacagactcacctccttctccttctcctcgttgtcgttgttggacgattcgttctgtcgctcgggatccagttcctgcagcagaacaaaagatattttcaatttagcatttagcattttcccattcttccgactaataagcaatttgactgagaatagttggcatagttggctcttcaaccaaggctcatttattctgacaaactgcctggcaattaggcacacaaatgatgtatctcccaaccatacttacatccatatcgatgtgcaccacgcccgttgatctgcgcttcggctttcgccgcctctgaataaccgtctgtgtgcgattgtcgttctccttatcattatctgttaaaaaatttaaaaaaaaaagcaagttagtaagcgaaaaatctgatactacaatattcttttgttcagagaataactaattcaatactcaagatataagacaaattcttaggctctagctttacaactactttagacataattacaacggaattagtacttctacttttcacttttgattatgatactcctataagaggtatgtgcatctcaacagtttttgggactggttccctagctttcctcgacttttccttacccttatcgtcatggtttgacgtggcatttggtgccgtagccgttgtatgattggcactggttgcagacactgaattggaggttgagttgctggtcgtggtcgctgcagtggtcgctcccgtggacgtggcgttcgtctcgaatttgcgagctgagggcgtgacataggcactgttgttggtgccctcgcttggcgcggaaactggacgacccacagagttgagcgactgattggaagcatttactgtaagtgaagtagttattactatttattcaaaagttgggcagaatatcattgataacttacgtgcgatgggaccgctgctgatgcgccgctggacaccagttgtggttgataagttggcggctgccattaccgccggagcactgggtatgatggtgctgttgttgggcggatatgtgccaccgctggttatgtcctccaacttgaactgcatggataaagaaccgtttactaattgctcaatgcagttatgaagataaaatgttaaatatcaatatatgttttgaaatgtttctctataattgtcgtatttgtttgggttgtgtgcgatgtatttgttcttacaagaagctatgccgtgtcttgaatcattcgaatgcagcgggagttagttcatactaaacatttagtagtaatcaacacaaatcagacaccctttaccaatttggatccatcagttagagcccgcaacccattacctaagctaagcacttctgcacttccctgaaccagtatagtgtagttaaattagttgaacaaaagtgtaaatgtgtttataaagtaacatgcaagtagttttttatattttataacatataattagtaacttttggtaagccagatgtaataaaaaaagtaattttaatacgttaagagacataaatgcaaatgcattggccaatttggtaagattattttaagcatgtaatatttatacaaaatgtttatcagccaaatgtatagtattggtatctaagtacatacatacgaaaactattagaaataaaaagtgaataatacatacgaatttacttaatgataaaattacttattttttttgagtacatcaagcacaagttacgcgcaaataaaatcatgaataagtacagatgcgtagatacaactaaatgcaaaagatcttaaaattaatcattcaggcgttgtaaaaaaaatatatatcataaaatatatatttaagtaagcgaatcacattattaattatatttccgtcgataagcaaagtttctaaaatcataaaatatgaataaggtaggtgttaaaagagcggcgaaatcgaaatgatataaaataatgatcttatattaaattgcgaaaattcaaaaatcattatggaaacgatggggttattttatgaattcgaccaaagcgattggtaattccacatttttttttaagaagaagttctccatacactaagtacatacactaatcaaaataaatccatgctacacacttagagattaacataagtatttacggcgcacacgaatttggcaaccgatcgaaaaaatagtcttgaagtatattgaggattaggctatcggattcgcttagagggcgtagttgggtagtgtgggcataccttggagccggcatcgaatttcaggcgccaagacggacgccgttccgctgccgaagttgaagacgaggttgcagctccacttgcaccacctgcacctacacctgcaccaccaccaactcctccgcctcccgcgctgctgtccgttgtgcgacgggcgtatagactgagtagcgagtcccgggcattgaagtccggatgtgaggacacgggcgaggcggtatcggacttggtttccgattcttggctgccggacagaccccgcttatcccgcaagcgcactggactctcgagggcagcgggcgtagtggccgccgaggatgatttgatagcttctgtgctgggagcagctggagccggaattagtggcagatccgtgggcctggcatgtggtggctcctcggacttatcctcgctggaacttttggcaactggctcagtcttttgtggcgatcttatgctctctacattctcggagctttcgggaagcctctcccgcctgggcattatcgtatagctggcactgaccaccgtctgatcctgatcaccctccggatcactattggcatcggcttcgccctcggtcgacagcgatcttcgcacgggagccgatagcgtaaaactagcagtggtatcgttttgactttggccagctggaggactggacaccacctcctcgatctctgtctcatcggtggccgttgttgtggtgggtattacagctggcggtggtgtggtgggcggtggcggtggttgcagctcgtcctgctgctcattgctgccgaggatcgatggtgttggagctgatgtcgatgatgcagagcttgtttcgttctgttaataatattagttcggaacaaataaaaaacagttgtcctaaggcgatggacgcgaatgtgtttcaaacaaaaatcaaataatttctcactatttacattacatatatgtgtaaatatcaattgcatactataatgattcttagggtgaccctatttgattacgcatgcaaatgggacatgcaaaatgataatcatcaacatattccatagacatacagtttattgctatataaatatagaacctagtgagtagtatagaactgaacatagatataacctatgagctgtaacataaataaaagttggaatggtaattacgctatggttcgctgatctggagctgctgatgatcggaaaacataattataaagctacgctatatagagtactcaaaatcgatgaggcggatgcgaggcgggtcaaagggcgtggcagggcggaggcgcagctgggcggaggcgcattacgcgttgcgcagaaactgaactcaacttgattggttaaatgcgatactgcgatcgatcacgaacgaataataataataataatcaaacgggagccaacgtacgctaaatgagcattgattgatcgatgagactggatctgattgaaatgatgacagcttggggctgctttctttgtgaaatgagaagactgaatgcagcaggtttcaattataacaaccaaggtgctaaagctactttcaaattttgtattaagaacgatactcaaggtgctagcaatccgttgaagtactcgatttactaagagcatatcaatgagttcattgaatttaaatactttttaagtatattcatagcatacttccttgggcattttggaacctgatgcattctgcttactaaatgatattttctaaactacaatcactattttagtacatgtttcactcactcacacacgaacaactaatggtattcttgaaatttataatgattgcgtttgagtgagtgaacagaatggaacacataaacaaaaagggatatccaaacaatggggacaccataaccataagcatatatttttttcggttttcgaactggtgtgtattgctcaatgtttgagtgggtgtgaactgcatgtggacatcgtgtgtggatggtctgtaatcccggctaggactacaggtatgagatctgacaatgattctatgaagagagcttcctcgagtgtgaatgtttcggtttggttgtttgttgtgatagcctggggtgagtgatctggttagagtgtccacttggacactgggctacttacgccgctgttgctgatcgtgttcgtggtggtggtgctaatattgttgttattgttgttgttggccatgcccatgttcttcttcttaaccagctcctcggcactcttgatctcgtccagggtgacaccttgggtagaccgtcgagtctccctcacacgcttagcatgtgccttccgctgcgtttcgctctcttcatcacgcaccggtggcacaaaggatctacacgtttggattgaatgaaaatatgtagttttagaatttgtttcaacactaactattaaacattgcatcaaattaaatagcggctagagcgtttggaaggcagtagcaacacttcgagccttaaaatctttttgaacacacacggttaatcaatcgatcggaaagttcaaagtcaatctcataaaatcatgctacaaaaaacttcgctttcttgggagcaaaaatcgagttagcagctttttagcggggttagctcaacacgtcaacgaaaacaaccattaaatcttgctcattacttgaagaagttcttgatcatattgctcgcggattgtttgggcggtggcttggagctctccgcatcgctgacactggccgtggacgagctgccattattgctcttttctgctattttcgctgtaacttggctaattgatcgacataggagttttttttttaaaaaaaagagttatatacatcatattttacacaagtaaacttacctgcgaattggtggggtctgtacagttgtcgatggagaattgatcgctgtggctgctgtgctcgttgcaatcgtaacggtcggtttcctgggggtaatcaaaaaaggaaaaactttagactttagggttcaaagttgaactgggaatacagccaagagtaggtagacgacattggtgcgtggcctaggaaaatatgttaaatagtttggtgcaatgagttattatactgaaggtgtagacgagaagaagctaagcaaaagcacagtcaggttaatagttacaacaaattaggcttgggttaacagctatgagagtaggcatggtttttaaactagatcagatttaaggacggacaaattcgaatacttattagctcctattgagtattaaatactacataattgtatctaacaagtaccttagaaatacattaaacaatttgaattatactagagtataaaggtggcctttaataccttttatttatatttctatttttatttatatcaactctacttgaaatacccatttacaactcattaaaaattcaaataaagcatagaaatatatatactatactagttccctttttacactaacaacttttacttaacgtaactaacaaatctgatctagtctgttctttttttgggatgtgttgaatgcaaaacaaacctgtaatacattgagttatctttgagtgaggccgatctttgtacgctatataattgatttgctgccgatgctgctgctgctgctgctggttgttgttgtgttgtgcttgtgttgttggtgttcgagtgggtgttgttgaatgtactggatgttgttgttgttgttgttgtgggggtgcttgttgtcgttgtggtgccagcagcatatcccaatagcagatcgcttttgttgttgttattgttgttattatgatagttattgctacttaggttattattgttattggatttgttggcagcagcggcattagcattcgcattcgccggcaaaatgggacaggaattggcctttatgcgtgcccgcagctcattgtacttttgatagaacctgtcattcggattttcgattttggccgttttcgagcgaggagcgtgcgtttgcgaacgtttttcaaaacgttcgggcgggcgggcgtacaggtgggcgggcgggtggtcgtagcgagcaggtgggcgagcgggcaggttagatttcgggataagcgttttgatgagtttgttgtttttggttggttgtggtgcgttggcaatgcaattatttttttatcgatttttgattgttgtttggaaaaaattgggtggaaaaaaaaataaagcaaaacaaaaattttaaaatcaatacaatactttgttttcccttatttgttgtcttttgcagtcaacgattcactttgccaaaatgcgagtggtgttatgggaaaaagctcataaacgcaaagcttgtgattcataaagattctcaaagctttcccagatccatgatacaatcataggtaaatttaaacaatttatcagtacatgaatttcgagattagctgaatgagtggttaacaattttagcgtgaacgtgtgtgtgatgataatgataggcaaatgcaatcggcaaaagtgaaaagcgaactgcaaaatcaaccaataaatcaaatcaagacctttcggtgcaatttggccgatcgttgtagcacataatcattgtatatgtgggttaatctgagatgcgaatgggtgtttgtgtgtgagcggcacgcaatgttttattttcttgggattcaactcacttttgatcgttctcaaagctttgcgtgcgccgcaaaatgacgtcgttggcggtctccgagctattggtgccgagctctctatcaggaacttctgcaaaatggtaattatattgaatattactatcttattcgattacgaacgttgccagtcagtgcgcttcaagagattgctgatagctatgaccattgtaggacacgacatgatctcgaaatagattcgtatatagtttttactttttgaaacaatttaacttcattttcaaatatcatctaaacagccacacctaaaacgcacttcatagctccgttaggacttacgattattagtgggactatcgctgggtgtgcggggcagtttgcgtcgccatggcgcctcctcctcgactggatgctcgacggcgtggatctgctggttgggcttcacgttctcagctgtaagagccaacaggtgaaaagtgttaatatacacctcgaaaacaattaacaactaggagtaggttagtggctattgggcgggcttatcacagaaaggtttcgtcgaggaactcctcaatcgggacgcaaaacaaatgccgactaccttcgctttcggaaagactggtcaagtgtgagctttccgtggaatcactcagctcttctgtatcgctctggccactggccatcacttcgccacctccaccaacatcatcatgaccatcatcatcattattatcatcagcagcagcgtttggaatcgaagaattagcttcggtagcttcacttgagccactggcagctgcagtgtgcgtgatttacaagcagagacaatacacaaatacagagagatagatagatagaaagagacactatacagatacagagagagaaaaaggggataccactgatggatgatcatgatcgtgatgaatgcaaattattatactggacaatgtgatattgagtgactaaaatacgagaggcagtggcaaatgttttacgattaaatgctccaacaacaaaaggttatcgcgcatgagaacctaaacaggataataaacaggacgaacacaagagtgtgtgtgtgcgagaaattaaagaaagctattcgtttatatcatgagtccagggtaaattggagaaagctccaatttgaaggcatacgcaccatcctttgtggcatcagttctcacttcaacgcgcaccagtttagtgggcgtcttctccacatgattttccattgcatctgagattctgctgaaaagtaaaaacaattagttatgtttttttttacagaatgcaaagctacaaaaataaggaacaaaataattgaagggcaaaaatatatgaaagagtaaacatttacatttaaatatttttgaattttcagtaaaataatattaagacgaatatgtgattcaccaaaaatactacgccttttaaatttgctttcaacttgctataactaaataatctcaccttatttgactagatggtcgccgcttgttgcgtttgttggcccgcagttcttccaggaatttgactattttgcgatcggccacatcgatgcatgactgcccggcatagtttcgtatatccatgtcggccagtgactccacgagcatctcggccgtctcccgctgaccccaatgcgatgccgcgtgcagtggcgtccagccatcgttatcctgacgatccacattgccacgtccggccaggagcagacccagcactttcgtgtaaccctttgcggcggctacgtggagggctgtggctcccgttttcgggtgcggtctatccacctcggcggcatcgcttctcagccactttttggcatcgttcagcatcgccagctcctcggcctttcgagcctcatccacgttgatgttcagctcctgcaccatcttctccatgtagtcaatcatggccatgtgctgtacatcgatggccaaatccaaggccaaatcaccatcgctgttcacagcggccacatcagcgccattttccaccaaataccgagctatgctcacaaatctagaaaattaattaagcacaagatgagtaatgaaagtgattgcaatttggacttaaaactcacccgcaggaggcagtggcgtgcagtggcgtccagccctcgttatcctggcggtttatgtcggcacctcgctccactagaaactccaccatgtccagattgtcgtctatgcacgcctgtaaagtagcaaaatgagtattcgattaagtgagctgtatggaattttttttttaataaaaaatatatgtgaggcctttctttaaagcgtcatgtttatgattttcatcaattaaggacaaaataaactacatatttactcaagtttctcacaaattacaaacgtctattcattataaattactcatcttctggatgagacttccccattgtgattccaagttgaaaggtcgaaaccataaacatcaatccttgaatgcgttctactttgccaaacgaaatgtatttatttaaatttttatggccagaaaaacaatttgatttcccgatcagagtcgtaaatgcagtgcatcaaaagttgaatcaactttcgtagaagagattcgctttgcagcctgccttcgatttgcttttataagagctagtaaatgttttaaaaatttttgtgtttatcttgctaaaacgctaaagtaaacagccacaaggcaagagcccaagcggagcgtattcagtcagcatgcttgggttgtttatgcggatttccgctgaacccgcctagacatctcttcatttggctggatggttggatggcacatgcacgccaccgaacgacgatgatatcatcgtcgtcgactccggcgcttctttggggccgctgctatctgggaaccagcgaggaaccacccagcccagtccagtccaacccaacccaacccaatccgaccccacaacaatgtcggtgtgcgacgcgagtggagacgacaacgcctcgtagttgcaaatgccgataagcattcttgggcgcaaaagcaacagttccaccgaaagaaaagaaagtaaaagaataggcccacaacaaaaggcgctaactctatcaatgcacagcacgaaaaattcgaatagattcacattccaattgtgttctgttgtatgggttcttatctgtgcgatattcattcaacagggcttatgttattggcaagtttttggaagcaggctattaacatattttgcttatcgacagaacacaatcgctacagttaactcagaaaattcaatttgttcttcatagctggtacttacagttgccatatatgagcacaaataatttataaaccattaataaagggttttttaaacttcaatgacttttttaagttaattattattttgtgattaatattcgttaataaagaacgaaaattactttcaatgctaaagtttttcagatattaaatgctccatttcatatttcccagtgtattgcccccaccctcccctttcgcatttgataacagagcccgtttgaggagtagtggggcattatacaaatcaaatgaccgattctcgccagtgtctctctatcgttctcttctttttcccgtccccttccaacgcatacatatgttaattcagttttttttactgaccgagcttcaaagtgacttctttgccgttgcttttaaaatccaaaagccatttccatttcgcagtaaaacgcataaaaaaaaaattctctgaagaaggctagaaagagtgagcgaaacgacggcgggtgggcccaaacaatttgtaaatctggaacgcagccaattaattaattatgaacaattttgataataaactgagcggcaggaaaaagaggttttgcgaaaagacaacgcccacgcgtgaccatccgcaaatcaacttgacgacaatgtccaatggcattttctgtggtatgcaaacatttttgacaccagctactccatcagcgaaattccctcgattcgccagacttttgggcctttaatgtcagcagagcaacggattctacgctatttccattccatttgcatggccaaaccgaaaaagcggtgaaaaacgcgaaaagcagaaagtaaaaaaaaaacaaatgcatgctaagtttagccttttgttttggcacgccattgagcggcattttcagccgttgcacgccaaatgttattcacctcgccgcattacgtatacgccgcgtaggccagcagccagcagctagcagccaacagcgacttgttgagacggctttcagactctgggccgccagcttaacgtggctcattacgcggcagtttgccaggcgccaagctccatttggcccatttggcttttgttaaccatcaatgcacataattctggcttataactcaatagcctgaataattcccttgatgaagaaggcaggcaggagagtttcacgttaaacactacttcagagttagatctgaaggattttagctttactagcgcaggctattaaatattcaagtcataactgattacaatacagatgagctttggaaagaaaacctttaccataagttcaagcaaagccaagttgttcaactaatgaatcgttccttaggtggataatcctttgaaatttgggtttggttgtttgttcaactgcttaatcaagaaacacctttcccaaaccacatatttatgaaataattacatcgaacttatgataaaagtaaaagaaaacagtttgctataattatatacatctttcattttcataatttcccgtgttatgtgggtacatttcattctccttgtttaaagtcgctatttcaaaaattcattgtattttaaaatacgttttaagaaacattcctgggcactcaatgacctgccgccctagtatacaattattcgttaaaacgagcaaatatgcatatatattataattgaaatgccaaaacaggcgagccaaccgcttgagttcaataaattacaaatttggattagcgccacaagataaaagtgcaaagaagatacataaaccatatgatatatatgcatatatatagaaaatatacacatatgtatatgtacctagacgtgcctatatcccgccgattttgaggcatttgctctgtgtgaaatattctaacatattgcagagcctttttaaacatttcgatcgtatctatttcgcttattttctcttggggaacatgtatctcatgtaggtcaatagcattttgccactaaaaatgcttggcatatttttgccaaattgtataacgatttatatggcgccgtttgagtagttgctcttggtcagcaaatgcaaattgtttccgactttgaatatatttttatttctaatttctttcgactagtccaccaggtgcggccagacatctggctggactaaagagagaagtgtgaaaaatcatgaacacaagctattccacagtgaaaaataaacaagccgaaagaaaatccgaacggaaacaagaatctagacaatttccttatgattccaaagatttatggtcttcttgcggaattacattgtaattataacattagaaacacaaatgggtattattaagtcttatgtaaaatgtaatcgatgttcttagaaataaatttgaccaagcttttgcttgcactaagctttttaaaataaaatcttatctttcaatgtttatttacccaagatttgaagtgtgaataagctgatattgtaatcactatttccacagtctaaaactttcacctgtgcagttttcgattctacgaagttgtagttgataaaaaaaatatatggttctaaaatacacgagaaatcgtaaaggtgcaatagaaattccaagaactatcatggatattgaaaacatttcctgctggcaaatgtttaaaagttactacaatttcaacaatattttccaagaacaaaaaatacaacaataatttcattaaacacgtacagaattgaacatattttttccgccgaactatttctaaactcatgtcgtcatgggttggcaaaaattatcgtattttttcgtatagttcccgctggtttcggttgctttatccataaaacagcagatttcaaatctttggtgtgtgtggcgcgtgcgagctaaatgtacataataattataataattataattataataatcgggcagcggcagaattggcaacaagaaatgatggaaaataaaagattggttaggccgcctaagacgaaggaaactcggttgtaaaacgaagcatttttaatggcatacatttcgcgtctggctatggctagaaatggtattatgcaacgcacacacatcgcacatactggcagcagatacagatacagatacagatacaaatgcgagttgcggactacggactgcagacatcacatcaaattgtatctggcatagagcgaattttcattttgatcattcgcattcgttttgttattttgggtgtaaagcacgaaacgagaaataaatcaaatcaagtgtagcgaccgcatccatttatatacaacaaccaaagcccaaacagatacatccagacagatcattcttgaggatattccatttgttgtatctgtgaatctgtgcgtctgtagtctgtagcttgtgcgtttcaacagctgtccgtcccgtcagtccgtcgagaaccgggccaaggttagaaaacacgtcaataaagcgcgttagccgacagcaacaaatctaccagcgctgctaccatgtagtgtagcgtgtgtttttcattttggatttgggaaaactcacgcagcttttcccaactccccaaacacacagattcgattcgattcgattagattcgattcgattcgatcaggactcgtcacccatccgcaatcacgatcgtcatgccagcggatcgacaattgttacgattattatgcactcagctctgactatagctcaatttaacaaaagtcttgacagaataatttcttaatttatgcggcgccagttggccagcccctggtccccctccccatcctataaaaatcgaaatatatcaattgctaattggcagaaatgtatgtatataaatcaatttcttaatttgagcaaatcattgatagaggctgattaatgaagaaacacagattcgcactcaggggaccaaaacctgattggatgtttgaaagagtttatacagatgggtaaattaggcaaaatgatattttcatttaaatgatttttgttcacaaaagaagatgattaaagaagcatcaaataataaagtttctcgatttgatatttctatgttcctacagtaacaaactaataaattctgttttggaacgaaccgtgatagtttcatctcaaagctacaaaatgattcatttgattataagaaacgcactacaacaaaaactataaatattgcggaaaagcccacgtatttccaaaagttctaattttaccacacacacacatctaattcatgtgaaacggtgtgcaccttgaaatacaattctataaaatatatttcgagcaaaaagcgccacattatccttgaactgcatttaaacgtagatatctgagtcggaacgcttgtaaacagccgtaatttattgccatttctttgataatttcccacttgtcccccagcgagtttgaacgtcaatgcacgcagaccgcttgtaggccacatgaaaaatcaaagtcagccagcggcatggatacacggtcacttgcaacagcctcctccttcccatcctccccatcctcgctttcctatctacctctccatcagtcaacatcattcatataaagaccaaggtggcgactgtaaacagtggaactggtgttctttaaatatttaatatattttagaattaggtttctcagctctgattatgctctatcatgacctagcagttcattccctccacttatttatcaagcaaacattgatgttgacgcaatacacacttcaatctcattcgcgtgcataacaagtatttatcactaagttcaaaggttatgtttcattttcatttagcgagaattttcagtattttatgttttaatatttcttggctataatttgcatatgcgttggcatgagttatgcttataaatacttataatgcttcatcacatgattagtaatacttaatatatatgataaaaaaaaaaacgttatctgtcattacttcattgggtttcattgtaccaatgccaattcattgccatttaacaatggcatttaaaaatcttgtttttcggtatcgttttgtttttaaataagtaccctgctgcaggagattacattttgtaaccatttccatgggacttaaaaccactgtggcccatcctgttcgcagccatcgtgtcgcatgccattgaaaatgtggtgcaggtgcaggtgtggtgccatcgttgtcaatgctcatgaatggaaggcccaaaacgttgcaagcacatacgtacatacatatgtgaatgtgaagttgatgcggcatggggcaaaggaaggcgactactgagaaagggcgagggcggacttttgcaactattagaggacttgtaagtgcaggcgataagataattattttaataaatgcaatcgaaattctgatttgcggtcgagcaaaaaacgacagcggcaagtgaagcaaatagccgcaggttgcggccgcacttgcaccgcaaacaatgtggcaggtaattcaaaacgtttgcactgttcccattgttattattatttattattgtgctgctcggtcgcagccgttgctgttgctgtaattacagtgcactcgcagacagtgaagcctccccgcaatgcccgcccgcctcccgccgcccattccgcactcggcaaattagcatctggttaacaagtgcgccatcgcggttaaacggtgaaaatctacgactcttcgctggcgcagcataattagaatcaattatatcgaattggagcagagcgcgcacagtgagcgcaagatgggtgtggacaggcggcactcttgcaaattgactcgggaatttgtttggggaaaccattttggccttttctatatttgattttcaaaattacactgtggtttgttgatgaaacagatttaatttgttgttctattatagctaatgccaaattaaatttgagagtacagtgagcgcaagatgggagtggactaagaaatttgtatattaattccatgggaattaattaattctaataaataactttaaaacagtaccacaaaatatttctgtattcttgatactattttaactattttttaaaggttaaataaactctccattaaatagttatcaaatgataaaccgcaaatcgcaaatctttatttgttcttcctattattttgtattaattaaatagtccttgtcttaatctacaatattatcatgtgcataacaatagaacgaatttccatgataggtacggaaaatttaagctttttatttcattttcgtgccggcaaagtatcattaaattcctattcttcgacatgccacaaaatcgagtcaagcaaattggaggaaaactgaaaatgattttgcgaaaatctttgggctttcaatatgtaaacgcgctttcgtgtgtatgggttttgtatgtttttcttgggtgtttaaaaatagaacattttgtatttttcttatttaatgcttttggccgtttgccttttgcttgtggctgttgttgttggctatgccgttctggccattcgacttgtaaatcgtcggcttgcattagccatgtatttgctgtatttgttaatattcgaaattcgaattattgttgcggcggcgaaagagcacgaaatacccaacaacaataatggtcgagcgtctagcgaacggcgctgcacagtgggtctaaacaggatggatcattcttgaccttgattgaatatcctataaaaattcctaaataataacgtcaatgtgtcataatgctgtgttctttatcttcttcgatggaaaatcttgtaaaattaatcaatttagtaatttgttctttatattttaatttgttgttttactttaaacgctcttaagttaaatgaagtatacataaaaattaaatggttaatccttacgaaacaataaggtaatacttttcgtttgctgctagatattcttgtagcattttaataatttgatcccatgaccccatggaattcgacccacagtgcgattcacgtcagcaccacagttggacgcaacgcaacagtgtcgaaactgcagctccctgcgcccgttccaccccaaccccgcccccaattcacccaccaccccctcgcccagtcgcgtgatcgcagttgcagcagactgacgcaacgcctagccgccttctaaagtgggaaatcaatccctggtgataggggatgcagtgtgaatattcacatttaattaactggaaattgcacctgctgcaaatgcaacccttgatagaattgctaatactcgccacttctacccaaacaagaaaataatgtctgtttgcaaacgattacttaagtgggaattatcaatacctactaaaagactgttgtctttttcttttcttctagcgaatgttttatgttttctatctgtgtactatatctttaaagatagctttaaaatatattttattttattgtatgttctttaatttaaatttatttacaaattgactagttgagcaaagtataaccattcaaacgttacattttctaccacccaataaggactattcctaagtgtgaaagaatgatgattactggcagacttacctggtgcagggcggtgagtccatcgacgttggcggtgttgatgtcggcgccctggtcgagcagctggacgacctcgtccttgtcgccggaaaggcaggcggcgaggaagacacagccggagctgaacttgatcctgcggccgtgctcgtgccggggggtgggggcggcgcggtttgtgtccgactcctcccagcgcttcagctgctcggcgcgcttcatcatcgccgagttgttgcgtgcgtccagcgaggacatcttggcagatccttcttggccagacgaacgatctgctccttcagataatcctgctacttgctgcagagcacgcgctctgtgagatcgctcgactgctccagatgtgtgtagattttgtatgtagcgctgttgtatcgctattgctctatcgtaattgctttattgcgcttttgtttgcaatgggaattgggttttgattttgcactatttatagaaaatgcttcacactttcgattttcgatcacgactacacttttgctgtttgtactgctgctgctgctgcttcttcttttcctgcttgctgattattattattttacgatttttctattttctttgcgtgtgtgtgcgcgtgcgtgcgtgcgtgtgcgtttgctttatcagccaacttcttggcgttttcttctccgctcactcacacaatgtcgcaatcaggaacgctctctctctctcacactcgctctcccgcaaaacaatgctatttgttgttgtttaacgcgcacctttgttgttgcattcaatggaaattacacaagaggatggggcaaaaactaagaaatacgataggagaaattaatattttgcaaatgctttatttagagccaccagctgctgggctacatagtgttaagcaaacacattttcatatcaattaaaaacacttgcgggcattttagcagccgcttgttttttttacactttgtttatcattctccctttcgcgctctctctctctctctgccgctcacacacactcatgcagttagggcttgcatacggagagcgcgaatggctgagcctgcatgtgtgtgtgttaccaatttgacataaattcaacagccgcgacgctgacgtcgcgagtaaatagaacaaaaatggaaaccgcgtattttttcacgcactgaaatgcgatgattttatgtaatttggcaggatggcggtattgcacaaaatccttgcaaatgcgagtgcacttatgtaaaggcatttttacatcgccccacattttacattccactccacactcacacacacattcactcgcctcgcacacagacgcaacacatacacacgtatgccgcacacgcacgtagagaaaaatggattgcagtagaaacttttcacacacaccgaaagaccaagcgaaaaacgcacctttcccgcgaaattcccagaactttcagtgctctctgggctttaatggctgcaggactctccgctgaagcgctcctcgtccgcgaggcactggtatttcactttattttgcatattttcggtggcgttcaaatcgaatttcatccgcacgaagttcacagaccaaaattttttgacgatgtgaatcggagggcaatgcgcggtatatttagcactcttttcgcctggtcacactaacgccgctcacaaaattgtagatggcgtcttagttatgttaacacttagcagtgctgttatggaccgatatttttaacgatgttaattaaactatcaatattattttagggtattcgtaattgttcgtcttattactccattcgggagaaatgcgttctttttgcatccaattctttacatttagttcaaaaatagatgcggccatatctatcgatatatttgatgtgcctcaaaaacacatacaatgcaattttcaaacaactttttaaatatattaataccgtttctaattttatctatataaaacacaaaaaggaaaaagaggatacaacagaatcaatttactttcaaactcaaaaaatgctgtttttggtcaacttctctaattgtggcttccctcaattgtttgtatttattcctggtttgatactaagaattctcgaaagtttattaaaccgaaacaacaaacaattgatgttaaaataaatttccaaactgatcaaagtattttgtttttactgggagttctcggtatgccgaaggttcttctgtttgttccactaatttttttgtcaaatcaagacaaaatgttaggggctctaattctgatgaatcgaaataagctcagttttcgcggtgttactggaccgggtaacagacccttgttctataagtggctcaattttgtatatgtgttatacctgaactaccgtttcgatttccaaaccgttttattcgataaatgttggttgaaaacgctgctgacggcctagcgtagacttgatcccactgatgcatcttatcgatatctttttagcgcgtatcgatacatcagcgagccaagcaccttgaacagtgtgaccccatttagcatttatttaaaactacgacttcgtgtgctgacagttgtttgtttttgaaattttaatata

SEQ ID NO: 12437 - DNA, 3517 bp, DROSOPHILA
attttggtctgtgaacttcgtgcggatgaaattcgatttgaacgccaccgaaaatatgcaaaataaagtgaaataccagtgcctcgcggacgaggagcgcttcagcggagagtcctgcagccattaaagcccagagagcactgaaagttctgggaatttcgcgggaaagcagcagcagtacaaacagcaaaagtgtagtcgtgatcgaaaatcgaaagtgtgaagcattttctataaatagtgcaaaatcaaaacccaattcccattgcaaacaaaagcgcaataaagcaattacgatagagcaatagcgatacaacagcgctacatacaaaatctacacacatctggagcagtcgagcgatctcacagagcgcgtgctctgcagcaagtagcaggattatctgaaggagcagatcgttcgtctggccaagaaggatctgccaagatgtcctcgctggacgcacgcaacaactcggcgatgatgaagcgcgccgagcagctgaagcgctgggaggagtcggacacaaaccgcgccgcccccaccccccggcacgagcacggccgcaggatcaagttcagctccggctgtgtcttcctcgccgcctgcctttccggcgacaaggacgaggtcgtccagctgctcgaccagggcgccgacatcaacaccgccaacgtcgatggactcaccgccctgcaccaggcgtgcatagacgacaatctggacatggtggagtttctagtggagcgaggtgccgacataaaccgccaggataacgagggctggacgccactgcacgccactgcctcctgcggatttgtgagcatagctcggtatttggtggaaaatggcgctgatgtggccgctgtgaacagcgatggtgatttggccttggatttggccatcgatgtacagcacatggccatgattgactacatggagaagatggtgcaggagctgaacatcaacgtggatgaggctcgaaaggccgaggagctggcgatgctgaacgatgccaaaaagtggctgagaagcgatgccgccgaggtggatagaccgcacccgaaaacgggagccacagccctccacgtagccgccgcaaagggttacacgaaagtgctgggtctgctcctggccggacgtggcaatgtggatcgtcaggataacgatggctggacgccactgcacgcggcatcgcattggggtcagcgggagacggccgagatgctcgtggagtcactggccgacatggatatacgaaactatgccgggcagtcatgcatcgatgtggccgatcgcaaaatagtcaaattcctggaagaactgcgggccaacaaacgcaacaagcggcgaccatctagtcaaataagcagaatctcagatgcaatggaaaatcatgtggagaagacgcccactaaactggtgcgcgttgaagtgagaactgatgccacaaaggatgctgccagtggctcaagtgaagctaccgaagctaattcttcgattccaaacgctgctgctgatgataataatgatgatgatggtcatgatgatgttggtggaggtggcgaagtgatggccagtggccagagcgatacagaagagctgagtgattccacggaaagctcacacttgaccagtctttccgaaagcgaagctgagaacgtgaagcccaaccagcagatccacgccgtcgagcatccagtcgaggaggaggcgccatggcgacgcaaactgccccgcacacccagcgatagtcccactaataatcaagttcctgatagagagctcggcaccaatagctcggagaccgccaacgacgtcattttgcggcgcacgcaaagctttgagaacgatcaaaagaaaccgaccgttacgattgcaacgagcacagcagccacagcgatcaattctccatcgacaactgtacagaccccaccaattcgcagatcctttgtgccaccggtgcgtgatgaagagagcgaaacgcagcggaaggcacatgctaagcgtgtgagggagactcgacggtctacccaaggtgtcaccctggacgagatcaagagtgccgaggagctggttaagaagaagaacatgggcatggccaacaacaacaataacgaaacaagctctgcatcatcgacatcagctccaacaccatcgatcctcggcagcaatgagcagcaggacgagctgcaaccaccgccaccgcccaccacaccaccgccagctgtaatacccaccacaacaacggccaccgatgagacagagatcgaggaggtggtgtccagtcctccagctggccaaagtcaaaacgataccactgctagttttacgctatcggctcccgtgcgaagatcgctgtcgaccgagggcgaagccgatgccaatagtgatccggagggtgatcaggatcagacggtggtcagtgccagctatacgataatgcccaggcgggagaggcttcccgaaagctccgagaatgtagagagcataagatcgccacaaaagactgagccagttgccaaaagttccagcgaggataagtccgaggagccaccacatgccaggcccacggatctgccactaattccggctccagctgctcccagcacagaagctatcaaatcatcctcggcggccactacgcccgctgccctcgagagtccagtgcgcttgcgggataagcggggtctgtccggcagccaagaatcggaaaccaagtccgataccgcctcgcccgtgtcctcacatccggacttcaatgcccgggactcgctactcagtctatacgcccgtcgcacaacggacagcagcgcgggaggcggaggagttggtggtggtgcaggtgtaggtgcaggtggtgcaagtggagctgcaacctcgtcttcaacttcggcagcggaacggcgtccgtcttggcgcctgaaattcgatgccggctccaagttcaagttggaggacataaccagcggtggcacatatccgcccaacaacagcaccatcatacccagtgctccggcggtaatggcagccgccaacttatcaaccacaactggtgtccagcggcgcatcagcagcggtcccatcgcactaaatgcttccaatcagtcgctcaactctgtgggtcgtccagtttccgcgccaagcgagggcaccaacaacagtgcctatgtcacgccctcagctcgcaaattcgagacgaacgccacgtccacgggagcgaccactgcagcgaccacgaccagcaactcaacctccaattcagtgtctgcaaccagtgccaatcatacaacggctacggcaccaaatgccacgtcaaaccatgacgataaggataatgataaggagaacgacaatcgcacacagacggttattcagaggcggcgaaagccgaagcgcagatcaacgggcgtggtgcacatcgatatggatgaactggatcccgagcgacagaacgaatcgtccaacaacgacaacgaggagaaggagaaggaggtgagtctgtccaccgataattag

SEQ ID NO: 12438 - protein, 1023 aa, DROSOPHILA
MSSLDARNNSAMMKRAEQLKRWEESDTNRAAPTPRHEHGRRIKFSSGCVFLAACLSGDKDEVVQLLDQGADINTANVDGLTALHQACIDDNLDMVEFLVERGADINRQDNEGWTPLHATASCGFVSIARYLVENGADVAAVNSDGDLALDLAIDVQHMAMIDYMEKMVQELNINVDEARKAEELAMLNDAKKWLRSDAAEVDRPHPKTGATALHVAAAKGYTKVLGLLLAGRGNVDRQDNDGWTPLHAASHWGQRETAEMLVESLADMDIRNYAGQSCIDVADRKIVKFLEELRANKRNKRRPSSQISRISDAMENHVEKTPTKLVRVEVRTDATKDAASGSSEATEANSSIPNAAADDNNDDDGHDDVGGGGEVMASGQSDTEELSDSTESSHLTSLSESEAENVKPNQQIHAVEHPVEEEAPWRRKLPRTPSDSPTNNQVPDRELGTNSSETANDVILRRTQSFENDQKKPTVTIATSTAATAINSPSTTVQTPPIRRSFVPPVRDEESETQRKAHAKRVRETRRSTQGVTLDEIKSAEELVKKKNMGMANNNNNETSSASSTSAPTPSILGSNEQQDELQPPPPPTTPPPAVIPTTTTATDETEIEEVVSSPPAGQSQNDTTASFTLSAPVRRSLSTEGEADANSDPEGDQDQTVVSASYTIMPRRERLPESSENVESIRSPQKTEPVAKSSSEDKSEEPPHARPTDLPLIPAPAAPSTEAIKSSSAATTPAALESPVRLRDKRGLSGSQESETKSDTASPVSSHPDFNARDSLLSLYARRTTDSSAGGGGVGGGAGVGAGGASGAATSSSTSAAERRPSWRLKFDAGSKFKLEDITSGGTYPPNNSTIIPSAPAVMAAANLSTTTGVQRRISSGPIALNASNQSLNSVGRPVSAPSEGTNNSAYVTPSARKFETNATSTGATTAATTTSNSTSNSVSATSANHTTATAPNATSNHDDKDNDKENDNRTQTVIQRRRKPKRRSTGVVHIDMDELDPERQNESSNNDNEEKEKEVSLSTDN

SEQ ID NO: 12439 - DNA, 4420 bp, DROSOPHILA
cccatgtgcgactttcactcagcccgacgtctaggcggatttttggaccagggggggcagcttcttcatcagttgcacctgcagcatctgaattgccgttgtataatctcttgattatggctaataacatgttgtaaacggccaatctggcagccgcctgactttatggcattctatgaagacaatgagacgacttaaatcagcgaacggctcatgtaaatcaatgatggacgattgaaagatatcgcatttcaagatctcccttttgcatttttctggtactttcacgtgctgcaaccctacaacctcggcgagtaaattgccgacccaattgactgtgaagcttcacagttttccacttcccatcttcacacaatggccagccggacgcagtttccctttggcttttctcgctttctcatgcatcgaggaagagttaatgtcggtccctttggcaatttatgtgccggcacacacaacttcctcagccaacaaataccagtttttgccagcactgaagtctcagacgctaataaaaaattgtattggaaaccaattgaaagtatataagactgtcaacgacatcaacatcaacatcagtatctgtcgacgaactaaagcgcgttaattgcggtactaactaggctaatacgataattttgcaatttttcaataaaaatcttatgagtacactggcaaaaaactaacagataagataattagatatggatttaaaacacaacttcgctcttgattataattatttttattaaaaacttaattacatgattatagtgccaatttttgtttattttgacaaattgtgtactaagttgatttattattattataaaatctttattgcctcattatttttacaactgctagttcaacgaggtgttacttttgtatttgtaaaagtgattatggtggcttcgattgctcgaaaagttgacggcaggaaagagccaagtttggcgatatccgcagttgggtttagatgaagtgtcgactaaattccatacgtaattatgttttcagatatggcttatcgtatgaagaaatcgaaaaaggattacctacgattgatacctcaaagacgctgattcgtgaggtgtgtccacccttcttcgctggagttgagtgtcgccctggaaaatatcgccgtttcgatggcctttgcaacaacatcgagcacccgacatggggggcagctaatgctccgttccagcgcctgatcggtccactttactcggacggaatcaatgctcccagaatttcggtgactggtcgggatttgcccttctctcgagtggtttcacgcaccatgcatcccgacgacggtttccacgatcacgcgggcaccgttatggtcatcgcctggggtcagttcatggatcacgacttcacgctgacgggaacgccgttgggtaagttaaataataatagcgttggcaaggaaaattttaaattttaaattgttcacaattgctgctgcatttcaaagtaaagaaacagtcattcttgaataaaaaggcaattagtgtttagtcctaatagaatagaatagaatcctaatagaatcatttgatatgaatcgatttcagatcccattaaccgtaacgatcccgaggagtgctgcaagcgaccattgcatctaaagcatccgtactgcaatgagattcgcattcccgatgacgattacttctatcgcctgtttaatgtcaagtgcattgacttcgtgcgtggattcccctctcctcgtccaggctgcaaattaggtgagcttaaaataaatgtatatttataataaaatttgtttgcctattaattttatatatttcatgtgatacttaaatgcattcatctctgtttatcaggctcccgtcagcagttcaacaccttgactggtgtcatcgatgcgaacaccgtttacggagtgaaggagtcgtttgcccgcaagctaagaactggctacggaggtctgatgcgcatgaatcccgtgttccaggagtacggcctgaaggacctgcttcccctgaagctggatatccccgacgagggatgcacgcgtcccaacaagagcatgtactgtttcgagggcggtgagattcgcgtgaatgagcagctggtgctcacgtgcatgcacaccttgatggcgcgagagcacaatcgactggcgactgcattggcgcagattaacaaacactgggatgatgagacgctgttccaggaggccagacgcatcaatatcgccatagttcagcatgtcaccttcaacgaatttctgcccattctgctgggcaaggaagtgatggagaagttcggtttggtgctccagaaagatggctactgggatggttatgattcaacagtgaatccgggcattattgactcttttgctggagctgccttccgatttggccactctctgttgccaactgccgtggaacgctggtccaaggcccacaagtttattgcctcgaaacgtctgtcggatttgatcaggagaccctatgatctgtaccgtgcaggagtgctggatgaatatttcatgggtctgatgaaccaagtggcccaggcaatggacgactcgataacccaggaggtcaccaatcatctgttcaagaaggagggcgcccggtttggaatggatctggtgtcgtttaatatgcagcgcggtcgggagtttggtattcccggttacatggagttccgaaaattctgcggtctgcccacctcaaacacctgggatgagatgtacggatccatgcccaacgagactgttctgcgctatggcagcatttttgagtaggtttcaggaaggggttcctttgaattgttatattaatctaatgtcttttagacaccctgccgatattgatctttggtctggaggcgtctctgaaaaatcacttcccggttccatgttgggaccgacttttgcctgtgttatcgccacccagatgagttacctgcgtcgtggagatcgcttttggtacgagctgcccaaccagccctcatcatttacgcccgagcaactgcaggagattcgcaaggcgaagctatcccgattgatctgcgacaacaccgacttgattgatactgtgcaaatctaccccatggtcttgccggatcatgaaatgtaagtgtgcatcgtctgcaaaagttttaaaatataaaatatcaacttttaaatactttctagcaacccacgagtgccctgtaagagcggtattataccatcaattgatctgactaaatgggcggactttggcggtcatggcgtagatccctctctctatgtaagttaacaatcgatgaatcaactcatagaacatatattaacacaccttataatatgctttttagaactacatcaatgaaatacccgacacgttgctgaactttaggaagtaaatgccatttgtttttctcacgatttgttttacaatctcgattcattttgtttgactccatatcctgtaccgtctgtcttctatagttcaaaatcttttcacttcttactgcttagtccctcaactagtctttgctcaccatccgcatttctatagcgagtcagtagttatgacactgccatttcttcagagctctttccagcatttccgtgcatgaaccatacattctgtatatattaatattaaatagcagaaatagagcctttaagttaaagcatatcgaagcaatcaaaaaaaagaaaacataaataattttaaaaatatatctcgatgtaagtttttgtatatgcaagtattttttaaataaaatttaaaatcaatatatgtttaatttttcttaggcgataatggtaagtaatacattaagatataaaaattccatcaatccattaaaagatttaactaacacccatttcatgctcaaaaacaactttggttacaacacaacacatgtatttttcttaatatttgtttatttactacacaattacaagttaataggaactctttggtttcacgctagaaagtcagttgtttagcaaaagtcatttcatcatcgttgtggtcgatatcagcagccaagatcgccaagacttgagcatcgtgttgagcatcacattgacccaaatccacacctgagtcacaggccataaaagcacacaccgccacacacaccgcacatcgcacaagaggcgcctcttatcgcttcactcgagcgcattcagaaacggggctatggaggctatatcctcgcagtccgggatggctttgcccttgaacttgaggcaggaaagggcacaggtctgcccctggaagtaatctcccagcatggtcttgcactggacgcagttgttaaggcacacctggataaaaaattaaaaatatgtaaaacaattttgttaatataatttgtggaacttttaaggatattaatatttaaa

SEQ ID NO: 12440 - DNA, 1959 bp, DROSOPHILA
atgaagtgtcgactaaattccatacgtaattatgttttcagatatggcttatcgtatgaagaaatcgaaaaaggattacctacgattgatacctcaaagacgctgattcgtgaggtgtgtccacccttcttcgctggagttgagtgtcgccctggaaaatatcgccgtttcgatggcctttgcaacaacatcgagcacccgacatggggggcagctaatgctccgttccagcgcctgatcggtccactttactcggacggaatcaatgctcccagaatttcggtgactggtcgggatttgcccttctctcgagtggtttcacgcaccatgcatcccgacgacggtttccacgatcacgcgggcaccgttatggtcatcgcctggggtcagttcatggatcacgacttcacgctgacgggaacgccgttggatcccattaaccgtaacgatcccgaggagtgctgcaagcgaccattgcatctaaagcatccgtactgcaatgagattcgcattcccgatgacgattacttctatcgcctgtttaatgtcaagtgcattgacttcgtgcgtggattcccctctcctcgtccaggctgcaaattaggctcccgtcagcagttcaacaccttgactggtgtcatcgatgcgaacaccgtttacggagtgaaggagtcgtttgcccgcaagctaagaactggctacggaggtctgatgcgcatgaatcccgtgttccaggagtacggcctgaaggacctgcttcccctgaagctggatatccccgacgagggatgcacgcgtcccaacaagagcatgtactgtttcgagggcggtgagattcgcgtgaatgagcagctggtgctcacgtgcatgcacaccttgatggcgcgagagcacaatcgactggcgactgcattggcgcagattaacaaacactgggatgatgagacgctgttccaggaggccagacgcatcaatatcgccatagttcagcatgtcaccttcaacgaatttctgcccattctgctgggcaaggaagtgatggagaagttcggtttggtgctccagaaagatggctactgggatggttatgattcaacagtgaatccgggcattattgactcttttgctggagctgccttccgatttggccactctctgttgccaactgccgtggaacgctggtccaaggcccacaagtttattgcctcgaaacgtctgtcggatttgatcaggagaccctatgatctgtaccgtgcaggagtgctggatgaatatttcatgggtctgatgaaccaagtggcccaggcaatggacgactcgataacccaggaggtcaccaatcatctgttcaagaaggagggcgcccggtttggaatggatctggtgtcgtttaatatgcagcgcggtcgggagtttggtattcccggttacatggagttccgaaaattctgcggtctgcccacctcaaacacctgggatgagatgtacggatccatgcccaacgagactgttctgcgctatggcagcatttttgaacaccctgccgatattgatctttggtctggaggcgtctctgaaaaatcacttcccggttccatgttgggaccgacttttgcctgtgttatcgccacccagatgagttacctgcgtcgtggagatcgcttttggtacgagctgcccaaccagccctcatcatttacgcccgagcaactgcaggagattcgcaaggcgaagctatcccgattgatctgcgacaacaccgacttgattgatactgtgcaaatctaccccatggtcttgccggatcatgaaatcaacccacgagtgccctgtaagagcggtattataccatcaattgatctgactaaatgggcggactttggcggtcatggcgtagatccctctctctataactacatcaatgaaatacccgacacgttgctgaactttaggaagtaa

SEQ ID NO: 12441 - protein, 652 aa, DROSOPHILA
MKCRLNSIRNYVFRYGLSYEEIEKGLPTIDTSKTLIREVCPPFFAGVECRPGKYRRFDGLCNNIEHPTWGAANAPFQRLIGPLYSDGINAPRISVTGRDLPFSRVVSRTMHPDDGFHDHAGTVMVIAWGQFMDHDFTLTGTPLDPINRNDPEECCKRPLHLKHPYCNEIRIPDDDYFYRLFNVKCIDFVRGFPSPRPGCKLGSRQQFNTLTGVIDANTVYGVKESFARKLRTGYGGLMRMNPVFQEYGLKDLLPLKLDIPDEGCTRPNKSMYCFEGGEIRVNEQLVLTCMHTLMAREHNRLATALAQINKHWDDETLFQEARRINIAIVQHVTFNEFLPILLGKEVMEKFGLVLQKDGYWDGYDSTVNPGIIDSFAGAAFRFGHSLLPTAVERWSKAHKFIASKRLSDLIRRPYDLYRAGVLDEYFMGLMNQVAQAMDDSITQEVTNHLFKKEGARFGMDLVSFNMQRGREFGIPGYMEFRKFCGLPTSNTWDEMYGSMPNETVLRYGSIFEHPADIDLWSGGVSEKSLPGSMLGPTFACVIATQMSYLRRGDRFWYELPNQPSSFTPEQLQEIRKAKLSRLICDNTDLIDTVQIYPMVLPDHEINPRVPCKSGIIPSIDLTKWADFGGHGVDPSLYNYINEIPDTLLNFRK

SEQ ID NO: 12442 - DNA, 15831 bp, DROSOPHILA
atgtcatatacactaaataaggaccaagatccttgtgcttgagggccattatgccgaccttaactttgcgtatacacacaatgcggatttgtgcgccttccgttagctatcgtttattgtcatcaagttgaaaacttcaagtgtcgttacctttgtttccgtctattattaggacctgtatgatataatatttgactggattgtccttggccatacccgctggcggtgggcggcctttggctgggagggggtggtgctgggaaagtgggtggcggtggtaattggttcgtcgcagaacatgttgcatacttgagggcgccgcagctatggaaattgatagaatcgctttgggtgggagaaattgaagcaatgcagtttgctctagctccctctctcgctttctgtgccactctctctttctccttttccctatggttccctttctccttttccctgcggtacacgctgttgatatcatatttttgccacttctattattatattgatgtctactacttttttatgatgctccaagaatactgggaacttttttacccaactcaccacgcatgacgcgtgccttctctctcgcgcagccccatttctcgctctctttctagctttctctctctctctctcgcatttccctgtggaaactcccgctcttgtggattttattatcgggaaacgttttcctttcattttttggctctgctgtttttttcttttggggtgtgcggcgcccacgtatcagcgcagaaaagcggaaagtggaaaagcaaaggaacgagcgaagtcgaagaaaaacattttccgagctgctgctgctgctgcgactgttcgttttcggtagtagtaaagtgaagaccgcccgccgagtgaagtgtgcctacgtgtgtgtccgcgactgtgtgtgcagtgctatatacaaaattcaattggaatttatttatttcaaatggcacacataaattctaacaagcaattatcaaatttattttgtttagtgcagcgccagaaattgtaaataattaacagttaaaaactcaccaccaaaagaaagttataaacgaaaacgcttaaccaaaccaaagatgcatgaatatgaatcaaagcaaatatgatacatagccaatatgtatatagaaactagtaaggataaataaagttcaaagcgaggaaaaacaccgatcccgacaagcaaatgtccggataagggagccgctacctgaccaatggatgaaaatgcagccgtcgtcgccgtcactttcgccgtcgtcactatcgcatcgcttttgtcagcagcaacaggaaaagtcggaaaagcaccagcagtaccagcagcaccaggagcagcaacagcagcagaaggagcagcaggatcagaaggagcagtcctgccacgcccacgccaatcgaacgccctcggtcggtacggcagcgctggctcagctggcgtcgacgcccgcaccggcagcagcggcctaaattgcccaaccgcaagaatcccacttcgaaatagcccatatacacagcagcaggcgatattgcaactgcaacacatactgcactcgcagcagccgcgaatactgctcatataactgcaacatcgagagacctttgccgctgcaagcgcaacagcaactgcagctgcaacagcatcctccagcaggacaacgcacaaaaaacccactacgcataaggcaacggggcataaggaggcacaaggaggcgcaggaggatagaccggaagcagaaggacaggaagtggggcgggctgcggacacaggcaaacaaaatggcggatggtgggcattcattcgtgaagaagacatttcataagccaacatactgtcaccactgctcggatctgctctggggcctcatccagcagggatatatctgcgaaggtaagcaccgagctagtacaagtactttaaatattttcaatgagatcacaggatatcccacatttttttattcatatttattgcgtaagcaatttgatcagaaaggcatatcttacattggattatctccttcaagataatcgttaaaactgaattttctatatgaaactacatctttcgtccatcagttctcaattcagtctcaacggccgcaatagaaataagttgtaattaatgagcactaaacagaaccgagaaaacgcagcacgcaaatcatcgaacatcttcaacgccagcggcagatgtaaaaatacatttcgtctagttttgaaaatactttttaaattgccataaacttggaatgaaaatgcggccgctgatgatgtcgatgaggatgaggcagtagtgggtggcataaacatgcacagaatagcgaaatataggaatcttatcatgaaatgattactattattttggatagtatatgtgaagtgttcaaagcatcagtaaaaagatttaataacttaattgggtgaatgtatatcttgacatttatcagaaaaggtttgctattgataaaataataaagtaatgtagattatccgaaccgaaaataaagcaattggtctgtgcctcgtccgacaattgcgttttccctgtgaaactaaacaagttctcctcgtgcagagtgatcggcagacccgacgtcatcgccacatgaccaatgggtcatctacgatttgtgtagattgtacggatcgtgtagatcgtatagattgtatagattgtcgatgtgctccgacagtggcagcatctagatctggtgtgtagtagcattggcataggggcggcatcatcgtgctatttgcggccgataagtgtgcgcgtttgaacttttccaaattgtgcggctgttggccgtgtccgccgtgacgtgagcggagcgccaacgacgtcatagacggctccgattcgctgtgtagatatgtatgggctcgtctatatgtatgtactatgtgccattgccatggaaatctatgaaacagagcacggtacgattcggaccgaaatgaatcgcggcaggagcaccaaatcggatacggaatccaccgaactgaggcaacagactctcccaatgggaagtgtgttaggcgcctggcatcatgatgaatattcttcgcttttcctctgtatttatttgtgtaattttgttctcgggatttgtggctctggttgttgctattattataattatcgcgattaacgcttgccattttatgcggcctcagtgtttatagtttttccacttcgcagattttctgtctattcttcaaaaccatttttattgtcaatattagcactattaacactctaattagatgcaatgtgttcatttgcattaaaatggaacgaacaaaaaataaactatattactctacttctaatgaatactttcagattttaaaaattataagttgttctgtaataattcattgatcttcttaggcttcgtaatttccacatgaagcacttgccattactgcaaacatatattctaaaagatctgaattgtttttgaaaacaagctacatatttctgaatgcccatttatagcccaagctgtttacatctttttggtcttcttaagcggaccatgacttgttgttctgtacactttaatggccagtgcgagggatcataaaagctatctctaagtgaacaaaacgagattccatgactgcactcattcgcttagtccaccaacatatagctggcgaatttattgcccgtctggcagtcaaaaatgctgaaatttcgcattgtttttttttgcacttgcctatgacattttcagtgcattttggcagtgttttaatggcggtcaaaacatccgatatttatattgagcagtcataccatataatgtatgcgagtaccgcaggaggagtgtggcaaatatgtgctgtgggtgttgcatacccccgggcgtgccgctacttggtcgctcatcaagcatacgccgcgttggccagccaaatgaaaatagtgcagaggcgtcatttctgaagtgggtagatgattcgagctgccgtcataaatgagttgcatgtccaattgggctctagatggagctggaactgcagctgcccacgcacttggccagaaaagcaagtaccagaaatagagctcaggctctctgaatctcgaaagtaggtcaaatgcgaaatgcactctcctacacggtgcaaaacacatatatacatacatacacacacagttgcagcgcaggccgcaggcgaattttcaattggtttttcaggggaagcggaggagcggactgcaacaagagcagcaggtgcgcaaccaaatcaaattggatgcatgacctgcgggcggggtgtgagtatgagtttggatagtgggtggttggttgggttgccttagcttgggatatctacaagccggtagcttgtagcttgtgcttgtagccatgaaccatccacctcaatgcaagcccgagccccaaactcaaaccaaagcaaccccgttcccaccgatccggatccgaatctgaatccgagtgaggtgcccctgccgatagcagcgaagggctaaaagtgcgtcatcaatggccgccatggaaaatgacgacgatgccagcggaaccgaaaaccaaatggggtgaggggctggcgttttttttttttctcttttggtatgggggtgatgaatggaagggggatttgccttgttaattgcctcgttgtcgacgctgttcattcataaccaaagtgaatggagaacaacgggagcagccacaaagggcagccctttgagacgatcaaaaaatacgctataacgtggtttctatatataattaacaatgcaaatattaataaaaaatgtatatgttataaatgaaatagaaaatattattactaattaagcaagtcaatgaaattcccaaaaagttatctatttatggccattatcaatatgttatgtagatgccaaacacaactgattttactatatccccttctcggatagagtatgataaacagactttcggggtcgtcagcttggctggatcatcgcacagaatgaggggaagtaggagaatgcgaaagagcgataaagaggaagggcaatgctgacgttgcaggccagccggaaaaaatctccagtggaaagcacttccgacgctaatgaaatcaagccaagaacgattaaatgtcggttagccagggcaaaatacagatataacaagcagtgtgagaactgagaaagtaatcatttaaaactgggcatacatacctagaattatgttagaaggtgggaaaactgtcatttcccattttctatggtgtgtaaaaatattttgcagtttgctggagaaataaaaatagatttagttgtttttcatttcaatcaggaaaagattttgctatttaaaatgtgaaaacaagtgatcaatttcgaagtatttcatttatttaattttgaattttaaatatttgacccacttttctcgctgtgcagagaaatttcggagattttgatttatgcgtgtttgatatgcgtcatccaactgtctctttgcgaatgtgcttttgtgtgcgcctatttattattaagcatgtccagctatttttaattcaaggagttcttcttctttagcctcccttcctgttttcgcatgtaaatgtgtgtgtgtattcttttggctacacctcaattgaattgtataactctcctttgggcaaatatcaattttaattgtgcttcctcttcacgcactacgcatgtcaacttgtgcgtattcaattgtccctaacctccaactccccctgctccgttttgtcctcctgcttcgtcctttttccacgcatgcatgtgtgttggtgtgtgctttaaatttggctttgtgctgctgcttcttgctctgcttcttcttcattctcctttgttattcttggttttgttgctttgggccaagggaaaaaggaaatgcgaagagaagcaaaagtaaaagtgtgttgagtttccaacccaaaatttccccacacacacggacacacacacacaaggaaggcagaaagaaaagcatttcgaaaatttccccatgcgttggcatcgctatttgtctgcttatgcttatctacacaaaaaacggtagaaggaggaagagagagcgagagaaagcacacaaaatttgctggtatacataatgcaggcatgcaacaaagtggaaagtaccgaaaaagggaaaaaatacaccgatttcaagcgctgacccacagggcgtatacatgctcagctgttgcttctgcaatcccagcgcccaaccacctattgcacgtgcaacaaaacaacaacagttgaaagaaagtcacaaggaaaagcctctgcaagagcgagacagctggctgggcgaactacagttatgttctgcattcgcaactgcagcgagcgtcacgtttgtccttctccgtctctcttcttcgctctgcttgcactgcttgacgactgcccgctgttttatttataaaacgggccaaaaactaaagcacattcacgagttcattcatgacgtcagcactgcgcctcaggtcagcggcctagttttctgctttctctctttcccaaccgccgaacgccaaacgcaaactacccgccgccccctgcccctcccccctgcacacacaaagataattatgcatttacatacacacgaacgcagcaagtgtttgtttgtgtacgcctccccaacttttgtctatgtgtaaatacaacttttacggcaggctaaaaatagaactatgatatctatgttaagattgctgcacacaaaatgagagcataaatgcatatgtagagtagtagcaggagaaagtagtgcgttttaatttttggctggtattatagaaaaaagtctcttctcttaggaaagaaaatcttgatcactcatcaatgcaaattagtacaatttaaatttgcattgctttgcactttctcaaaaaagttactaataatatagtatcatacataattatcatttttgttccaaaaacatcttatatccttcagtgcaatgagggttaacatttaggccaggtgatagaaaaaacgggacggctagagagcggccttagctatctgatacgagtaagagagggagataagcagtcgcgctttgtacaatgtgcccgccccgcccccctctcccattgtcactctactcatgctggttgcattaccttggccacttagctcagagcttgctacttgcgttgccccctgccacgccccctctggcgccctgcggccaacttcaatgaatgtgccgtcgtccgtgaactcggcaactatgaatggcatgcaggctaccaatgacgcggtgactttgcggttgcacgcagggatggtgcaccaggggggtcccaggggcccaataagcacacagttctgaaaaatatctatcagaaatcagaaaaccttatatgaaaggatggtttatttgcaatcgaattttataaacatttaaatgaataaaaaccaagtcttgagatattacgtatacgcaattttttcatatttttctaattttgaaagatattacgtatacgaagtgtcacaccagccagttccctttcgataagcactcgacattgtgatctcattgaaataacttctgaacttttgccagcacattgcataaccacatctctcctccactttcagtttgcaactttatcattcacgaacgatgtgtcagcagcgtggtaacgccctgttccggcatcgctccatgtattataaaggtacgtagccggcggtgaagctcgcattcacaattcagaacgaacgaatatagctgtcatgtgtcattccattccgcacagaatcccgttgcccattgttggtccgagccaactcatcacaagagaaaattctgcacagtttgccgtaagcgattggatgaaacgccagcggtgcattgtttaggtaagtgacagaatatatacatcagtccactgtcctccttctgtttccgtcctgataatgggtttcgcagcagtcgttttccgtgtcagtcacttctgttcacctgcgatccattgttcaagccatcaagcgttcattttgttctatatagacacatgccttaaccccatggcataccaattttcaaatggtgttgccataaaagtatgctacgttccaagtcacatcggatcgcaacagttcactttagtcatcttgttattaggatacctaattgagtatctctagaggttccacatatctaataatatatctatccgcagtctgcgaatatttcgcgcatattgagtgccaagattttgccgtgcccgattgcaccgagaatgccacgtatgtgccaggcaaggagctgcttaatgtgaagcatcaggtgagtgtaatcgccatgctgggaggatcagcaatggataatcgtccaattatcgtccaattacagcatcactggcgagagggcaatcttccatcaacgtccaaatgcgcttactgcaagaaaacctgttggtcctcggaatgtctcactggtagataactttaactaaacaatcctacaattatttattaatgttggaactttacgaacaggctatcgttgcgagtggtgtggcatgacgacccatgccggatgtcgcatgtacctgccaaccgaatgtaattttggtattctacaacctatctacttacctccgcactcagtctcgattccgcgcaccgaggtgcccatcgaggccatcatcggcgtccaggtcaaatcgaagacttcgctcgtgcgcgactactcgtgtcgtaagtacagagtcctgatccggcaggatatgctggcatttcagatttatctggccctatcaaaaccaaaatcctaatcagccagatcctacactgagaatagttgtgatcctcgtatccttaataaaaatcaaaaactgatttttatcgagatcaaatcacattaaaatggcattatttctcagtgtaggctgacgcactcaccctctatagcgatgtagcaatactcacccactcgccccaaaaagttgctatcgatgttgtgttgtgtgcacactccgatcactgaaaaaagaaaaaacaaatcctaaaacaagtacaagaactcccaacgatcagataccacatcgctccagctcattcagatcatggcagaccatcactctatctctatctatctatcactccaccaatcaattaatcccaccaacgattttcctcgattctcccaatacttttttgatttttgatttagttttcgttgtgtttttcttttcttttctttttctcttttgggttttatggatgcgttttatatacgttttccgttgattgatgatgtgtctatctatgtgtgtgtgtgggcgccaccggcagccagtccggatttgagctgcccgataccgggcgccggatcgggttcactgacgagcctgggcctgaaggagctgctcgagctccacaggcaaaggcttgagcaatcgaaacaacattttctcctttccacgccgcccacgcccacctcctgtggctccatctcactgtgccactctccgacgccctcctcgctgacagtcggcgagacgagcaacgaggcggagcaagatcgggagcgggaccaggatcagccggaggaggagcccgaagaggagaacacggagcaggacagcgccctgcagctaaccacctccacttcgaatgtgattggtaatcttcagaagtggccatcggccaactcctcgctgcacctgctctacacgaatctctttcggaaacttggccagggcaagcggaggcggaaaaggggcatcagcagcggtggcctctcgcccagcgaagatgaagacgatgtggacggcggtgtctgtgatataagcggtggcgatctgagcgatgattacgaccactgcgacgttgccctgcggcggcgatccctgcgcagccggcagccgcgggacgtcagcgagacggactatcacggggatgccgaggcggaggcggagggtgagactgtgccgcgggaaagctgctatgagacgtcggacacgggcggcgagctgaccaataccgatgacctcgacagcagcctcaatctgattagcaaccttagctataatagtagtaataatagcaatgcctgcaatgttcctggcggagcaactgcacccgacgccaggaataccgccaccaccagcaccactgccccgggaaagtccggacacgccttgagcgtccagggcggacgccagcaacccaagactggggctctggcccaaatcaaacccaagcccaaacccatactcatgcccaagcacaaggcgcagggcaagggcggctccctcagctctccgctgtccaactccaattcgagtgactgctcctcggcatcgccctctgccccggctacgctgctgcagctgtcgccggtgggcaggagtaagtccttccaggagtcggcggccataacggctgtgtcgcgctataagaagtacggacgcggtttgttccagcgccgacgctcgaagagatcgcccaagaatgcggtcggtgtgggcggcaagagcaactacagcctggacaggctgtcgcagaatattgagatcaccatccaggacgaggatggcaacttccatccgtacgacgacaactatcatatgctggccgggcgactggacgccaccgatgtggacgacgatgttggcttcgatgatctctacctggacgaccggccgagcggggccagtgatgatgtggcctttgccggcgacatcagcgacggcggggccagcagtcgatcgagggccagtgacgccagcgatggtcatgtcctgggccggctgctccgccaggtgcggcagggcctctccgtcggctggcgcaaaccgcgctaccagaagcgcagaggtgattagccaaccgtactcctttcacttctttctctctctttgtctttgtctcagtccctgctaaccgaaaggatctgggtttttataaaggacctcagtatgcgctaaccactctgttttggtttttgttttggttgacccgtccccgttttctgttcaaccacttggccataacccactaatcgctaaccatcgaaccactaatcatccgcaccattccgccccacattgcaatgccactaatcattaacaccgacataaccgcatgataaatactcggaaggatatgtattaaatatatgtaagacagaaaatagcatttaaaacgaaataagcatttttaaaaagaactcatttaatgcacatttttccgaatgtaaactaagtatctaacaccaggccaaggccgcttttgttgctactaaacaatgtatgtcccagtgaggatctgaccaagtactaatccacatatctgtgatccccagcacgcagcatatccgaggagttcagcagcggcgacacacctcgtttcaaggacgaggagtcggccagcaaggccgaatcgggacatggacccagcagtggtggtgcaggtggtggaggcggaagtggcggtgctggaggctcatccgcagctggtgcatcggcatcggctgccggtggctcctccgggcactatagacccgattccggttccggtcacaaatcggataaatcggagaaggatcgcgagaagaaggagaaggagcgcgaggaaaaggatataggtgcgaatggagtctggaaaatgagaactacaaacttaaacttttccattccacagagatgatcaaggtgttcgatggcaacaactcattccgacgccagcagtaccgcgtgatcatcgtgcagcgcacctatacgctggagcagctgctgaccaccgcgctgcgggcattccacattacgcgcgacccgcaggccttctatctgaccgatctgtatgcacccgccggcatggaggatactccgatgctcgatcccacgcccgtgctaaacctggtgcacctggagggcaagcgaccggccatatacctccggttccacgaccgtgaccgtggccatgtgcgcgtctaccccggcaagctgcagtgctcgatgctggaggatccctatgtcagtgttcctgtagataatagcacagttattaaggatttgatacgcgatgccctggacaagttcgggctgcaggataaccagatacaggactacaggtaagctgtacattggcaattggttttaaagcatcaataacctatatccctaatcttcgccaggtgctcggaagtgttgctcgatcgcggcgtgaccgaacgcattttgtcgtggaacgaaaggccctgggatattatgaagcagctgggcaaggactccattcgacagatggagctcatgcggttctacatgcagcacaagcaggatccgcatggtcccaatatcgcgctgttcgtgggcaatctgcccaccggtctctcgcagcgcaactacgagcagatcctcaacaagtacgtaaccgacgaaaataagttcatcagcatcggacccatctactacgagtatggctcagtggtgctcacctttgaggactccatgaaggcggtgggtatctaagaatttaccaatgcctgagtggaacttaactaatgggatgtattgcctgcaggttcgcgccttctacaatctccgcgagaccattatcgaggacaagaaactgctggttctgctcctgccgaacatcgagcccagcatggtgccctcggatgtgagaccactgctggtctttgtcaatgttaagtccggtggttgccagggattggagctgatctccagcttcaggaaactgctgaatccctaccaggtattcgatctggataatggcggtcctttgcctgggtacgttcaacctataaccgtgtttgtgattcgcccacttatctttgattctatcattagtttgtatgtattccggcaaataaccaactacaagattctggtttgcggcggagatggcaccattggttgggtgctgcagtgcctggacaatgtaggccaggactcggagtgctccagcccaccttgcgccattgttccactgggaacaggtaagtgacagcgacatgagcctccttttaaaccagatgtacttgtgcatatgcatatgctttatattatatatattaaaatcacttaacttcttccatcaaaatcttctcaaggcaacgacttggctcgcgttttgtgctggggctccggctacaccggcggtgaggatccgttgaatctgctgcgcgatgttatcgaggcggaggagatacggctggaccgctggacggttgtcttccatccagaggacaagcccgaagagccggctatgaaggcgccctcgcaaacaaccggtaagaagaagaaggcacaccaagcacacctatcgcaatcgcaacaaaccaatcagcatcatcaattaccggctctgacatcgagtgatatatcaggtcatttggtgttttcaaaacttcgttcgtgtgttctttctctacgttacatactcgtaaacccgtctagtgtctaacccttgaagaatccgttccagtacctgtcccagtccttgaccacgcccgaaccttatattttgtgttgtgattaaacctgtgctttgactaaataccggattcggctgtaatattccgccaattacacgtaaatccaaaatatcaagactgtacaaatgtagcatatgtaaatttttaaaggctatctttaactaacttgtttttttttgataaatgtatccaaactttatctggtaatactttgtagttacaggaacaaagatccgctatagaaatttaataggaaatacttttgttaactctcaagatatagaagtcgtacgtctttacagtgcacaaaattaaagtctctccctaagataccccaaaagaaaccccttatgtaaccacaagcctagtttggtatctgatgagaaatgctgtttagtttcgatgtgtaaaatatccttgtagggatttgcatgtcacaaacttccggaaaggtaagctaaacaccgatcagctcagacactacaaggttcaaccattaattaggtaaattaagccatggatattatacacctcgatgttgtcagttaaatatttggtgtcctgtgtcgatgtttaatccgagtaatatgataattggagatgactaaacgatcttggcgttccattcaggcggtgcccaaaacgaggataactctcagatcttcgtgatgaacaactactttggcattggaatagatgcggacctctgcctggacttccacaatgcgcgtgaagagaatcccaatcagtttaattcgcgtctgcgcaacaagggctactacgtcaagatgggactgcgcaagatcgtgggtcgcaaggctgtcaaggatctgcaaaaggaactgcgcctggaggtcgatggcaagattgtcgaactgccgcccgtcgatggcatcatcatcttgaacattttaaggtatatatcatgtctttttcataatgtaacattcctggaatgcaacctaatgacatttttcagctggggcagcggtgccaatccctggggtcccgacaaggacgaccagttctcaacgcccaaccattacgatggaatgttggaggtggtcggtgttacgggcgtggttcacttgggtcaaatccaatccggaattcgtacggccatgcgcatagctcaggtaagcacaaaacctttgcttgggattagataccacatcattaatttattatcatccagggtggtcacatcaagatacacttgaataccgatatgcccgtccaggtggacggtgagccctggattcagagtcccggcgatgtggtcgtcctaaagtcggccctcaaggtaagtggcttctttcggatttggcctacacttagccgattccctgcatgtatctgatgtttctttgttctatggcatgctggcttcttaaaagatatcctcatttcatatttaagttaacacagacaaaacatctaagttcacgtcaaaaaaaagcttatttattgaatatttcgagggcaacacgtataattttccatttatttcaattattacacccattaaccagaactaacttagtgaaaaaccacagagcatacgtgacagttgaaatgtagatataagtaatacatataggcacgagaaaaggaaccgaaattgggatataataaatactaggattgcctgttgttttatttccttagtgcaataaagacgaaaagtaattgttaataaccaaaatatgatgacaatcggtactaataattactgtaagactcaaagctttaatagttggttaaatttatagttggtactgaaaacgatcgtatattactcattaaaacggatccgattgtcatcgaacttgaaacaatgtaacattttgtctgcgtgtgcgttggatatgcgtgttttgtatgttaactttgtaatttgtcccttggtaaatcccgccccttgtgtcgtaattaattaatagagcacacaccaattgaaacaccccgagccaccccttctaaccatgtaaaatagacactttttttctgcatttttcatttgttgatggcagctcaaaagaaaaaaaaaatatatatatatatattgaaaaataataattgcaaaactaatgaaatcggcaaaagaaggactgtatgtagcgttctaaaatgtttctctgtttgatgtgcgtgtgcctgtgtgtatgtcggatttgaccatgtgtgtgttttacgctatatatttaggccaccatgctgaagaaaacgaagagtaagcgccgcctcacggagcctcatatctcgccggcggttctgagtctttcagtggctcaacagggatcg

SEQ ID NO: 12443 - DNA, 5036 bp, DROSOPHILA
tgtttagtgcagcgccagaaattgtaaataattaacagttaaaaactcaccaccaaaagaaagttataaacgaaaacgcttaaccaaaccaaagatgcatgaatatgaatcaaagcaaatatgatacatagccaatatgtatatagaaactagtaaggataaataaagttcaaagcgaggaaaaacaccgatcccgacaagcaaatgtccggataagggagccgctacctgaccaatggatgaaaatgcagccgtcgtcgccgtcactttcgccgtcgtcactatcgcatcgcttttgtcagcagcaacaggaaaagtcggaaaagcaccagcagtaccagcagcaccaggagcagcaacagcagcagaaggagcagcaggatcagaaggagcagtcctgccacgcccacgccaatcgaacgccctcggtcggtacggcagcgctggctcagctggcgtcgacgcccgcaccggcagcagcggcctaaattgcccaaccgcaagaatcccacttcgaaatagcccatatacacagcagcaggcgatattgcaactgcaacacatactgcactcgcagcagccgcgaatactgctcatataactgcaacatcgagaggaagtggggcgggctgcggacacaggcaaacaaaatggcggatggtgggcattcattcgtgaagaagacatttcataagccaacatactgtcaccactgctcggatctgctctggggcctcatccagcagggatatatctgcgaagtttgcaactttatcattcacgaacgatgtgtcagcagcgtggtaacgccctgttccggcatcgctccatgtattataaagaatcccgttgcccattgttggtccgagccaactcatcacaagagaaaattctgcacagtttgccgtaagcgattggatgaaacgccagcggtgcattgtttagtctgcgaatatttcgcgcatattgagtgccaagattttgccgtgcccgattgcaccgagaatgccacgtatgtgccaggcaaggagctgcttaatgtgaagcatcagcatcactggcgagagggcaatcttccatcaacgtccaaatgcgcttactgcaagaaaacctgttggtcctcggaatgtctcactggctatcgttgcgagtggtgtggcatgacgacccatgccggatgtcgcatgtacctgccaaccgaatgtaattttggtattctacaacctatctacttacctccgcactcagtctcgattccgcgcaccgaggtgcccatcgaggccatcatcggcgtccaggtcaaatcgaagacttcgctcgtgcgcgactactcgtgtcgtaagtacagagatggatgcgttttatatacgttttccgttgattgatgatgtgtctatctatgtgtgtgtgtgggcgccaccggcagccagtccggatttgagctgcccgataccgggcgccggatcgggttcactgacgagcctgggcctgaaggagctgctcgagctccacaggcaaaggcttgagcaatcgaaacaacattttctcctttccacgccgcccacgcccacctcctgtggctccatctcactgtgccactctccgacgccctcctcgctgacagtcggcgagacgagcaacgaggcggagcaagatcgggagcgggaccaggatcagccggaggaggagcccgaagaggagaacacggagcaggacagcgccctgcagctaaccacctccacttcgaatgtgattggtaatcttcagaagtggccatcggccaactcctcgctgcacctgctctacacgaatctctttcggaaacttggccagggcaagcggaggcggaaaaggggcatcagcagcggtggcctctcgcccagcgaagatgaagacgatgtggacggcggtgtctgtgatataagcggtggcgatctgagcgatgattacgaccactgcgacgttgccctgcggcggcgatccctgcgcagccggcagccgcgggacgtcagcgagacggactatcacggggatgccgaggcggaggcggagggtgagactgtgccgcgggaaagctgctatgagacgtcggacacgggcggcgagctgaccaataccgatgacctcgacagcagcctcaatctgattagcaaccttagctataatagtagtaataatagcaatgcctgcaatgttcctggcggagcaactgcacccgacgccaggaataccgccaccaccagcaccactgccccgggaaagtccggacacgccttgagcgtccagggcggacgccagcaacccaagactggggctctggcccaaatcaaacccaagcccaaacccatactcatgcccaagcacaaggcgcagggcaagggcggctccctcagctctccgctgtccaactccaattcgagtgactgctcctcggcatcgccctctgccccggctacgctgctgcagctgtcgccggtgggcaggagtaagtccttccaggagtcggcggccataacggctgtgtcgcgctataagaagtacggacgcggtttgttccagcgccgacgctcgaagagatcgcccaagaatgcggtcggtgtgggcggcaagagcaactacagcctggacaggctgtcgcagaatattgagatcaccatccaggacgaggatggcaacttccatccgtacgacgacaactatcatatgctggccgggcgactggacgccaccgatgtggacgacgatgttggcttcgatgatctctacctggacgaccggccgagcggggccagtgatgatgtggcctttgccggcgacatcagcgacggcggggccagcagtcgatcgagggccagtgacgccagcgatggtcatgtcctgggccggctgctccgccaggtgcggcagggcctctccgtcggctggcgcaaaccgcgctaccagaagcgcagagcacgcagcatatccgaggagttcagcagcggcgacacacctcgtttcaaggacgaggagtcggccagcaaggccgaatcgggacatggacccagcagtggtggtgcaggtggtggaggcggaagtggcggtgctggaggctcatccgcagctggtgcatcggcatcggctgccggtggctcctccgggcactatagacccgattccggttccggtcacaaatcggataaatcggagaaggatcgcgagaagaaggagaaggagcgcgaggaaaaggatatagcgcacctatacgctggagcagctgctgaccaccgcgctgcgggcattccacattacgcgcgacccgcaggccttctatctgaccgatctgtatgcacccgccggcatggaggatactccgatgctcgatcccacgcccgtgctaaacctggtgcacctggagggcaagcgaccggccatatacctccggttccacgaccgtgaccgtggccatgtgcgcgtctaccccggcaagctgcagtgctcgatgctggaggatccctatgtcagtgttcctgtagataatagcacagttattaaggatttgatacgcgatgccctggacaagttcgggctgcaggataaccagatacaggactacaggtgctcggaagtgttgctcgatcgcggcgtgaccgaacgcattttgtcgtggaacgaaaggccctgggatattatgaagcagctgggcaaggactccattcgacagatggagctcatgcggttctacatgcagcacaagcaggatccgcatggtcccaatatcgcgctgttcgtgggcaatctgcccaccggtctctcgcagcgcaactacgagcagatcctcaacaagtacgtaaccgacgaaaataagttcatcagcatcggacccatctactacgagtatggctcagtggtgctcacctttgaggactccatgaaggcggttcgcgccttctacaatctccgcgagaccattatcgaggacaagaaactgctggttctgctcctgccgaacatcgagcccagcatggtgccctcggatgtgagaccactgctggtctttgtcaatgttaagtccggtggttgccagggattggagctgatctccagcttcaggaaactgctgaatccctaccaggtattcgatctggataatggcggtcctttgcctggtttgtatgtattccggcaaataaccaactacaagattctggtttgcggcggagatggcaccattggttgggtgctgcagtgcctggacaatgtaggccaggactcggagtgctccagcccaccttgcgccattgttccactgggaacaggcaacgacttggctcgcgttttgtgctggggctccggctacaccggcggtgaggatccgttgaatctgctgcgcgatgttatcgaggcggaggagatacggctggaccgctggacggttgtcttccatccagaggacaagcccgaagagccggctatgaaggcgccctcgcaaacaaccggtaagaagaagaaccaaaacgaggataactctcagatcttcgtgatgaacaactactttggcattggaatagatgcggacctctgcctggacttccacaatgcgcgtgaagagaatcccaatcagtttaattcgcgtctgcgcaacaagggctactacgtcaagatgggactgcgcaagatcgtgggtcgcaaggctgtcaaggatctgcaaaaggaactgcgcctggaggtcgatggcaagattgtcgaactgccgcccgtcgatggcatcatcatcttgaacattttaagctggggcagcggtgccaatccctggggtcccgacaaggacgaccagttctcaacgcccaaccattacgatggaatgttggaggtggtcggtgttacgggcgtggttcacttgggtcaaatccaatccggaattcgtacggccatgcgcatagctcagggtggtcacatcaagatacacttgaataccgatatgcccgtccaggtggacggtgagccctggattcagagtcccggcgatgtggtcgtcctaaagtcggccctcaagg

SEQ ID NO: 12444 - protein, 244 aa, DROSOPHILA
MADGGHSFVKKTFHKPTYCHHCSDLLWGLIQQGYICEVCNFIIHERCVSSVVTPCSGIAPCIIKNPVAHCWSEPTHHKRKFCTVCRKRLDETPAVHCLVCEYFAHIECQDFAVPDCTENATYVPGKELLNVKHQHHWREGNLPSTSKCAYCKKTCWSSECLTGYRCEWCGMTTHAGCRMYLPTECNFGILQPIYLPPHSVSIPRTEVPIEAIIGVQVKSKTSLVRDYSCRKYRDGCVLYTFSVD

SEQ ID NO: 12445 - DNA, 7083 bp, DROSOPHILA
agcggtgctagctactcacgtcatgtcctcgtcctttttgtattcccttgaggtataaagtttgtataactgaccaacccttccagcatttatcgtaagcattgttttcttactgagaaaaacaataaaaataccaatttaataaaacttttgctagcttttgttcaggtcgtagaaccagacggtgtttactccgtcctctataatcttcacgtgctctaggctgggtagtggaaagcggcaggcgataatcttggtgttgtgcggacactcagcaatgagtttgtgttctagatcttgcatcatctgctcaaccccaaaaatgaccacgaagttgtagtcctttatatcgaacttccagagatctcgccgaaaaaatctcgtccgtttggaaacgctgtgacgcagcgcggccaggcgcgagtagtagaccagccatgggtttagctccacgccatctgcttttagagcaccacaatgctgtgccgcagctggaaagaattacataagttatctgcaatgtttttaaatggactaggtgaagcgtacttacccactacaatccgtccgtcgccggatccaatgtccagcagttttccggccgaattcttgggcaggaagctgagaacgttctgtatttgctcggtcgtcgctggcacataaggcaagcaaatcctccggaatgcaggcgccacaaaggaggcgcacacaatcgacagaccgatacctactccgcccgttgctgctatcaggatcttgccgcccgtggacatgccacttttcggcgtcttggcaagcggattcggagcagattcgttgaggagttccatttctattatcagaaattcatgtttacctcaattgcttagtattcagcgattatttatcgatagctggtagccctgcagggggcgctgttacaacggcgttttgcaccactggaccgtgcacactgtttgacatgtggcaacacttttttcgtgcgtttgatgtgtgcgtgcgcttcctattacaattttttcgaaggatttttcgtgtgtcttgttgacgtgcagcgcggcagaaagtgaaaaacgccatcaaatagtgccgtgcaacagggcgggtcaacgtttggcataaattgcagtgtgtgccccgcgtgcggacaggcgtaattcgaaaaaatggcgaacgtaagggacagcgacacatcactgtggctgcataataaactgggcacctcgaacgactcgtggataaacggctccatctgctcgcagctgaacaaggaggtgctgcgcaacatcaaggaatgcttccccgatctgcaaacgcaggtcaaactgaagctcctactcagcttccttcacatcccgcgccgtctggtggaggaggtaaatgaaatccaatgaattgaaatggcgttggtgtatggaaaaagtacaccagtgcatacgcacgcatactgcggcccgcgcgcacacgtacacggagtacacttaccgttgttgaaacaaaaagtgcggacaatttttaaatactcggaaaatctcttagatcccatcacctggcggaccccaaagcacatttcttcgccttttaacatttcccccccgggcgatttcgcgggttggtgaaaataaatattagcaacgtttcccgccacttctgcttttgtgtacacatttctctctctccgacacttgtgcgtggatttctctcccgtgtgcctcggtgtgttcatgtgtgagtgggctgttgtgggtggccgcggattcatttgtttgttgtgcccttcccacagagcaattcgaattttatcagacgtttgacatcgcagttaaaagatacatttgtatctccaggctgctgagctggtagaccaagtataaatacaaataactattgattttttatttgatttgcaacgtgccgttatagtgtaattaaaatctgtatttaatcgatcataccaggactaccagatcgtaaatattcattgtatctattacctgaaagtgtatttgagcatcgagttgtcaatttatttatgcaacccaacccattgttgatttgattgcaatttgcagtggaaggcggaacttgaggaggtgatcgaggtagccggcctggattcagagctatgggtttccatgctggcggagacgatgaagacctttccggcgaccagttcgctcaacaccgagatctccgattacgaggacacgcgtcccatcttcatagacatggtcaacgacctgcgcaagctggtcacaaagcattcggacctcggcatgctgcctctggagtgccagtacctaaataaaaacgcactgatctcagtggtgggtatagacaaacttactaaatcttacctgttttgaactaataattttttcttgtttaattcaggtgggccagcaacccgctcccgtcaagcattttacgctgaagcgcaagccgaagagcgcccagttgcgcaccgaattgttacacaagtcagccgatgcgcagtcctcgctgaagaaggcctcggcccccacaataccgctgcgatcgcgtggcatgccacgtaagatgacagacactaccccgctgaagggaatcccatctcgcatgcccaccactgggttccgttcggccaccgtgccgggaaatgccgcccagcgccccaatctcagtcgaacgcctgctggacgcaaagacggtggcattaaactgatcgaattcaccgaacagcccttgggttatgcggcggctaagaagcgaaagcgcgagcagcaactggaagagcagcaaaagaagcaggagcagaaacagcaacaggcagctgcagcggcagctgcggccgccacagcagcggcaagcaatgctggtgacagctcaccaacggacgcggcgactgccagtggaggcgaaacacccgtcacgcccacgtcagctaacaacagcttcgaaatcaaaatggaaccgcagcaactcaaccagagcgctggaagcctggaagagccgcaagacgatgagatgtctggcaaagcgaatatggaatgcgatatcgagacgccggagtacgctacagccacgctggactttgcccaggccacttcgacgtccgtggcggatggtcaaccgggaaaaccagcagtagaaacgaagctgaagacgccgcgaactccgaaatccgcagcaaaactgaacaacaacaacaacaacaacaacaacaacagcttcaatcacaccccaaaacgaatcaagcaggaaatagagatcaagagcgaggagatcatagtacccgccagcatcaaactcgaaaagatcgaaacttcaccgtcgacccaacgcgtcagtatccagcaacagccgcctagtttggtgcagcgcaccccgcacctgcttatccgcagttcgccgcagaagcggcagaacaacggggcaaccacgagtgcaggcacaaccacaaccactgtgggcaataccaccatcaagatggagaagctggacatcaagccaatgatacgcgccaccggtgtctcgccttcgacgagtgcgggcactacgactacacttcttaccccgcagcaactgcgtcaggcggccaatccgttggccaatctgcccaacaatatctccgtgaagataacctctgccaaggcgaaagcggcagctgcagcagcggcaacatccagtggcagccagactcagtcgcagcagccgcaaacgttgcaggttcagcaggcgcctcagcagtcgcatcccccgcttttgattaacagctccacacccgtgatcttggcgtcctcgcccagcgctcagagagcggtaagtataaaattatgcgtagctctattggagaacttttagttaggaatttctttaattttcctggacaaatatttgaaattctatcacctgccataatgaaacttagtccctctttgctaattaacttaattcttcggttgcagaaggctttggctttgcctagtagcagtacctccgccacaactaccacgacgataccgtcgcaagccataaagacgatgccactgagccagctgaagacggctaccaacagcggaccagtgatcatatcgcagactattatccagccggcaaagcgagcccaacaacaggctggaacctccagtgcagcggccgcttcgcaacagcagcagcaacaacagtcgcagcagcaattgttacaccagcaaatccagcagcagacccaacagcaggcgcagttaccacagcagcctcagcagcaacagacgcagtatattctagccacaccccagcagcaaccgcaacaaattcaacagcagcaacaacagcaacagcccattttgccaacgcttacctcgttctcacacagtcggcctatgccgcagactacgacgctttaccaagccactactcctagcggaagcggtcagacgccgaccaagattttgctaaagacatcgggctcttcaagcgtggtgatgacgcctctgcgccaagcgcagccgcaacaggccaccgctgtggtgtcgtcgaatcctccgccattggtggccacttcggcggcagtagtttccccgggtcagacaaccctgaacattcagaatgtgcagctacccaatcgaccagtgaccatccaaccagcctcccaagccgcccagcagcagcatatgcaggcccagttgcagcagcagcaaccgcatccacagcacacgatcgttgccaatacgacggccacgcagcagcccaagttgtctcaggttctaatgcagccaactgcagcagttggcaccagtggtgtatccgctctgaacgtatcccctacgtccggaaagaacaagaccatcatactcacccagaagggcgttatactgcgcaacattggcggcgatatgtaccagcaaataccaatcagcaatgtgggcaacatgcagggactcggaggcaccacgctgatgacaaccacagctgggccgccgagtctggtgaagacaacaccctcgagcggtgtacagttgcagcagcaacagtctggaaagcagatcctgcccactctcataccaaccagctcgcttggaggacagcacgttattgtgcagcagcagcaacccaccaatgtcatcgggaatgtaagtgtataaattatgttttgccaaacattattggcaatagaaatcgtaaatctcttttccccacgtccactatgttgctatatgtaaaaatctaaccacatttgtatctatcagtcccaacagcagaccatcattcggcccgttatgaccaacgtgggcggaggcttgaccacgctgccgcagggcctgacgctaattcaacggccgggccagcagccgcagctggtgcaggtgcaggcggcgccgggcagcacgcagcgcacgattattacccaatcgaacacggcggcggcggcgtcgcaacagcagccgcgccagcagcagcaacaaatcctggtccaacacaagccggctccgaccctgcagcagcgtttggtcacctccaccaccagcggtggacagggacagcagggaaatccgaatgcggggctcccgcgtaccgtgcaggtgcaggtgcaagctcagcagcagcagcaaccacagcagcagcaagctacgcaacagcaatcgcagcaggcaccccagcgacgtggactctctctatcggtaacaacattgcacatatttctttaaaattagatttcaatcctgtcctgtggtttcttctagaacgaacacgtgcacaaggcgcacgaaatgttccgcaaggcaaatcgcgtctcgcgacctgacaaagcccttatccttggatttatggcgggtctgcgggaaaacccgcgcccaaataacgaaaacgtgctggtcatcaagttgggcgaaacagaggtaaggctatttgcgatttatttcaagcttctgccttggttaattctcaatgctttatgtcaattgttacaggaaaaagtacaacaggacaacggccacacggcactgtgcctggttgagtcacacatccggctggactacaacaccggtgagtggaagacattccaaaactacaggctgcaggaccagagtgccgcctcatagtccacaagggtcatacgcatagttcgcagcaacaagtgagcagggacagccaggctgcaactggtttgtgcgtatatggattgttgaatatgtattttaatttgtcatccgttctgcatgggctgcttcgctgccgcccctaattaggctattataaaccccctctctcctaaaaaccctcaccacaacctcccgcagtcagcaagacgccctaagaaatgctggatataatgaaactattttataattaagataatttagctgtacagttgtttagaatgtagtaaaggctagcgcttaaacatttagtaaacaggcccgttcgtacatccataaaaacacccattcatccaagcacactggcataatcacctctggctgaacgcttcactggagagcagttggcaaggcggatgggccagaagtgagcgtttggacggatcacataggcacacacacatgcctcacacatgcattttaaaactgcatatatatacctagcttatgtaattgctgtcgagtaaaaagtgtgtaattatcttaccaagcagcataaaatttagagacgctgatcggcgctcgtattcattagaaatctaatgaaaatatatttagttttagatatatatgtatgagtcgcagccaccacagcaaaattaacttaaatcttgaaatgtgtaatagacaaacaataaaactagcatatgtatttatggcttaaatgttaaaacatctgctcttgtgcttgattatggaaaatgtaggtcatgcaaacgtcaactcactcggatattcaaacactcgatcaattgatcaatttggttatcaagtggtctgcgcccaagtggaattctaaagacctattggcgtggtatgtgattgaattttgaaattggctgtaagagcagttgtaataccaataatcattgggaaaataattcctcttatacaatgtataagattgtacattgaaattccgctgggttggaattttggaaag

SEQ ID NO: 12446 - DNA, 664 bp, DROSOPHILA
cgcttcctattacaattttttcgaaggatttttcgtgtgtcttgttgacgtgcagcgcggcagaaagtgaaaaacgccatcaaatagtgccgtgcaacagggcgggtcaacgtttggcataaattgcagtgtgtgccccgcgtgcggacaggcgtaattcgaaaaaatggcgaacgtaagggacagcgacacatcactgtggctgcataataaactgggcacctcgaacgactcgtggataaacggctccatctgctcgcagctgaacaaggaggtgctgcgcaacatcaaggaatgcttccccgatctgcaaacgcaggtcaaactgaagctcctactcagcttccttcacatcccgcgccgtctggtggaggagaacgaacacgtgcacaaggcgcacgaaatgttccgcaaggcaaatcgcgtctcgcgacctgacaaagcccttatccttggatttatggcgggtctgcgggaaaacccgcgcccaaataacgaaaacgtgctggtcatcaagttgggcgaaacagaggaaaaagtacaacaggacaacggccacacggcactgtgcctggttgagtcacacatccggctggactacaacaccggtgagtggaagacattccaaaactacaggctgcaggaccagagtgccgcctcatag

SEQ ID NO: 12447 - protein, 165 aa, DROSOPHILA
MANVRDSDTSLWLHNKLGTSNDSWINGSICSQLNKEVLRNIKECFPDLQTQVKLKLLLSFLHIPRRLVEENEHVHKAHEMFRKANRVSRPDKALILGFMAGLRENPRPNNENVLVIKLGETEEKVQQDNGHTALCLVESHIRLDYNTGEWKTFQNYRLQDQSAAS

SEQ ID NO: 12448 - DNA, 4359 bp, DROSOPHILA
tatataattctcactctgagcctgccgctagacactgggcttacatgatctagatttgtgtataaatatatatatatatgctcgtgttcgtgtatataatattataaatattatataatataaaactcacaaagcaagccagccaattgccgaaaaaaaactttcaacttagccgcattttcaagcacttctattcataaagtaaatctgcattttgattcgcgaaacttaagtatctgcacccgtgtgaatgtggtgatatatataaatatatatattgtttcgaataatataaaagtgagttgaattacaattattggttggttgctgctgcacaaaacgttcttggtccgtgattcccaacgagcgagaggaagagtatgattattattaataacattgattggttaggacttaaaattgagacgatatgaaataaataaaaagcgagtgggataggttaaggtcgatggtcgccaaacctttgggcaatttaagcaatttttgacatagaaattaattgtctaatatcatacttttggtttaaacaacttgaaagcaaataaaatgtttcagatcttaacatttgactatcaaaatatttgccaaataatgttaatatttattttaagtatgcatttggttagagactttttagcttatccaattggattaaattccatttatgtttgcacaatgcctatggattatcgtttggaaacgaaatagtaaactgttaagctgatactaggactgtaatccgtatttcaaaatgtcttacattaaccataggttttctctcaagttaatcgacccattagggctaggatatgttcagttcaaaagtttagaatcaaacgggcgactagcagcattcgaaatttgcgcaacgtcaaactgtgagaagctgacaaagcttcattctcccatcctttatgttactcacattgactaaaacctaatgaaattccctaaaacattgcaccaggttctcactgattcagattttccgccagatccgtacgtttaacccgtctatcaatttcttcgcaatccaaaggtgggcaactgatgggcacaacagcaggccaccacgtacaagatgccaaaaaagaagttcagcttggctgtttgccgaggcaccagatgcatcgtctgttcgttgcggaaacgtttctcaatctggaacgcttgcggcagggttaccagcggcagcaggaaccacagagagtacttcaaaccgaagatgaagaacaatgagtagggtgcaaagagcagcatggcatacagaacgtgcgatgctgtacggcctatcaaaatggcgagcgttacgattccagcccggcgatcgttgtccgcatcccttgtgttgttgctgtgcaggatggcctccgtgttgagagccaaaggaatcgcatagcccattgtcgtccagtccaaatgacctgtttgcgacatgaaggcgaatagcaccgagatgggtccaaagagtatcagtataaccagatctcccagggcgatgtacttgaaaccaatgcctccggtgtacaggaagctcgaggacaatcccccgaagtagatcagtgccaggtgctccattttcgccggactgagcacagccagcaaaacaaatcctccacagccagccatgtacagaatggcacccagcgataccacctgcaaattaacaaatatttattatttataattgcggataaggattaaatctgctgtcatgctgtcataattaatttatgcatattccaattaaattccattataaaacggaaaaaattgtcctatagaaattcgataaaattataaatttaaaagtattattgtttgaatactctctaatatatttgcccttgatttgaattagtaccttgctaattgctaccaattcttgatattgttttcgcttccaaaatggtttatgatttcggcacgtttttttctgaacgtatataaaactaatttaatttctgttcatctgaaatgtacacacatacactgaatgcattttcaaatattttaggtgtttaaaattgtttttgttaatttaaaaagaaaatttgagaatctttgcttcgccactgacaaatttgaatttaaatatcacgttttgccattaaagatttagaagtgctcgcgagtttctttgcatataatttgatttttcggaatactgtatttgcaaatgtggaattttggtgaacacgtcagaaaaatcgaaaaatgtttgaattttacttttttgaagttttactttccgaaggataagagtaggctctatgctctatggacggatctgcactctattggcttgattgatccatccgttcgattgctcacctcatccttggtgagtatgtgatccaccagcgtgcggtcgtcggctttctgcttgtcaatgcccttgatgaagtcgaaataggtgttaactacgttgccggcgcagtggacggtgaccacggtgaaggcggtgagaaagaaggtggccagcgaaaactcctccgcccactgggagcggtaggccagggctgagccgagcagcgttggaaccagactggcggacagcgaccagggacgcagagctaggagataggttttcagtttcataaacgttccggatgtggatgggtgtcctgttagtcgtcccgttagtgctactccggcatctgcacctgctgcacgagctccaacaacggcttccacctcctcaccgtcctctgtcttggtcttgccattcctggacaagttgccattgggcaacagctggctgcttgtggccatggcaagcggcactggttaactggcactttgcggtggagtgaaacgagactagccgccaggtattcgtattcgtcggattgtttgaccttggtcacctcctctccagaatttgtttacaatagttaaagtattcaatttgtgcctttttggatgccggcacatgcgctgcctggtctcgataatcgctaatattgtatacacagcatcttgaaagtggggaatatatgcggggatatgtatattatcagcggggggtggagagctcaggtggtcggggtcccgaaaccacgaaatttcacccgtgcagctcccagtttctcacgctctctctctctcgctgcccctctctctctctctcttttcctcgaccggtgcgaggatcgttcttcttatatgcctctccttttccggctgcgtctttgcttccggctatcgattccgggttagtggcgcaaatcgatttggctgcgattttactcttagttattttaatcaaacaaatcaactgtcacgtcacgtcagcgcaaaaacgaaaaaaggttacactttttcgttgaaggtggcaacgccgtatcgcatgtgcagccctgcctattcctacagtttttacccaaatttcataaatgaaaataattcagataatatgcaataaatatttagcggtacatgtatgtgcattttttatataattcgtaaaacaaaggtgggttttaaatatttatgtaatcattgttatcaacacttatcaacgtaattagtagttgaagtagctcaccaaaatattactatatcttttgcatatttgcggaaatgaatccacattgagtatgaaattcattttaaacacgcgaaacaaatttaatcatatatgatagatttgtttcacaagctagagttacgactgtaccgttgcagccctggtcccaatcagctgataggagtttagagcaaaattttcaataatttttttgttgatttctataaaattgaaataaaacatggactataatatccacaaaatatgcagagtttgcctggaggaactacatcctgtaacttcgatatatagtacagactttgctatgatgccctccgtaatgttgatgcaatgcgctaaaataagagtgggttctaaaaacaaaatatttcaatgttaattggcatatggaaattgttttaggtttttaaaaccgatggcctaccttcggtgatctgcaacaactgtatttaccggctgggggtggccttccacttcaagcaggaatgcgaaaacagtgatctccgactgcgacaatatctgggcattctggaatcctggcgccaggatgcggccaccaatacggactttgtggagaagccgttgcttccgcagcgcgatagcgatgaagaggaacccgtggatgccaaagtgagcaagaggcggtcgcgctatcaaagaaagccgccagaagagcacaaaaaacgggggcccaaacctgtgccaaagatgccccacacctgctacgagtgccacaaaagcttcaaatgcattgcccaattaacacagcatataagaacacatac

SEQ ID NO: 12449 - DNA, 1681 bp, DROSOPHILA
ccaccttcaacgaaaaagtgtaaccttttttcgtttttgcgctgacgtgacgtgacagttgatttgtttgattaaaataactaagagtaaaatcgcagccaaatcgatttgcgccactaacccggaatcgatagccggaagcaaagacgcagccggaaaaggagaggcatataagaagaacgatcctcgcaccggtcgaggaaaagagagagagagagaggggcagcgagagagagagagcgtgagaaactgggagctgcacgggtgaaatttcgtggtttcgggaccccgaccacctgagctctccaccccccgctgataatatacatatccccgcatatattccccactttcaagatgctgtgtatacaatattagcgattatcgagaccaggcagcgcatgtgccggcatccaaaaaggcacaaattgaatactttaactattgtaaacaaattctggagaggaggtgaccaaggtcaaacaatccgacgaatacgaatacctggcggctagtctcgtttcactccaccgcaaagtgccagttaaccagtgccgcttgccatggccacaagcagccagctgttgcccaatggcaacttgtccaggaatggcaagaccaagacagaggacggtgaggaggtggaagccgttgttggagctcgtgcagcaggtgcagatgccggagtagcactaacgggacgactaacaggacacccatccacatccggaacgtttatgaaactgaaaacctatctcctagctctgcgtccctggtcgctgtccgccagtctggttccaacgctgctcggctcagccctggcctaccgctcccagtgggcggaggagttttcgctggccaccttctttctcaccgccttcaccgtggtcaccgtccactgcgccggcaacgtagttaacacctatttcgacttcatcaagggcattgacaagcagaaagccgacgaccgcacgctggtggatcacatactcaccaaggatgaggtggtatcgctgggtgccattctgtacatggctggctgtggaggatttgttttgctggctgtgctcagtccggcgaaaatggagcacctggcactgatctacttcgggggattgtcctcgagcttcctgtacaccggaggcattggtttcaagtacatcgccctgggagatctggttatactgatactctttggacccatctcggtgctattcgccttcatgtcgcaaacaggtcatttggactggacgacaatgggctatgcgattcctttggctctcaacacggaggccatcctgcacagcaacaacacaagggatgcggacaacgatcgccgggctggaatcgtaacgctcgccattttgataggccgtacagcatcgcacgttctgtatgccatgctgctctttgcaccctactcattgttcttcatcttcggtttgaagtactctctgtggttcctgctgccgctggtaaccctgccgcaagcgttccagattgagaaacgtttccgcaacgaacagacgatgcatctggtgcctcggcaaacagccaagctgaacttcttttttggcatcttgtacgtggtggcctgctgttgtgcccatcagttgcccacctttggattgcgaagaaattgatagacgggttaaacgtacggatctggcggaaaatctga

SEQ ID NO: 12450 - protein, 359 aa, DROSOPHILA
MATSSQLLPNGNLSRNGKTKTEDGEEVEAVVGARAAGADAGVALTGRLTGHPSTSGTFMKLKTYLLALRPWSLSASLVPTLLGSALAYRSQWAEEFSLATFFLTAFTVVTVHCAGNVVNTYFDFIKGIDKQKADDRTLVDHILTKDEVVSLGAILYMAGCGGFVLLAVLSPAKMEHLALIYFGGLSSSFLYTGGIGFKYIALGDLVILILFGPISVLFAFMSQTGHLDWTTMGYAIPLALNTEAILHSNNTRDADNDRRAGIVTLAILIGRTASHVLYAMLLFAPYSLFFIFGLKYSLWFLLPLVTLPQAFQIEKRFRNEQTMHLVPRQTAKLNFFFGILYVVACCCAHQLPTFGLRRN

SEQ ID NO: 12451 - DNA, 3508 bp, DROSOPHILA
cagccaaacatcttcctcctcggactcatcttcgctgtcagaactggaactggaacttgagctgctggactcgtcgctactgtcttcgctgcttgaagaactggaggaggaactcgactcttgtttgctctttttctttttggatttctttgactttttcttcgacttcttttcagatttcttgtgctttctcttgccctttttctttttcttcttgggtcctatgtaagaacccttcaccagctccacatcgtcggtttctggccgggaagggctcttgccccagacctctggcacgccttcctcgccgatgagaactctctggtttctgcgggcattcacagccttggagtcacctttgaattggtggttagacgatcctctacctctgtgctgcgacctgaacgatggttcggcgggatcattaatgaaactaccctcgggagcccttccccggaagggattctgccgcctatcgttgttttcatgataacgatcgttgggccagcgttccacggattttgggcgggatttgcggcttctggacgggcttctcgaggaactggatctatcactgctgctgctgctggagcttctggagggcgaggagcgcgttctacggcggcgaggcactgcatccttttctctggagcgacgtgagctgcgattggaagtcctttccctgtggagctccctatccctttctcttttcctctcccgcgaaaccgatctcctatgctgcggtttctggtaagtccttctttccgagcgggatcgagccctagaatcggaccggcgacgttccctttgcctgctgcgactcctgctgcgtgaacgcatgtggaaaatacaagtttttaacaatttcaccggaaaatgcaaaacaaacgtttgtcgctattggtgagcagactcgatagcctacccaatcgatagtagccgctcatcgataggcaacagctgattgagtgattttagctgcagaaggtcacatcaaaacgaactttgcaaattcgctcgccaaaataaagtttattatcgccaaaaatgctgtaatttaaatataacataaaatataggaaagctaccacttgctaaaaatgacacgcattacttggagaggtcactccactcaggagttgctgtaagctttgaaatatcccgctgcacaaatgtatcactaatttgcaatgttttcgtttattgtttacttatttaacagatcgattttgcggcttcgttggtcatatatgaagcactgctggcactccttaactttcaacgcccacatgaactcctcctacgcctcggacgtctgcctgacccctattttttggtttgtggacaactatactcactgcctaggaccggtaacactatgcaacataacatttgttgttcgtatgattaagcgttttaaacttgtttagttttttgtggttggcgtggctgccttgacgacttcagtcgttagtattgcctattggattggcttgcccttttggtgggccaaaagtcagttggtgacctacttcctcctcattgtgggcaactggctgctgctcaatgtggttttccactacgttatggctgtgatcacgccggctggtcatccgccagagggcgtgtccctggtagaagcggttagcatgtgcggcaagtgcatagctcccaaaccaccgaggactcatcactgctccatctgcaatcgctgcatacttaagatggatcaccattgtcgtgagtaccttaagatttctaaagggttcctacattaattttcatatatcccatatatagcttggctcaacaattgcgtgggttatggtaatcatcggtacttcttcctctacatgacgtacaccactctgggttgtctgtttcttattttgtttggcttggagattggccacaaatacctgtggctggatcatggtgaaaactggacggaaattgagcccttggaggggcagccagtcaagtttaacctcagtggacacatcattccagtggtaagccagtaaactaacttgtgctactttctttatttcatctttctttctctctgaacttcagacacatccgaatgagtatgatgaatttgtgctgcctccagccgtgcacaatcttccaacacccattgtggacacagatgccgcttcgcccggtcgacgacgagcgctttggttcatggcgttcacaaacgttgccgtggtcttggctctcggtagcctctccatctggcacgccaagctaatcactcgtggcgagaccagtgtggaggctcacatcaacgaagctgagcgaaaacggcacctccagcaacaacgcatttatattaatccttataactttggcaccaaaaagaactggaagctgttcttgggtctggtgcggggcagatccttttggcgaactgtgctgcttccctcctggcacaaacccgaaggtactgggctgagtttccacacggtaaatgatgctcccttcgaggacgagtggccataattccaacatagaagccattgtgatgtcagcaagtcaatattaagttaatagtttacgtttaagctcaaggtaatagaaatccaaagctcttgattagtaaaatttagtattataaaccttctactcaaaactgtaatgcagtgaaatgcaaaggcatgtactttgtttccatgacgactaggactaggcacaatgacgcttttatactactactagcttaataaaagacacaactagcatacaaatcgttttgcgttgtccttgacatcctgtgccggtatggcaacttgttgccaggacaaggttagggctttgagtttgttcaataaggtgtaaaataactcaagacctaaagatgtcgaaagcttccggatcagaagatgaacctctggtaccagatgacttcgatgatgacttttacaaggaactatgcgacaaaatccctgaggtaacaatctggaatgatgtttccaaacatatgtaataagcatattatgcataggccaccaaagctctgcggcaaaaggatactcccaacaatgcggataatgtccagaggctgctcatctgcggcagtcgctataaaagcgatctcagacttgagaaggaacgctcccaggaactgcgaaaggagattgaaagcctcgaagagcgcttggaaaatgcggctcgggttaccaaattggacatggccaccattgaggagctacgtggagtaataggtaagtagttctcataaatttctaagcaaagaacggctataataatagtttgcattggcagagggtgcctggaagcagaaggatgctgctcagattcgtgagcaatccgctcaggacgaggtcctaagtctgcgcgaaaaactggatgagtcagagcagatggtcgcccatctaaatgagaaacggctggccatgagcaagcgggacgatggcaaggaacgggagcgactcaacgccgagattgcagatctcaacaagcgattgcatttgcaacggac

SEQ ID NO: 12452 - DNA, 1218 bp, DROSOPHILA
gaactttgcaaattcgctcgccaaaataaagtttattatcgccaaaaatgctgtaatttaaatataacataaaatataggaaagctaccacttgctaaaaatgacacgcattacttggagaggtcactccactcaggagttgctatgaagcactgctggcactccttaactttcaacgcccacatgaactcctcctacgcctcggacgtctgcctgacccctattttttggtttgtggacaactatactcactgcctaggaccgttttttgtggttggcgtggctgccttgacgacttcagtcgttagtattgcctattggattggcttgcccttttggtgggccaaaagtcagttggtgacctacttcctcctcattgtgggcaactggctgctgctcaatgtggttttccactacgttatggctgtgatcacgccggctggtcatccgccagagggcgtgtccctggtagaagcggttagcatgtgcggcaagtgcatagctcccaaaccaccgaggactcatcactgctccatctgcaatcgctgcatacttaagatggatcaccattgtccttggctcaacaattgcgtgggttatggtaatcatcggtacttcttcctctacatgacgtacaccactctgggttgtctgtttcttattttgtttggcttggagattggccacaaatacctgtggctggatcatggtgaaaactggacggaaattgagcccttggaggggcagccagtcaagtttaacctcagtggacacatcattccagtgacacatccgaatgagtatgatgaatttgtgctgcctccagccgtgcacaatcttccaacacccattgtggacacagatgccgcttcgcccggtcgacgacgagcgctttggttcatggcgttcacaaacgttgccgtggtcttggctctcggtagcctctccatctggcacgccaagctaatcactcgtggcgagaccagtgtggaggctcacatcaacgaagctgagcgaaaacggcacctccagcaacaacgcatttatattaatccttataactttggcaccaaaaagaactggaagctgttcttgggtctggtgcggggcagatccttttggcgaactgtgctgcttccctcctggcacaaacccgaaggtactgggctgagtttccacacggtaaatgatgctcccttcgaggacgagtggccataa

SEQ ID NO: 12453 - protein, 357 aa, DROSOPHILA
MKHCWHSLTFNAHMNSSYASDVCLTPIFWFVDNYTHCLGPFFVVGVAALTTSVVSIAYWIGLPFWWAKSQLVTYFLLIVGNWLLLNVVFHYVMAVITPAGHPPEGVSLVEAVSMCGKCIAPKPPRTHHCSICNRCILKMDHHCPWLNNCVGYGNHRYFFLYMTYTTLGCLFLILFGLEIGHKYLWLDHGENWTEIEPLEGQPVKFNLSGHIIPVTHPNEYDEFVLPPAVHNLPTPIVDTDAASPGRRRALWFMAFTNVAVVLALGSLSIWHAKLITRGETSVEAHINEAERKRHLQQQRIYINPYNFGTKKNWKLFLGLVRGRSFWRTVLLPSWHKPEGTGLSFHTVNDAPFEDEWP

SEQ ID NO: 12454 - DNA, 5476 bp, DROSOPHILA
atttcgagcatattcggtacggagataatgcagatgcttgccatctatggcaataaaataaataaattaacataatatttttaagctaaaatcaatatacgtaagtaaacctcttttatgaatttatcgagtatttaaatctgcattggcaaatcacatttctattgctaagaaaattatcagttgattactttcgaagttataaaagaaactaaaacgtgcgcctttaaatatcagacagctctacctaattagtttcacataagagtataacgaaaataattcaattttaatgggtcaacccaaaaaggataagtttttcagttctttttacacataaacaacgtaaattcggtgcttttcgtaaaacttcgtctttggtgctattcgcccatctatagaaatatacatatatatatgtatatatatatataaatatatatatatatatatgcatgaagcttcgtatcttgagttttatttttggatgggcgggaaatccttttaagtgtttaatcatgcccaaaaattcaaaaccttgttgtacattctgaaaacggttgctgacaccgctaaaaggtctacaaaagtggagacttacccgaagctctgctgatatttctaatttaagttcagcgcctttttcattaaaatacaattaatatttaaagtgaactaagacagatgaattcaataaataatataatgtatataatttacaatgtgttataatgtatttcataagaacaacactgtaggtaagttataatattaatatcaatttggtttcaatttagttaaaaaatacagatattaactgactcataaaagaatgatgataacgtttgcggcaattaaaatgaaatattttaagtaacttacgttatgggctatatgcacatctacattagtgaagattccaaccaattggttgataaccgcgctatttatcgataagtcaccaatcgacattaacccacctctaatgtatcgcaacataaacaaagttaatattaaataaaggggccataatttctcaacaatttgttgttgagtaactagtaattagctatttgacatgtctctctttcccgcctacggcgctggccgcacctcagcagccggcagtgcgaaacagacgacgaaaccaggtgaagaggagccgtcgacaggcgggaattggaaaaaaaacgagagttacatcaaaaaacatgtgaatatagcaactcaaggacccgaatcggacagttcctccagtacggaggactccgaggatgaggcggacaagcgcaagcaagacgatgttaccaaaaccaagaatgtacaccggggtaagacactagaattcgatagcagcgatgggttttatgtggacaaggtgggcaacagctcctatagaaacatcaaaaccctgaaaaaacccgcaagaccacgctacaaaacccggatgaaacgactgggtgatggaaaatacaatccccatgacttctcaagggctcactccaaattttccctaaaacgtagtcgctacgtcagagagaaactgatcgctgatgcacccagcgaagatgaggtgtccaggctgcaggagcagctcatacgcaccaaagtgctcgtccagcaggaacccgaggtactggaccactggctgcagctgcaccgtctgctcaatctcaacttggacaaggccaatcggctggcggtggcggaacaacagatacacagcctggaaacggccatggagcaccatccgtccaatcaacagattctgcggctctacacgcacgtggccaatgccacctatcaggccaacgaggtaagcgatgggttaatttccgcaggaaattccaaataatttcagtatttatttaattaatttcgatcatattcactgcactgcaatggtgacaaaacaccaaacatgatatttgggaaaaaacaatagccatatgtatgtatggatcatagtaacccggtaatattttgtaaatgggatcaaatagatttgaaacatactgtcagggccagagagtcattacaattcacactttaaaggcgactagctgatatattttttttaaatttgtgagaattatacgaactaaaatttttctaccggttctcacacaaaacactttaatttttgcttatcgcgtgaaattttttcaagtacttttataaaacgaattgtatgtagaaaagaacatttaacatttaatcgacatattttatcaatatacacgatattcttttattcaggttgctaggcgattcgagaaaatgctgaagagaaacccattccagtacacactgtggagcaacctaataatgatcacccaaggcgacatggcttgttgcaacgtgtccgctgtgctccggatttacgagtacagcatgcgccgcatgcatgtgggacacaacgatgaaataacccgaagattcatcattaaggagactgatgtgataatgctaaaactttttcacaattgcttactattcctacgccaatcgggccatactaactggatgtttgctctgattcgtttgtctatggagttgaatttcccctacctgacgttcgaatgcctacaagcacatgcaggaagagaaaaagcattgattggattcgaggaagtggtgctgcgttcgggaatgccgatgcccgagatctggacgcgtgtggagcagctcagacaggcatactgcttcctgccgttgaaagacaagctggcttcgtcgactaatgtcttcaaaaacaagatgaacgccgaacgatacttttgcagcgacaaacttgtcccatatgtacacgcactcaagtcgcagaataatcgtctgcacctggtgctcgtggttgttcaactaatgaaattgcccctgattcgcagcgctagtttggcggacaaattgaatccttgcatcgaggacttcggcgagtctgaggccattgaaatgcttttcgctgccatagtagataggcactcctatgcagtggcttcgttgcaatatcaatttgatgcagccatgatcgacttagccagagagatgtccgtgacgcccagctacatgccgcatcttgttggccataaactgtatgcggataccgtgagtaatatgctactcaaatgcgtcgaagtctttatcggcgaggagtccaagcgacgattgttgcttattctgtatttgcgattccaaaaactattaatagtgctgcacaagtccatgggcaagctaacgaaaaaattctttaaggataaacgaacacggatgcgcaaactgatcaatttgacggagaaccgaaatgttattagtttctacacggaacaggccttgtgcgaaattgaggctaagcattaccgactgggcttttccataatttcgaggatcatcacaaaaaaatcggaagaatccagctgcattagttgcgtggacacaatgcatctctatttagtttgtgcagaattgcatatacataggggccgcatatctaaggccatcggcatactcgtttcactgtgtttggaaaaacatgccggagtaaagcagacaactgtctactccaaggaacaggttttgaaaggcctgagaaatgcagagaaaatggtgcgagcggaactgaaatccctcgatacccagccagctgagatgtctttggaggagtacttccagcccaacaaattgctcatcctcttgcgcgctatctgtttgatcgaagtgctgaataatcgtcgtcataaggaggctagaatgtggctcaatgacctgcagaataacgaatttggtcccgaggccgtcaaggacagcgaaagaaagcgtttccttagggagcagatcatggaaatacagatgctacatctgcgtttgtcctttttagtatttggcgaagttgaattctatactggattcaaaaagatcaagctacatgaactgctcgagaatggactcgaagagtttccacgaaatatggtgtttctacagctgtgggccagcttaaaatcgattatgtggcacaagcagcgtagccggctcatacgcaccaaagccggcatcgcttcactggcgcacttggtcgttgcgattcacaatcgctttggaatcgtagataccaacgataagttttcaaaggaagccacaaggaagatggtgtgcaatcgtttggtcagcattgtcgagacttttctcccgaccaatttagatcgtttggatgtggaggaagagcattatcgcatactgcgcaggaactccatctattggcgcttgtacatgattgccctatccaaaacgaatgcctcgtttaggcgcagcaaagaagtccttataatggccatggacgagtgtccctgggacaagtcactactgatggaaggcgccaaggttttgccagtgaaactagcatcgctacaggacctgatgaccgaaaaagagattcgcattttcgctatgcccgaggaagtggacgtcttgaggggcttttaagtcgctttggttttattcgtttgttttgaggttatttgccattcgggcgactcgataagttcgcatcataaatatatttatttcttcaaacaatctagttctgaagtttgcttcaactttaagttaactggcgaaattgcgataagctgtttgcagttatatgcgtacatgcatattttactacatatatcctaaatcgcttatcagaattggctcactaacaaattcagaattagcgattttgctactcaaaaatactcgccgttcgattatgttaaaaaaaaattccaacactttatcgctcgttgctgtgcaaggaaaccagagtcgcatatcgaatgtcggagattagtccaacttcatcttctggccaatccgctccccccgaatccagcattttcttgtgtttattattttgattgtgtttatcgcaagataaccgaacaaaactcataagccaaaacagcgccgaaagaatcactgcgcacctgaggtcgcaattgtagcacctggaagctgtgagacgaactaaatacaacatatttgttatgtcattttcatatcgctgaaatgaaacatatattgcaaatagcttatttttatattactgaaatttaaaatatattgcaaatagtttatggttctgtttatttaaatttattaaatcatttaaatatgcaaaagaaattaagaagttttctacatttgtaaattacaaataaaaatatttatattcctatttagctatgagtagttttaacagctaacttgttaaatattgataaatttagatttaatatgtacacattaaaggatttgtattaaatgacatgaatgatattgacgataaaatgattgatattttgtatgcgatctgtttgtgtgaccgcaagtgtggtggccaagttgcgtgagcgcgagcgagacggctgtggctgagtgttgactcgtctcgaatgttgcgtatgcgccctgtctgcccagccacttaagactcctg

SEQ ID NO: 12455 - DNA, 3033 bp, DROSOPHILA
aacaaagttaatattaaataaaggggccataatttctcaacaatttgttgttgagtaactagtaattagctatttgacatgtctctctttcccgcctacggcgctggccgcacctcagcagccggcagtgcgaaacagacgacgaaaccaggtgaagaggagccgtcgacaggcgggaattggaaaaaaaacgagagttacatcaaaaaacatgtgaatatagcaactcaaggacccgaatcggacagttcctccagtacggaggactccgaggatgaggcggacaagcgcaagcaagacgatgttaccaaaaccaagaatgtacaccggggtaagacactagaattcgatagcagcgatgggttttatgtggacaaggtgggcaacagctcctatagaaacatcaaaaccctgaaaaaacccgcaagaccacgctacaaaacccggatgaaacgactgggtgatggaaaatacaatccccatgacttctcaagggctcactccaaattttccctaaaacgtagtcgctacgtcagagagaaactgatcgctgatgcacccagcgaagatgaggtgtccaggctgcaggagcagctcatacgcaccaaagtgctcgtccagcaggaacccgaggtactggaccactggctgcagctgcaccgtctgctcaatctcaacttggacaaggccaatcggctggcggtggcggaacaacagatacacagcctggaaacggccatggagcaccatccgtccaatcaacagattctgcggctctacacgcacgtggccaatgccacctatcaggccaacgaggttgctaggcgattcgagaaaatgctgaagagaaacccattccagtacacactgtggagcaacctaataatgatcacccaaggcgacatggcttgttgcaacgtgtccgctgtgctccggatttacgagtacagcatgcgccgcatgcatgtgggacacaacgatgaaataacccgaagattcatcattaaggagactgatgtgataatgctaaaactttttcacaattgcttactattcctacgccaatcgggccatactaactggatgtttgctctgattcgtttgtctatggagttgaatttcccctacctgacgttcgaatgcctacaagcacatgcaggaagagaaaaagcattgattggattcgaggaagtggtgctgcgttcgggaatgccgatgcccgagatctggacgcgtgtggagcagctcagacaggcatactgcttcctgccgttgaaagacaagctggcttcgtcgactaatgtcttcaaaaacaagatgaacgccgaacgatacttttgcagcgacaaacttgtcccatatgtacacgcactcaagtcgcagaataatcgtctgcacctggtgctcgtggttgttcaactaatgaaattgcccctgattcgcagcgctagtttggcggacaaattgaatccttgcatcgaggacttcggcgagtctgaggccattgaaatgcttttcgctgccatagtagataggcactcctatgcagtggcttcgttgcaatatcaatttgatgcagccatgatcgacttagccagagagatgtccgtgacgcccagctacatgccgcatcttgttggccataaactgtatgcggataccgtgagtaatatgctactcaaatgcgtcgaagtctttatcggcgaggagtccaagcgacgattgttgcttattctgtatttgcgattccaaaaactattaatagtgctgcacaagtccatgggcaagctaacgaaaaaattctttaaggataaacgaacacggatgcgcaaactgatcaatttgacggagaaccgaaatgttattagtttctacacggaacaggccttgtgcgaaattgaggctaagcattaccgactgggcttttccataatttcgaggatcatcacaaaaaaatcggaagaatccagctgcattagttgcgtggacacaatgcatctctatttagtttgtgcagaattgcatatacataggggccgcatatctaaggccatcggcatactcgtttcactgtgtttggaaaaacatgccggagtaaagcagacaactgtctactccaaggaacaggttttgaaaggcctgagaaatgcagagaaaatggtgcgagcggaactgaaatccctcgatacccagccagctgagatgtctttggaggagtacttccagcccaacaaattgctcatcctcttgcgcgctatctgtttgatcgaagtgctgaataatcgtcgtcataaggaggctagaatgtggctcaatgacctgcagaataacgaatttggtcccgaggccgtcaaggacagcgaaagaaagcgtttccttagggagcagatcatggaaatacagatgctacatctgcgtttgtcctttttagtatttggcgaagttgaattctatactggattcaaaaagatcaagctacatgaactgctcgagaatggactcgaagagtttccacgaaatatggtgtttctacagctgtgggccagcttaaaatcgattatgtggcacaagcagcgtagccggctcatacgcaccaaagccggcatcgcttcactggcgcacttggtcgttgcgattcacaatcgctttggaatcgtagataccaacgataagttttcaaaggaagccacaaggaagatggtgtgcaatcgtttggtcagcattgtcgagacttttctcccgaccaatttagatcgtttggatgtggaggaagagcattatcgcatactgcgcaggaactccatctattggcgcttgtacatgattgccctatccaaaacgaatgcctcgtttaggcgcagcaaagaagtccttataatggccatggacgagtgtccctgggacaagtcactactgatggaaggcgccaaggttttgccagtgaaactagcatcgctacaggacctgatgaccgaaaaagagattcgcattttcgctatgcccgaggaagtggacgtcttgaggggcttttaa

SEQ ID NO: 12456 - protein, 984 aa, DROSOPHILA
MSLFPAYGAGRTSAAGSAKQTTKPGEEEPSTGGNWKKNESYIKKHVNIATQGPESDSSSSTEDSEDEADKRKQDDVTKTKNVHRGKTLEFDSSDGFYVDKVGNSSYRNIKTLKKPARPRYKTRMKRLGDGKYNPHDFSRAHSKFSLKRSRYVREKLIADAPSEDEVSRLQEQLIRTKVLVQQEPEVLDHWLQLHRLLNLNLDKANRLAVAEQQIHSLETAMEHHPSNQQILRLYTHVANATYQANEVARRFEKMLKRNPFQYTLWSNLIMITQGDMACCNVSAVLRIYEYSMRRMHVGHNDEITRRFIIKETDVIMLKLFHNCLLFLRQSGHTNWMFALIRLSMELNFPYLTFECLQAHAGREKALIGFEEVVLRSGMPMPEIWTRVEQLRQAYCFLPLKDKLASSTNVFKNKMNAERYFCSDKLVPYVHALKSQNNRLHLVLVVVQLMKLPLIRSASLADKLNPCIEDFGESEAIEMLFAAIVDRHSYAVASLQYQFDAAMIDLAREMSVTPSYMPHLVGHKLYADTVSNMLLKCVEVFIGEESKRRLLLILYLRFQKLLIVLHKSMGKLTKKFFKDKRTRMRKLINLTENRNVISFYTEQALCEIEAKHYRLGFSIISRIITKKSEESSCISCVDTMHLYLVCAELHIHRGRISKAIGILVSLCLEKHAGVKQTTVYSKEQVLKGLRNAEKMVRAELKSLDTQPAEMSLEEYFQPNKLLILLRAICLIEVLNNRRHKEARMWLNDLQNNEFGPEAVKDSERKRFLREQIMEIQMLHLRLSFLVFGEVEFYTGFKKIKLHELLENGLEEFPRNMVFLQLWASLKSIMWHKQRSRLIRTKAGIASLAHLVVAIHNRFGIVDTNDKFSKEATRKMVCNRLVSIVETFLPTNLDRLDVEEEHYRILRRNSIYWRLYMIALSKTNASFRRSKEVLIMAMDECPWDKSLLMEGAKVLPVKLASLQDLMTEKEIRIFAMPEEVDVLRGF

SEQ ID NO: 12457 - DNA, 2423 bp, DROSOPHILA
aaataatataacaaataaaaatatacagtccactatattcgttgtttaatagaaaatgtacttctacatagaaaaagcaaaatgtttaaaataagttaattgagtacaaattgttgaattaaaaataatataaaccataattgtaatccaataaaattaaaagccagaaaaactaggcccattgaaatcttagttgcaaaataaatgaacatatatcaaataaatccagtccactactgttataaatgcaactaatatactaatgtacatctcagctttgctggccctttggcagaatgttcacacatgaacacgaaatatatttaaagacttacaattttgggctccgttcatatcttatgtaaatgaatcgagagcgataaattatatttaggattttgttatctaaggcgacatgggtgcattgctcaaaaacatgtaatttaagtgcacactacatgagtcagtcacttgagatcgttccccgcctcctaaaatagtcccttagtgggagaccacagataaggtcctcgccgctcaagataggcagatgtgcccgagcgtgggacctcgataaggcggggactatttacttaggcctctgcgtaggccatttactttaagatgcgattctcatgtcacctatttaaaccgaagatatttccaaataaaatcaagtttcttacaaaaactcaacgagtaaagtcttcttatttgggattttacaagggctttgcataactacaagaacataagactgaggcatctcaatttgtggcgctatgcagccggaactccaatcgcaaaatggctaaaaagcggaaaactattcaaatcgaaatttctttttccacacgtctcggatcttctgcgttatgttagcctatacaagtatggcggtctttacctggatctcgatgttgtggttcagcagaacctggagaagttgccaccgaacttcacgggcgctgagagcaacatatctgtggcctgtggtgtcatgaagatgtcccccggcggtttgggccataagattgccaccatgtgtctgcgggatctggaggccaactacaatgcgaataaatggggcaccaatggacccggggtcataacccgagtggtcaaaaagcagtgcaatacagataatatcaagtcagtgattaacaatccgaaacgctgcaatggcttcaaggtcttcgatgcaaatgcattctatgccatttcctggctgcaatggaaggatttctttcagcccaacagacataacgtaaccatgaaaagagtatccaaatctccggtgattcatgtttggaacaaattctcaaagggatggaaagtgaaaacgaagtcgaactgtgcctacaccacactggccaaaattcactgtcccaggtcatttgcagcagcgggggaattgttttaattaattattaacttcatagagttaggtataagtttcgattaaatacataagccgtagtaagtcattttaatgtaatatatatttagtaattttagacaatactttcgaaattatcatagtaaattcctcaaatggagaaagctaattgaattagctttttaaaacattaacgtatccgcaaagagaaaatcggatcagccgagcagagagaaatctgaatctgcttaaaatgtaataaagcgaattatatttttgattcatactcgggtgaactaattgtctgttgaaatatttatgataaattccgagggccattcaaattcctacactcatttttgttgtcatatcgccacgaagaactaattaattgtttccaaataaagccaaagtaaatagccggaggcaatttcagacagagcattattagcattttcgaggatatctcgcggcgctttcaagttttgaataaatattttcgcatcattaaatttaagctttatttatgcacagcgcaattttccaatttatttataccttagatatatatatatatatgaattcaaaacatttcagaggccagcggactatggattgggcaaacagaagtgtaggcaactaatgcccgaatttatggtgacttttggcactgcctgcaacagctgcttcacattatggggtgtcacccaaaactccaatccaaccagccaaaaatggaaaaaaaacaaactgatatgtagaaaaaggaccaaagctcacatatgagtctcatgctcagttttatctgctgcactgcacgcggcacatttgcatatttcgtgcacaggaggagctgcgtttttatttttatttcatttttattaatgcgaaaaatgtaatttcaagcatttgcaactgcagcggtcccttggggccacacgacagtcagcccaaaaacaaaatacaaaaaaaatggcatgtgaaaaattgcaaaaaaatttggaaaaggcaaggaaacccattc

SEQ ID NO: 12458 - DNA, 423 bp, DROSOPHILA
atgaagatgtcccccggcggtttgggccataagattgccaccatgtgtctgcgggatctggaggccaactacaatgcgaataaatggggcaccaatggacccggggtcataacccgagtggtcaaaaagcagtgcaatacagataatatcaagtcagtgattaacaatccgaaacgctgcaatggcttcaaggtcttcgatgcaaatgcattctatgccatttcctggctgcaatggaaggatttctttcagcccaacagacataacgtaaccatgaaaagagtatccaaatctccggtgattcatgtttggaacaaattctcaaagggatggaaagtgaaaacgaagtcgaactgtgcctacaccacactggccaaaattcactgtcccaggtcatttgcagcagcgggggaattgttttaa

SEQ ID NO: 12459 - protein, 140 aa, DROSOPHILA
MKMSPGGLGHKIATMCLRDLEANYNANKWGTNGPGVITRVVKKQCNTDNIKSVINNPKRCNGFKVFDANAFYAISWLQWKDFFQPNRHNVTMKRVSKSPVIHVWNKFSKGWKVKTKSNCAYTTLAKIHCPRSFAAAGELF

SEQ ID NO: 12460 - DNA, 5304 bp, DROSOPHILA
aagtggtcccaaaatatatgaatatgtgcgttgtgggctggctttaactattcctttgcgtgtagactccttatgcttcctttggccccgctagtctccttgtctgttgtttgggtttatgttttcacacgcactcgtttaaagactatatatatatatgtatttggtatagcacctcctctcgaaaatcttgatttttagtttttctagcgacttaaaattttgtttcgttggttgcttttgttttgaaatcgattcgctcaactttgtcgtagctgctgtgtgacctatctcgactctggcgttcacatctaaacaaattcagttgtctaattggacacttcacgctcgacaacaacacacaaaaacagtttcattttacagtaaccctcgtcgctggcgctgcgctacaattggggcatattcgtgctggcgtcttgcctgccttcgatttaaaagcgggtttttatttatttatttaaaaaacgtctttgattaaaactgagcatttaaatatagctaattcttgtcttgtaacagttaagcctcttttttcgtgcaaacagcagccactttgcaaatgtagcgcatctgaagatccacccagcccacacaaacaaactgtctctacactaacgcagcaacatggctgctcagactctatcgatatatcgatatatgcacaacatcggttcatgcctaagttactctgggaaatatttaaaaacaaacaaagaacataccgttattaaaaaaaaaaacttattgttgtgataaattcaaaacctttgctagctatattgaaaacaaattattattatttctaagtctttttagatactttcattgttgtttaaatctattgcttatagcatatttgtggtattttagaaaactgaaatggtatattttggttttgcattccccacggtcactctggatctattaccatccgataaccgatagtgcctaccaatatcgaagtacgatagtgcccgataggttcatccatccattttttttatttaattagttttaatttagatttctaactctaatttattggcggccccccactatcgtcgctccccgccatcggtacgctgcactttggttcggtttcggttcgcatcgggcgtatcggttcgatttcgatcctgaagatcagatcagaatctgcggaactcaactgccgtgttttgtgttgtgtgtgaggaacggagaggaaaactgtcagtgcactcttgatcgggcggatcggagaaaatgtcgaagaacaagataaacacaacgtccgcaacggcggccagtgacacgaatctaatcgaggtgaaatcgaaggtgagtcctaactttcgtggcccccggattccacgcccctttctgcggcgctgagctgctgattcatgcgctcaggaatgggattaatagcttaaattggagttctgtgcgtggaaagggggtctttagtctgaggagcaatgtgtctaccaatttgggaactcctatctgttgagctcgattgtgtcaaagcggccagagcagggattaatgcttggagtgcgaggtgtgaggagcaactggtttccatcttagaagcaccccaaaagtgacaatttgcccttgcgaatgcatcttacttgtcggaattcctgagctctgatatggattgttgcaacaccctttattgcttgggctctttgcctgaaaaccaatctgttgcgccttactcaaaaactaccctgtttcgttcattttctgtaattttacagagaaggaaacttcagttattaattagtcaaggtacaattcttcaagataaactccagtaatagctataaggcagtagatgtactgcaattcagtgaaggtcccattaaattagtaaaatgtctgcatacaattgaatcaacaggtgatgctgatgaacaaactatacgggtttcaaaagattcagcccctttactaatcaatacgtatcctttagttcgatgcagagtttcggaggtggagcttcaagcgaaatgaggcggagcagagcttcgacaaattcgcatccctcattgagcagctgcacaagctgaccaacatccagtttctcatactctacatcgatccgcgggacaatgatctgttgccgattaacaacgacgataacttcggccgggccctgaaaacagcacgtccacttttacgggtcattgtgcagcgaaagggtgagtatgggtatgcataagatacaatacgagccactcaaccacaatcttttcgttcactctatagatgatcttaatgagtactctggctttggaacgatgaaaccgagaaacctcatcggcagcatactgatgggccatacgccagtgaagacaaaggcgccatcgatatccataccgcacgatttccgtcaagtctcggccattatagatgtggatatagtgccggaaacgcatagaagagtgcggctactgaagcacggcagcgataagcccctgggattctacatacgggatggcacctctgtcagggtgacggccagtgggctagagaagcagccgggcatttttatatcccgtttggttccgggcggtctggccgaaagtactggcctgctggccgtcaacgatgaggtgatcgaggtaaatggcatcgaagtggctggcaagactctggatcaagtcaccgacatgatggtggccaacagctccaatctgataatcaccgtgaagccggccaatcagcgcacactgacgtccacacatcgcggatccttttcaaggaacagccagctgtccagtgggtcacatcacactaataatacaaacacctccgacgagatcgagcacgacgatcaggacgatattgtggacttaacgggcgtcaccctcgacgagagtccaacgtccacgtcagccggcaatcacaaccatcagccgccattatcctcatcaccctcgtcgcaccaccagcaggcagcctccaatgcgtccacgataatggccagcgatgtcaaggatggagtgctgcatttgtaggattaacccggcgatacagcacctccagcagacgcagccagaacttaagcaacggaaaacgcgaattcatcgctgagaagtgcagaggattttcagtttatcagacttaactttccttaagatcgaataagttcgttaaactcgagtcaattatttaaagttatacaagttaggccaacttattcacatgtacactgatcgcttgtatatcgctcacttactaaagcgactgtcatagctcaaccagccatgatttgaaaagtcaccttataaaatctattggtattagcctgaaagcctgattgattgagtaaacaacatatcggccatatcccattcatttcttgttaatcctggccattcaaatttaacgttctgcaaaatttccagtccgattgtaggtgagcaatatataaaacacgattgtatatacatgtgtaatcatcatacgactttcctccatacattccacgaaacactcaaagtcaaagaaaacacacctattcatttgcacgtttttgaatgcagtctcttgtttttatcttttttcctggcatatatatatatgtgtatttaaatttgtaagatttacgtcttgttattattcttgcttgttgtattagactagagtgagacagctagaggagagagtgaaatagagagagggcatcaaatgctgaaggcagatcaatttatttaacttaaccatttgaaacggcaataattgtaacaaaatcacatatacgagcacgaataatttataaaaaaaaaaaacattccattttatgtactgtgacaagtcggaaaagcctaacaaaattatatttcctgatttgtaagccttgtttttaatttgagccgatcattttgcgtatatctgctatgttttgtttagctcaatttcttattttttcggcattactcattatatctgtttattttaaaaaccatttgtaatttttaacttttgttttttcgtcattgtgtccaatactcgtccaagttctttgttgtcattgtcatcacttagagttatggagaaaggatagaaaaacgaggagataaagttaacaaaacgttaagatacaaacgaaacaccaacagcgccttcgccttcaagagagcaattcgatactttttatatatatacaagagaatatataaacgaatacaatctatgttatgtacgtacccctgtacacacaattgaattgaagtctgtgtattcgctttagtaaaattgagaaaacgccactcacggcagatgggatgcaatgcgatctgctcgacttgaagttaacaatattaatatttatgggtcgcaacgggcataactaaccccatacgaacgtgtaccctgggtagatagcaagatctaggatagacagcagcgaatctgaaactataactaaatgcgtatcgccgcccaaccactcccctcatatacccatttcacatatacccttgcattatcgagaaatctgaacttacatcgaacaaaagtcgccagaatatcccgatttccaagcaaacgcatgtatatatatatatatacaaaagctaatgtgtattcccgctaagcaactgaaaagaccgaaaagcaaatcacgaaagaaaaccttatattttgatgtatgtattattattttttaataaacctaagagaacttgtaaccgatctggtgtgtaattggttttttcctgggaggctatagcaaaacaatgtaagtttattgtttatatcacaaccaattcgaggcgttaaagtatacaaaaaagttaaaaatgatattcggttcctgcatttataaacgaaaaaattgtttccctctgtaagcaatacttttcaattcaactgaattgctttcacttatttttagcttacaaaaatcaatttaaatacattagccgggccttaatcaaaaaagatcttacatatacccttttgaagactgcgaattaaaaaaccagttaacgatatagtttttgttccatttggggattcgatttattcgaccactcttttgcttgctgaatatgtacaatttgcttaagtgtgcattcgcgttttggggctttaaccgtaattggtttgttcttacagggtaaaaattatagctaattaattgtacattcaaaacaaaaatgagtcatctaatcaaattatattcaagaggaagattgtggagttcggaggctgagaatgattatcagtctaatcgctttctgtcgcaacatttgcgccattgttctccaggcactgccaaat

SEQ ID NO: 12461 - DNA, 2591 bp, DROSOPHILA
aggttcatccatccattttttttatttaattagttttaatttagatttctaactctaatttattggcggccccccactatcgtcgctccccgccatcggtacgctgcactttggttcggtttcggttcgcatcgggcgtatcggttcgatttcgatcctgaagatcagatcagaatctgcggaactcaactgccgtgttttgtgttgtgtgtgaggaacggagaggaaaactgtcagtgcactcttgatcgggcggatcggagaaaatgtcgaagaacaagataaacacaacgtccgcaacggcggccagtgacacgaatctaatcgaggtgaaatcgaagttcgatgcagagtttcggaggtggagcttcaagcgaaatgaggcggagcagagcttcgacaaattcgcatccctcattgagcagctgcacaagctgaccaacatccagtttctcatactctacatcgatccgcgggacaatgatctgttgccgattaacaacgacgataacttcggccgggccctgaaaacagcacgtccacttttacgggtcattgtgcagcgaaaggatgatcttaatgagtactctggctttggaacgatgaaaccgagaaacctcatcggcagcatactgatgggccatacgccagtgaagacaaaggcgccatcgatatccataccgcacgatttccgtcaagtctcggccattatagatgtggatatagtgccggaaacgcatagaagagtgcggctactgaagcacggcagcgataagcccctgggattctacatacgggatggcacctctgtcagggtgacggccagtgggctagagaagcagccgggcatttttatatcccgtttggttccgggcggtctggccgaaagtactggcctgctggccgtcaacgatgaggtgatcgaggtaaatggcatcgaagtggctggcaagactctggatcaagtcaccgacatgatggtggccaacagctccaatctgataatcaccgtgaagccggccaatcagcgcacactgacgtccacacatcgcggatccttttcaaggaacagccagctgtccagtgggtcacatcacactaataatacaaacacctccgacgagatcgagcacgacgatcaggacgatattgtggacttaacgggcgtcaccctcgacgagagtccaacgtccacgtcagccggcaatcacaaccatcagccgccattatcctcatcaccctcgtcgcaccaccagcaggcagcctccaatgcgtccacgataatggccagcgatgtcaaggatggagtgctgcatttgtaggattaacccggcgatacagcacctccagcagacgcagccagaacttaagcaacggaaaacgcgaattcatcgctgagaagtgcagaggattttcagtttatcagacttaactttccttaagatcgaataagttcgttaaactcgagtcaattatttaaagttatacaagttaggccaacttattcacatgtacactgatcgcttgtatatcgctcacttactaaagcgactgtcatagctcaaccagccatgatttgaaaagtcaccttataaaatctattggtattagcctgaaagcctgattgattgagtaaacaacatatcggccatatcccattcatttcttgttaatcctggccattcaaatttaacgttctgcaaaatttccagtccgattgtaggtgagcaatatataaaacacgattgtatatacatgtgtaatcatcatacgactttcctccatacattccacgaaacactcaaagtcaaagaaaacacacctattcatttgcacgtttttgaatgcagtctcttgtttttatcttttttcctggcatatatatatatgtgtatttaaatttgtaagatttacgtcttgttattattcttgcttgttgtattagactagagtgagacagctagaggagagagtgaaatagagagagggcatcaaatgctgaaggcagatcaatttatttaacttaaccatttgaaacggcaataattgtaacaaaatcacatatacgagcacgaataatttataaaaaaaaaaaacattccattttatgtactgtgacaagtcggaaaagcctaacaaaattatatttcctgatttgtaagccttgtttttaatttgagccgatcattttgcgtatatctgctatgttttgtttagctcaatttcttattttttcggcattactcattatatctgtttattttaaaaaccatttgtaatttttaacttttgttttttcgtcattgtgtccaatactcgtccaagttctttgttgtcattgtcatcacttagagttatggagaaaggatagaaaaacgaggagataaagttaacaaaacgttaagatacaaacgaaacaccaacagcgccttcgccttcaagagagcaattcgatactttttatatatatacaagagaatatataaacgaatacaatctatgttatgtacgtacccctgtacacacaattgaattgaagtctgtgtattcgctttagtaaaattgagaaaacgccactcacggcagatggg

SEQ ID NO: 12462 - protein, 351 aa, DROSOPHILA
MSKNKINTTSATAASDTNLIEVKSKFDAEFRRWSFKRNEAEQSFDKFASLIEQLHKLTNIQFLILYIDPRDNDLLPINNDDNFGRALKTARPLLRVIVQRKDDLNEYSGFGTMKPRNLIGSILMGHTPVKTKAPSISIPHDFRQVSAIIDVDIVPETHRRVRLLKHGSDKPLGFYIRDGTSVRVTASGLEKQPGIFISRLVPGGLAESTGLLAVNDEVIEVNGIEVAGKTLDQVTDMMVANSSNLIITVKPANQRTLTSTHRGSFSRNSQLSSGSHHTNNTNTSDEIEHDDQDDIVDLTGVTLDESPTSTSAGNHNHQPPLSSSPSSHHQQAASNASTIMASDVKDGVLHL

SEQ ID NO: 12463 - DNA, 2969 bp, DROSOPHILA
aaatcctttacaaacatttatggaaaagtgaaaaacgaagccctaaatatgagattctgaacactttcaaagcaatagataaatatattatgaacataggtaaacgctataaaagtatgtttataaaatgtgtcagtttgtacattttttactgaccaccttaagatttctagccctcagctatctttgccccaaaacatatttatagaatatatattatagacggttaagtaatttgacgttaatagcattcttatctcaacagacatccataaatactctcacatgtttgggcgtgttattcctcctggaattaccaatagccgaccttgagtccctatatcgactaccttgttttttagcattgaacaattaatttgctcattaaaacaaatttttggtcacaaagtaataaccaattttttgctgcattaccatgaacatttttttttttttcaaagcaaaagagcattgctattttcagatgttggtttatatttgtaagctttaattgacatccaagttgcttaacaagattatcgcttgaaggtatatacagataaaacaaaaataatatgtaatacaaaatacaaaatgtaaaatcggtcctttttctggaaaggaattactttaaatgattgtatttccggtagacgtaaacttattggaggtactgtgtgctagattgtcaccaaaaatttaattgaaaaaccagtgatctctgtttgtgacaagagccaaatctaatcttatttcgttgtagtaaattaaagtcatccaaatgggtaaatcttgtagtttcggctataaaaggcccagctgattcgtgccaattgttagttgaatttatctaagttaaagtgtaggaagaagtatttcaaaatgcgaggtactcccctgaccattcaagtaaaacatattgtagaaacgaatgtaaattgtatgaaatgtttcaggacttcctagttctttggtccttcaagccttgttgctggccgtgatggttcatcagagcattcaaacgcgttacttaaacgccaccgacgatatctgtcgacttttcaaggatggtacccaactcttgaagcccggatcctgcagcgaatcgattatttgccaaaactttgaatcaacaccaggtataacgtgctcgggctctaaaccgtactacagtaagtccaagggttcatgccaagcgtccgcggatacttactgcgatacaagcaaaatatgcaagggatctggaacgggctatattggtgataccataaattgtgccaactggtattactgtgatgcggatgcgttgttgggcaaaggaacatgcaacctgggaatgtacttcgatcaagtaagcaagagttgcgtttattcggaggacacagtttgtgccgccaaatatgagatctgcgacgttgcgcccgtaggcacaccattccgcgatgatgccaactgccacaagtactatacctgcagcagtaagagcctggtggaaaatacatgcgaaaatggactgtattacaacgtggccaccggaacttgtgtgaggaaaaaggacgttatctgcgagaaccatccgttgccagatgaggtgtgtggcaacaagaagctggcggtgcgcaacaaattcgtttcagatatggccacatgtcgcggatattactactgccgcgatttgggatccggtatccccgataccgatcccatataccagcagtgtgacgagaacaacttcttcaaccaggagcgacaggcgtgcatgccgcgcgagagccagaaatgcgattacgatagatgtgatgggcgcaaggatggcttcgaagtggccgaaatcgatggatgccaccactacatcgaatgcgtcgatggccgggaaacgactcccataagctgtgaggataagtatttcgacgttgtcacgcaaaactgcagctcaactcacttagtttacggagcttgttcctcttaactgctaggcatttgccagctgttcgtaaagtattaattaattgcaaataaaaaaccaatatcagtgtacatacatgaaattttgaactttcggatatccattaatcagaaattacagagaccatagcgttcgtttgcctagtgtttctggtcaggaacatatattactttattgggttcgaaacgcatccctctaatatcaaaatttgaatcttttcatcaattaggattaagttagaaaattatatatctttaatcatcataatattcttttttagggtgttaaggttaaatgtatgtgccaatatatacagttgttaacacctattggcctcctgagctttctatataggcttgtagtccagacgagactccagcttcttattgtccgctattttgcggacggccttcatgaaatcttcttgaatgacaaactccctatcgcagcggagggcaaaaagcccggcttccgtgcaaatgttccgtagatcggcaccattgaacaaatcggagagcttaaccaccgcctcatagtcgatttcgccgcgtttgttcagtggttcggcgtgaatcttaagaatgtccatacgcgccacttcgttgggcagcggaatttccaatttgcgatcaagtcgtccaggacgcagcagcgccggatccagtgtatccggacgattggtggccatgatcattttcacctggccaagagcatcgaatccatccatctggttaagcagttccatcagcgtgcgctggatctctcggtcggcggatgttccctccgagaagcggcgaccaccgattgcgtcgatctcgtccatgaatatgatacatggctgatgatcacgggcgtatgcaaacatctcccggatcagtcgggcactctcgccaatgtacttgtccacaattgcagaggaaacgaccttcgggtgagttttttagaaacaaatttaaatatttatttataatatctattgcagatgtgaaacactgaccttcaa

SEQ ID NO: 12464 - DNA, 969 bp, DROSOPHILA
atggttcatcagagcattcaaacgcgttacttaaacgccaccgacgatatctgtcgacttttcaaggatggtacccaactcttgaagcccggatcctgcagcgaatcgattatttgccaaaactttgaatcaacaccaggtataacgtgctcgggctctaaaccgtactacagtaagtccaagggttcatgccaagcgtccgcggatacttactgcgatacaagcaaaatatgcaagggatctggaacgggctatattggtgataccataaattgtgccaactggtattactgtgatgcggatgcgttgttgggcaaaggaacatgcaacctgggaatgtacttcgatcaagtaagcaagagttgcgtttattcggaggacacagtttgtgccgccaaatatgagatctgcgacgttgcgcccgtaggcacaccattccgcgatgatgccaactgccacaagtactatacctgcagcagtaagagcctggtggaaaatacatgcgaaaatggactgtattacaacgtggccaccggaacttgtgtgaggaaaaaggacgttatctgcgagaaccatccgttgccagatgaggtgtgtggcaacaagaagctggcggtgcgcaacaaattcgtttcagatatggccacatgtcgcggatattactactgccgcgatttgggatccggtatccccgataccgatcccatataccagcagtgtgacgagaacaacttcttcaaccaggagcgacaggcgtgcatgccgcgcgagagccagaaatgcgattacgatagatgtgatgggcgcaaggatggcttcgaagtggccgaaatcgatggatgccaccactacatcgaatgcgtcgatggccgggaaacgactcccataagctgtgaggataagtatttcgacgttgtcacgcaaaactgcagctcaactcacttagtttacggagcttgttcctcttaa

SEQ ID NO: 12465 - protein, 322 aa, DROSOPHILA
MVHQSIQTRYLNATDDICRLFKDGTQLLKPGSCSESIICQNFESTPGITCSGSKPYYSKSKGSCQASADTYCDTSKICKGSGTGYIGDTINCANWYYCDADALLGKGTCNLGMYFDQVSKSCVYSEDTVCAAKYEICDVAPVGTPFRDDANCHKYYTCSSKSLVENTCENGLYYNVATGTCVRKKDVICENHPLPDEVCGNKKLAVRNKFVSDMATCRGYYYCRDLGSGIPDTDPIYQQCDENNFFNQERQACMPRESQKCDYDRCDGRKDGFEVAEIDGCHHYIECVDGRETTPISCEDKYFDVVTQNCSSTHLVYGACSS

SEQ ID NO: 12466 - DNA, 4945 bp, DROSOPHILA
ccactctgggttgtctgtttcttattttgtttggcttggagattggccacaaatacctgtggctggatcatggtgaaaactggacggaaattgagcccttggaggggcagccagtcaagtttaacctcagtggacacatcattccagtggtaagccagtaaactaacttgtgctactttctttatttcatctttctttctctctgaacttcagacacatccgaatgagtatgatgaatttgtgctgcctccagccgtgcacaatcttccaacacccattgtggacacagatgccgcttcgcccggtcgacgacgagcgctttggttcatggcgttcacaaacgttgccgtggtcttggctctcggtagcctctccatctggcacgccaagctaatcactcgtggcgagaccagtgtggaggctcacatcaacgaagctgagcgaaaacggcacctccagcaacaacgcatttatattaatccttataactttggcaccaaaaagaactggaagctgttcttgggtctggtgcggggcagatccttttggcgaactgtgctgcttccctcctggcacaaacccgaaggtactgggctgagtttccacacggtaaatgatgctcccttcgaggacgagtggccataattccaacatagaagccattgtgatgtcagcaagtcaatattaagttaatagtttacgtttaagctcaaggtaatagaaatccaaagctcttgattagtaaaatttagtattataaaccttctactcaaaactgtaatgcagtgaaatgcaaaggcatgtactttgtttccatgacgactaggactaggcacaatgacgcttttatactactactagcttaataaaagacacaactagcatacaaatcgttttgcgttgtccttgacatcctgtgccggtatggcaacttgttgccaggacaaggttagggctttgagtttgttcaataaggtgtaaaataactcaagacctaaagatgtcgaaagcttccggatcagaagatgaacctctggtaccagatgacttcgatgatgacttttacaaggaactatgcgacaaaatccctgaggtaacaatctggaatgatgtttccaaacatatgtaataagcatattatgcataggccaccaaagctctgcggcaaaaggatactcccaacaatgcggataatgtccagaggctgctcatctgcggcagtcgctataaaagcgatctcagacttgagaaggaacgctcccaggaactgcgaaaggagattgaaagcctcgaagagcgcttggaaaatgcggctcgggttaccaaattggacatggccaccattgaggagctacgtggagtaataggtaagtagttctcataaatttctaagcaaagaacggctataataatagtttgcattggcagagggtgcctggaagcagaaggatgctgctcagattcgtgagcaatccgctcaggacgaggtcctaagtctgcgcgaaaaactggatgagtcagagcagatggtcgcccatctaaatgagaaacggctggccatgagcaagcgggacgatggcaaggaacgggagcgactcaacgccgagattgcagatctcaacaagcgattgcatttgcaacggacctacgccacggaactggaccacaccatcgaaggattggaggctaaaaacaaggaactgctcaagctactggatgttcgttaaatgattactctgctttaccataaaactgaacagtatttttacatatcaggaaacttccagcgatgcctgcaacttgaaacgaaaaagtgatgccttgaccaaggaactttctacgatgaagaccgaggagtcccgctaccaggagcaaatatcccagatgaagtccgctaacgagcacttgaccaaggtgaaagtgcgccagaacctgcaaattctgtccctcaagacgaacctggaacatctaaatacccagcacaatgcggccaacaacaagctggccaagatcacggtggacttggagtacacggtgcaggaaagggataagaacaagcgtgctctgaatcagcgcatcaatctactgaaggtgcgcgaggatgaattgattaaggtgcgccaggacaatgggaagctggccaagtcccaggaggcgattgctcggaaatatgcggtattagacgaggccaaacgggaagtggaaacgctgaacataaggctcaggtaaaagatttatatttgatagaatataatctactagataatttaacattcgttacagaacccagctgggcacccaagacaaggagctggagtcgatgcgccgggtggtccatcacttcgagaagaacaacgaaaacttgaccaaagagcgggattccctaaggcgggaactgcaggcggagcaccatcagctcgagcagagcaatgcacagcaccaagaggcgcagcacgaggtgcgagctcttaaggacaccatcaccacgatggacacaaagctgaagaagctcaacgaggacgccaacaagctcaagaaggagaagaccaaaaagctggacgagattcagcactggatagacaaattggatgctttgcagagtaagacttggaacgtaatgatctgtaagatgatatctgtagcacacttttcccagatgagatgcacttgaaggagaactacgagatcgaactgaagcgcaccatcagcgacttggaagccaagtgctccaagttccagcaacagcatgatggtcttgccgctgagcgccaaactcttcagcggagtgtccagttggccgatgaggagcggcaaaagcttcgcgatcagctggtgaatctgcaggcgcacgtcgagaaactaaaggccaagatcggttacagggatggcgagatctccagacttcagttgcagatcgatcgcatggagaaggagcgccgactgctacgcaacgaaatccggcatgcccagcttggtcagcagcacaccaaggctgaactgctggacaagcggaaggagaacgatcggcacgccaagtcgctgcaagaggacgagcagaagctggcgcgcctgcgcaaggatgtggacaacctgatgaacgagaagaatgcgattagtgcggcgctgaccaaacgcaacgaggagttcgatcgactcaagcacagccaggagaacctgcaaacggtgtacgatcagacccagaggcagtgcagccagtatcaggatgatatgcgtctaatgggcgtggagataaagaatctgcgtacggaaagggatgtcctgcgcgcggatagagagagtgcagcggatctgcgccaggaactgttacaaatgcatcgcatgctcaaccaggaacgaatcaaggcgcgtgccctgcaggacgagatggttacgccgatgaatgtgcatcggtggcgtctcctgagcggcaaggatccagaaaaaatggacctgctcggacgcattagcatcctccgaaagcagttgctccagcagaacgttgccgcctcggagcaggaacgggccctcaatgaagcccaacagctctatgcggccttgagggagttcatgctcaagctgcccagccataaagtgcgggcggagctcaacagcgttaaggtatatccaaatgggattgctaaaaagtataagatctaattattcatcttccaacaggctaacctatccgccaaggatcgcaaactgaaggtcctaaaggccgagctcagtgcccgcgaggcagacgagaagtccaaaaaggagaagcttgaagagatgcgggtgagtttggctctaaccaagacccaactgctagaggagaagaagcacaagcagaagttacttgaggagcgacagttgctggagcagatgcattgctactccgcgcccgcccaactgcctaggactctgggtgcgggtttcaagatggtcagtagtctactctaatgctactattatcttacaataatatgtaatgaacaaaacacaatgtttttttaatattcgaaaagtgtaaaagataccctttcaaagttggaggcgggcctccatatgtagatatatgtggatactgtcatccagcttgtggagattaactttcgcaggtggcagacatgtcgaacacctgttccgtgaattcatcctcggtcgccttgccactgcgaatcgagaaatcccccttgccaatgaagttctccttgttctccagatgatgcaggcgcagttgctcctggaagccctctatcaggtgctccctggtcttgagatcgatctcgttgatcctgagctcagctttcatggccttgagttggcgggtctggcggcgattgatgcgctgctggatgcagagcttctggcgcacactcggatcgggtagattcgtcatctggcgcttgaactcctcgtgaacgtgctccaattcggccagctccttggccttgttttcccgttccacggatagccgaatgttgcgcttcagaagctgttgaatcttgcggatcaattcgaaacggcgcggatccttaccgagcaggactcgccagcgatggatgcgacaggggcgggacagctcttccgagtaggcggataccttgagcctctcctggttgagctgtcgctccaatcgaatcacatcatggcgcatggccgccttgttgcccacctcgcgctgcatgcattcgtgcgaagttcgcaggtttaccacttccagtttaagcaacctgatgtcctccaccctttggttgtactgcatggttccgcgatcgatggccttctgcatcatatccagtttctcccttagcagacgcacctcatcattcctcctaaccatttgcaagcccaccagactcttctctttggttacctcgtccagggcgcaggccatgttcttaaagcgcttttcatcggtatcgatggtgtgggcagcttgttccaaccggatcttcat

SEQ ID NO: 12467 - DNA, 2601 bp, DROSOPHILA
atgtcgaaagcttccggatcagaagatgaacctctggtaccagatgacttcgatgatgacttttacaaggaactatgcgacaaaatccctgaggccaccaaagctctgcggcaaaaggatactcccaacaatgcggataatgtccagaggctgctcatctgcggcagtcgctataaaagcgatctcagacttgagaaggaacgctcccaggaactgcgaaaggagattgaaagcctcgaagagcgcttggaaaatgcggctcgggttaccaaattggacatggccaccattgaggagctacgtggagtaatagagggtgcctggaagcagaaggatgctgctcagattcgtgagcaatccgctcaggacgaggtcctaagtctgcgcgaaaaactggatgagtcagagcagatggtcgcccatctaaatgagaaacggctggccatgagcaagcgggacgatggcaaggaacgggagcgactcaacgccgagattgcagatctcaacaagcgattgcatttgcaacggacctacgccacggaactggaccacaccatcgaaggattggaggctaaaaacaaggaactgctcaagctactggatgaaacttccagcgatgcctgcaacttgaaacgaaaaagtgatgccttgaccaaggaactttctacgatgaagaccgaggagtcccgctaccaggagcaaatatcccagatgaagtccgctaacgagcacttgaccaaggtgaaagtgcgccagaacctgcaaattctgtccctcaagacgaacctggaacatctaaatacccagcacaatgcggccaacaacaagctggccaagatcacggtggacttggagtacacggtgcaggaaagggataagaacaagcgtgctctgaatcagcgcatcaatctactgaaggtgcgcgaggatgaattgattaaggtgcgccaggacaatgggaagctggccaagtcccaggaggcgattgctcggaaatatgcggtattagacgaggccaaacgggaagtggaaacgctgaacataaggctcagaacccagctgggcacccaagacaaggagctggagtcgatgcgccgggtggtccatcacttcgagaagaacaacgaaaacttgaccaaagagcgggattccctaaggcgggaactgcaggcggagcaccatcagctcgagcagagcaatgcacagcaccaagaggcgcagcacgaggtgcgagctcttaaggacaccatcaccacgatggacacaaagctgaagaagctcaacgaggacgccaacaagctcaagaaggagaagaccaaaaagctggacgagattcagcactggatagacaaattggatgctttgcagaatgagatgcacttgaaggagaactacgagatcgaactgaagcgcaccatcagcgacttggaagccaagtgctccaagttccagcaacagcatgatggtcttgccgctgagcgccaaactcttcagcggagtgtccagttggccgatgaggagcggcaaaagcttcgcgatcagctggtgaatctgcaggcgcacgtcgagaaactaaaggccaagatcggttacagggatggcgagatctccagacttcagttgcagatcgatcgcatggagaaggagcgccgactgctacgcaacgaaatccggcatgcccagcttggtcagcagcacaccaaggctgaactgctggacaagcggaaggagaacgatcggcacgccaagtcgctgcaagaggacgagcagaagctggcgcgcctgcgcaaggatgtggacaacctgatgaacgagaagaatgcgattagtgcggcgctgaccaaacgcaacgaggagttcgatcgactcaagcacagccaggagaacctgcaaacggtgtacgatcagacccagaggcagtgcagccagtatcaggatgatatgcgtctaatgggcgtggagataaagaatctgcgtacggaaagggatgtcctgcgcgcggatagagagagtgcagcggatctgcgccaggaactgttacaaatgcatcgcatgctcaaccaggaacgaatcaaggcgcgtgccctgcaggacgagatggttacgccgatgaatgtgcatcggtggcgtctcctgagcggcaaggatccagaaaaaatggacctgctcggacgcattagcatcctccgaaagcagttgctccagcagaacgttgccgcctcggagcaggaacgggccctcaatgaagcccaacagctctatgcggccttgagggagttcatgctcaagctgcccagccataaagtgcgggcggagctcaacagcgttaaggctaacctatccgccaaggatcgcaaactgaaggtcctaaaggccgagctcagtgcccgcgaggcagacgagaagtccaaaaaggagaagcttgaagagatgcgggtgagtttggctctaaccaagacccaactgctagaggagaagaagcacaagcagaagttacttgaggagcgacagttgctggagcagatgcattgctactccgcgcccgcccaactgcctaggactctgggtgcgggtttcaagatggtcagtagtctactctaa

SEQ ID NO: 12468 - protein, 866 aa, DROSOPHILA
MSKASGSEDEPLVPDDFDDDFYKELCDKIPEATKALRQKDTPNNADNVQRLLICGSRYKSDLRLEKERSQELRKEIESLEERLENAARVTKLDMATIEELRGVIEGAWKQKDAAQIREQSAQDEVLSLREKLDESEQMVAHLNEKRLAMSKRDDGKERERLNAEIADLNKRLHLQRTYATELDHTIEGLEAKNKELLKLLDETSSDACNLKRKSDALTKELSTMKTEESRYQEQISQMKSANEHLTKVKVRQNLQILSLKTNLEHLNTQHNAANNKLAKITVDLEYTVQERDKNKRALNQRINLLKVREDELIKVRQDNGKLAKSQEAIARKYAVLDEAKREVETLNIRLRTQLGTQDKELESMRRVVHHFEKNNENLTKERDSLRRELQAEHHQLEQSNAQHQEAQHEVRALKDTITTMDTKLKKLNEDANKLKKEKTKKLDEIQHWIDKLDALQNEMHLKENYEIELKRTISDLEAKCSKFQQQHDGLAAERQTLQRSVQLADEERQKLRDQLVNLQAHVEKLKAKIGYRDGEISRLQLQIDRMEKERRLLRNEIRHAQLGQQHTKAELLDKRKENDRHAKSLQEDEQKLARLRKDVDNLMNEKNAISAALTKRNEEFDRLKHSQENLQTVYDQTQRQCSQYQDDMRLMGVEIKNLRTERDVLRADRESAADLRQELLQMHRMLNQERIKARALQDEMVTPMNVHRWRLLSGKDPEKMDLLGRISILRKQLLQQNVAASEQERALNEAQQLYAALREFMLKLPSHKVRAELNSVKANLSAKDRKLKVLKAELSAREADEKSKKEKLEEMRVSLALTKTQLLEEKKHKQKLLEERQLLEQMHCYSAPAQLPRTLGAGFKMVSSLL

SEQ ID NO: 12469 - DNA, 2890 bp, DROSOPHILA
gtgagattcggaaccaccttgggtgccagctacaatctggaggatgctctatgggctggcctcaccgatacctactgcaagctgcccatggctctgaccgctgagaacctggccgatcagtacaagatcagtagggagcgtgtggatgagttctctctgctctcgcaaaagaactgggagaagggtcagaaggagggagcattcaatgccgagatcacacccatcaaacttaaggtcaagggaaaggaagtggactttgtggtggacgagcacccacgtcccaagaccaccatcgagggtctgaacaagctgccttcgctgtttaagaagaacggcgttgtgactgccggaacagcatccggaatctgtgatggtgcctccgcagtgatcgtggcctccgaggaggcgcttaaggagtacaacctgaagcctctggcccgtctagtggccttctcctttgtcggagtcaagcctgagatcatgggcattggcccagtacccgccattcagaacgtcctgaaggtttccggcaagaaactggaggatattgatctgattgagatcaacgaagcctttgctgcccagacattggcttgcgccgatgccctgaagttggatacctccaaactgaatgtgaacggaggcgccatcgccttgggccatcctctgggtgccagtggctctcgcatcactggtcatctggttcatgagttgcagtaagtttccgtggaaatttacaacctgtcataaattgataattatatattttttccaggcgcaagaagctaaagtacggcattggatccgcgtgcattggtggtggtcagggcatcgcccttctcctcgaggctgtctaatcctacagcttaatgtaataggtgccctgcatttacacttaaattagtgctgaaaattccgttttaaaaataccccgatagcaataaagaaattattttatctttacaatttattcaatcagcagcgaatggaagttgatcagctttctacaagaaagacaagttggtgtttatactataaaatttctatgctcgcactgctggaaacgccaatgggacgggggttggcggatgaaggaccagcccgctgtaccaggaaatctcttgaagggccttacattacgagtacatgaacatgggatgacatggctgcacattcgctcagttcgtctgtgcgctggtggagaagagcgacagagcgccgctggcgatgcccacggaaaagatgtagttgatgaacggcgtcgagttcttcaggataaagaagctgatgaaaatgataacggccaggtagatggcgttgttgtagaagatggagaaggtggtggcctcgtagtcggctacctcgttcttcttccacaggatgcgctcgtccttttccttgcgcgtgaccttcttgtcatcgcccacctgacggttgacctcgcgggtcaccgcctcctcccgccgtccggcgatcttgtgcttcagctggaacttgatgttcttgtaggcggtggccatcagataagtactagcggccgtcaccaggacgaacaggatggagctgggccacaagtccatgttgtggatgcgccagaagagccctgcaaggagcatactccattcattcacaaagtgtcccaaaacatacaacgtgtcactttactcacagattggaacggccgacacgataaaggcattgccgtagaacagcgccgacgacttggtgctcacgttgcggctaaagtcctgcagcagcagctcctcttccttggtgaagccagaggactggactttctgttgtttgccggatcccatttttcagttcgattttcgtagagaaagtagcgaagagtgcggtaaagtgtacacgaatgcaaacgcaagtcggcttcgacgaattgtgacgtgtaaacgtcaaaaaccagggctgcaggctggagtgcggctgtcagtggctgtcgattggcgatgacagcgctgtcgtctatcgatgtttgccatggtttttagcattttgtggcggttatggttatttatttgaatttatatgacgatgatttgtataataaaatgacattgctgaggcgatgcttcacatttactacatttaattgcaatacagtccttcataaatagtgtaagctatatttttttaaataaaataatactacttaaaacatatttgtttatttactttttaagtgtgttcactaagatttatcatggggcttactgggtagttttcaaacgctcttaaattaataacattaatgacataatgtatcttacaactaagaaaaagtattaaccattcggtgtaagcctattttccaataagatccccattctacgccactggatttcggactatcgatagcgcaacaggttcttcggcagctgagtttaatagttaaaactgcagcgcttaataatattcataggtaaatacgaaaactgccttagttttgaataatttactttgtcgcgcataaaatatattcgtatttaaaattgagttgataaagaagattacggacatagaaaattagaaaccggcatccgtccaaaggtcactttcagttgtgtttacgtcttttgtgctcttcagatcaaaatgatgcgatcgaaagtcttgagcttggtggcccgtgctggctccaaccgtatgatgtccactgccaccaagttgaccacagtggaggtcaacgacaagaccggcatcgccaccctcacgatgaaccggccacccgtaaatggtcttaacttggaactgctgcaggacctgaagagctccattgatgaaatcgagagcaataagagtcgcggactcattttgacttcggtaggaaggatattaaatcaatggagtataataaatacataaatac

SEQ ID NO: 12470 - DNA, 824 bp, DROSOPHILA
ccgacttgcgtttgcattcgtgtacactttaccgcactcttcgctactttctctacgaaaatcgaactgaaaaatgggatccggcaaacaacagaaagtccagtcctctggcttcaccaaggaagaggagctgctgctgcaggactttagccgcaacgtgagcaccaagtcgtcggcgctgttctacggcaatgcctttatcgtgtcggccgttccaatctggctcttctggcgcatccacaacatggacttgtggcccagctccatcctgttcgtcctggtgacggccgctagtacttatctgatggccaccgcctacaagaacatcaagttccagctgaagcacaagatcgccggacggcgggaggaggcggtgacccgcgaggtcaaccgtcaggtgggcgatgacaagaaggtcacgcgcaaggaaaaggacgagcgcatcctgtggaagaagaacgaggtagccgactacgaggccaccaccttctccatcttctacaacaacgccatctacctggccgttatcattttcatcagcttctttatcctgaagaactcgacgccgttcatcaactacatcttttccgtgggcatcgccagcggcgctctgtcgctcttctccaccagcgcacagacgaactgagcgaatgtgcagccatgtcatcccatgttcatgtactcgtaatgtaaggcccttcaagagatttcctggtacagcgggctggtccttcatccgccaacccccgtcccattggcgtttccagcagtgcgagcatagaaattttatagtataaacaccaacttgtctttcttgtagaaag

SEQ ID NO: 12471 - protein, 190 aa, DROSOPHILA
MGSGKQQKVQSSGFTKEEELLLQDFSRNVSTKSSALFYGNAFIVSAVPIWLFWRIHNMDLWPSSILFVLVTAASTYLMATAYKNIKFQLKHKIAGRREEAVTREVNRQVGDDKKVTRKEKDERILWKKNEVADYEATTFSIFYNNAIYLAVIIFISFFILKNSTPFINYIFSVGIASGALSLFSTSAQTN

SEQ ID NO: 12472 - DNA, 4307 bp, DROSOPHILA
gcgatctatggatttgaaggatttgaatccttgagcgatgacatcggtgtacatagcccaagctccggtttcgtggagtccatcgtagtctcaatgctctccaccatggaatcttcgctcgatgatgagacggcttcctccacattgcccacatactcctccacttcgttttcgccatcgtaaagctgatccaaggcatccaaatcgatgatcaaacggcgcaaatggcgcagctcatcatgggcacgcgacactttccgctccagggccttcatttgggcctgcacatacaaaatggatgcaagcatatacgattttatttaaaatattgttaaaatttcaactctaacctgcggaattagcggacagcccagaaaatgcaaaatgtgcatcagagggtccgatggcaacggatcgatatccaccatttgctttaaaatctccagaagtcgagggaaaatgccattttccatcaagtatgcaatcgattcttcttctctttccgacatgttacgtgtttaaaacgaccaatttggtaataaatttggcaaattgtgaaatttccaattgatcttgtggtggcgggaataactgtaaagcgagggctgcacttgcaatccgcaatttgcagcacctggcggtagatttcggtaccctgaaacatggtgctgttaactcataacagtgggctgttgcacgcaagactataattcaaatgtttttcggcgccaacaagcatgtgtaaaaccatttttttggtttgacacactatcaaatatttttggactcctataagtttttgccactttaaaaggttttgtggaaaaagaagccggctgacgctccggcagcatcgtaaattcagtgtgaccagttggatgcgaaataaaaacgtaacattacttctcaccgcttttcagtgtatttgccggaaaacgaaactgtctcactgttttataaatataagcaaagcaacaacaacaaatatagtcaaaattcgaaagaggaatagaatacaagttaaatatagcaccgatttttgaatagaccatggagaagctaagcaaggcgaaaaaagtggcgcgcgaggagaagcagcgcgaccagaagttggaggagttggtaagagcgcgtgatggccaaaagccagaaccaaaccctatttccatagactgccagaatccatggaaacgggaataaatagacaaaatttaaggcggaattatatctattttaggtcatgaaatcccttgacgaatgcccctccgccgaggagaaggtgaaacttctgctgcaacgccatgtggacagcgaaaagaatgtaagccggctgacggcggaactgcgtgtcctgcagcgccaaatggagtcgcagcagagggagaaggagcaggttcagcgggatcttaacaagagcgtcctgatgcgagacaagctgcaggaggtgtgccgcgaacagcagcgcatcataaagtccgtaaagaacgagagcctgctgcaaatcaaagtggaggaggagcggcgcaaggagagccagacaaagttccaaagctccctgaacgatgtccaaaagtcgctggccaagaacaacgaggagaacatcaagctgcgcgattacaacatcgagatgaccaagaagtaagcatcgccgcaacgctgcggggatccgcgttctaaatatagccactgcacacgcacgttctctgttttccgattttccctaaccatctggtctcccgttttaggttaaagctgctggccgagcagtaccaaacgagggagcagcacctggagaagctcaatgaacaggttcagttggaggcccagctgcaccaggccaagctgcaaaaatgccaggtggaggctgccatggaaaaggagatattgagcaagtatgtgcacaacatgccgggtcatccggcgcttctctgcatctcgcgataaacggaccatagatggtcacacattagaaaacaagtttttatttaacaaactcgctgagattactggttttgattgaggacagctgagtggctagcatataattcatattactcggtttgctcttcacttgatatgatttagtcaaagcttaatccacacgaaaaatatctaaactccacatttctttcagggaaaaccagattggcctggagaaactgatgcaagcgcaacgtgccataaaggatctcaccgatcgggagcaccaactgaaggagcaactgaacatatacaccgccaagtacgatgacttccagcagtcgctgcagaagtccaatgaggttttcggcagctacaaggtggagcttgagaagatgtccaagcacactaagaagatcgagaaggaggcgctgggctggcggcaaaagtacgagaaagctaatgccatggtgatcgatttagccacagaaaagagtctgcagacgcagcactcagagcgcctgcagaagcaaatacagcagctgcagaagctactgcgtgctctacagctggagaggacaacactgcacaagtgcctgcgggatcacgagatcgaaatacccgccctgccgcagttgcctcctgaaccagagccagtaaacgtcaagccagttagtgctgaaaatgttaaaatggaaatgatgtctcgcaattgtgcggaactgaagcaaacattggcaaatctgcagaaccaaatgaagctgctaacgacgaatgaatcgaagacttccattgaggaaaagaagaaggccgaggagcagcgtcaggcgaacaatgccaagaagaatatacgcaagaaggagaaaaagtccaaggcaaaggcagcagctgcagcggcggcggaagctgcagcatccacaacgaacggtgaggcgaacggcgttcaggaatcagccgcaacggagtcaaaggccgagctagaggcagcgggtgatgcctcaaacgttaagaacgaaaaggagcagaccgttgacattgcgacagacacccaggagctcgtaggtgatggcgacgctatcaccgcaaagtcacttgttgatatatccgaagtgcctcccctaatcgatgccaatgccaactaaactactgactgttcgcctatagtcccatctccaaatctcgggcggccaccaagccttccctgcaaagcattttgtgtcatccatgtctcaactgaaaaacgtcatcaattacaaacctacatggtccgaattttgtactagttatttattgtactttgtatattgtatttatttaaaggatgtcgtcggtgatcgtgtattgctgttcaacaacaaattgagtaaaacgtgtttcctgcaaacagaataagaatattaaaattatttctttgggtaaatatttgcagaatgtccttccaaaagatttaagcataaatcttagcccacatttcgcatcaatttgcataagtggagtggaatgggaaactgccagagcgcacaagctcgatggccatggattgctttcgtcattgttggcgacgccacaaagtctagtgttgcatgcaacacattgcaatgccaacaggcgaacggatgggggtggcttcaacggtggtgatgagtggtgagtgcctgcggttcgtggccagggtcattataattgcgccttaattattttcaacacgcagctgtcatttttgccgggccccagatttccgccatcaaatatttaagacgcatgcaacgtggcgtatgcgtaacgccaactgctgccagcggtcactcggtgcgggcgagggtgttgaaataaggccagttaagtcactaaaataattacacaaattaatttaaattgcataaagaggtgcatacgaaagaaggactaattatgccagctctcaaggcaacaactgtttttaccccttttttcacagcatgttttatgtactgtaccctatattgttaggtccccgagcgttcttccatggtcattagaaatttaattaaaaattttgatattgttaggagtatagggaattctatttatttcaagcttcttccgcccgattgcccattaagcggtattaaaactgtcttcccctcggtgccaaagtgtcatacttgtgcatatttcacaccctcgctcgcattcacagaaatgtgtgcacatttcgcaggcaatgagcttttgaacatttaatgagttaatacgctaaatttgaaagccgctcaagcgtgcgccaagtgcttcaaacacttgtccccatccccgagctgcccattttccagcttgaataatgagaatgggggtatcaagccgctaaatccagcactgaaaaatttttcatcaacttaatagaaatg

SEQ ID NO: 12473 - DNA, 1843 bp, DROSOPHILA
aaagaggaatagaatacaagttaaatatagcaccgatttttgaatagaccatggagaagctaagcaaggcgaaaaaagtggcgcgcgaggagaagcagcgcgaccagaagttggaggagttggtcatgaaatcccttgacgaatgcccctccgccgaggagaaggtgaaacttctgctgcaacgccatgtggacagcgaaaagaatgtaagccggctgacggcggaactgcgtgtcctgcagcgccaaatggagtcgcagcagagggagaaggagcaggttcagcgggatcttaacaagagcgtcctgatgcgagacaagctgcaggaggtgtgccgcgaacagcagcgcatcataaagtccgtaaagaacgagagcctgctgcaaatcaaagtggaggaggagcggcgcaaggagagccagacaaagttccaaagctccctgaacgatgtccaaaagtcgctggccaagaacaacgaggagaacatcaagctgcgcgattacaacatcgagatgaccaagaagttaaagctgctggccgagcagtaccaaacgagggagcagcacctggagaagctcaatgaacaggttcagttggaggcccagctgcaccaggccaagctgcaaaaatgccaggtggaggctgccatggaaaaggagatattgagcaaggaaaaccagattggcctggagaaactgatgcaagcgcaacgtgccataaaggatctcaccgatcgggagcaccaactgaaggagcaactgaacatatacaccgccaagtacgatgacttccagcagtcgctgcagaagtccaatgaggttttcggcagctacaaggtggagcttgagaagatgtccaagcacactaagaagatcgagaaggaggcgctgggctggcggcaaaagtacgagaaagctaatgccatggtgatcgatttagccacagaaaagagtctgcagacgcagcactcagagcgcctgcagaagcaaatacagcagctgcagaagctactgcgtgctctacagctggagaggacaacactgcacaagtgcctgcgggatcacgagatcgaaatacccgccctgccgcagttgcctcctgaaccagagccagtaaacgtcaagccagttagtgctgaaaatgttaaaatggaaatgatgtctcgcaattgtgcggaactgaagcaaacattggcaaatctgcagaaccaaatgaagctgctaacgacgaatgaatcgaagacttccattgaggaaaagaagaaggccgaggagcagcgtcaggcgaacaatgccaagaagaatatacgcaagaaggagaaaaagtccaaggcaaaggcagcagctgcagcggcggcggaagctgcagcatccacaacgaacggtgaggcgaacggcgttcaggaatcagccgcaacggagtcaaaggccgagctagaggcagcgggtgatgcctcaaacgttaagaacgaaaaggagcagaccgttgacattgcgacagacacccaggagctcgtaggtgatggcgacgctatcaccgcaaagtcacttgttgatatatccgaagtgcctcccctaatcgatgccaatgccaactaaactactgactgttcgcctatagtcccatctccaaatctcgggcggccaccaagccttccctgcaaagcattttgtgtcatccatgtctcaactgaaaaacgtcatcaattacaaacctacatggtccgaattttgtactagttatttattgtactttgtatattgtatttatttaaaggatgtcgtcggtgatcgtgtattgctgttcaacaacaaattgagtaaaacgtgtttcctgcaaacag

SEQ ID NO: 12474 - protein, 515 aa, DROSOPHILA
MEKLSKAKKVAREEKQRDQKLEELVMKSLDECPSAEEKVKLLLQRHVDSEKNVSRLTAELRVLQRQMESQQREKEQVQRDLNKSVLMRDKLQEVCREQQRIIKSVKNESLLQIKVEEERRKESQTKFQSSLNDVQKSLAKNNEENIKLRDYNIEMTKKLKLLAEQYQTREQHLEKLNEQVQLEAQLHQAKLQKCQVEAAMEKEILSKENQIGLEKLMQAQRAIKDLTDREHQLKEQLNIYTAKYDDFQQSLQKSNEVFGSYKVELEKMSKHTKKIEKEALGWRQKYEKANAMVIDLATEKSLQTQHSERLQKQIQQLQKLLRALQLERTTLHKCLRDHEIEIPALPQLPPEPEPVNVKPVSAENVKMEMMSRNCAELKQTLANLQNQMKLLTTNESKTSIEEKKKAEEQRQANNAKKNIRKKEKKSKAKAAAAAAAEAAASTTNGEANGVQESAATESKAELEAAGDASNVKNEKEQTVDIATDTQELVGDGDAITAKSLVDISEVPPLIDANAN

SEQ ID NO: 12475 - DNA, 50272 bp, DROSOPHILA
ctcagaattcagagaataagaattacataaaaaaattaatttcaattgcggaaatgagaaggaatctcatttatatgaggaaattttgtacttaaagatgctaagttacataaatatgaatttattttatatactgttttatttttattacaagtcgaaaatattgttttaatatttatcgaatactattatttaatattcaatctaaatattaaggataatttttatttagttgatgttctgcgtgttgtaattttactatccacataattaacagcagtgttttggcaacttggccatacacccaaataaataactcacgacaaatgttgctattgttgcccgtgttgcacggtgttttcccattgtttgatggacaaagcagcggcaacaattatgcggagcatttgggcaaaccgaaaagctgaaaagaccaactaatgcaaacaatagttgaatgtttgccagccatttcatagttcgcatatatgacagacagcccgaaaggagcaaacactgagggaaatagaatccggtggacttggtggtggcattccaggggggggagggtggtaaacatcctgggcgacggcaaaaaggatatcgcgtgcgaacaaaaaatcaccatgtaaacacacatcgcacacaaaaggcgcgatactggagaaagctttcaggactctcgactaaccatttccccccgcccgctcgtttacaacccaccatgggcaaggggaaagctacatgtgtacaatagtcgccttcgggttgcaggatcctgttgttcctaaactgttttgttttattgtgatttttatgccagtcgttttgttttggcatttttggcaaatattagttccatactcctgtcatcgtccgatggcaaatggaatgctattgtgtgtcgcttgcttttcttcggggttaatagccataatttcaaaaagagacatacccaaatgttttagggttatagttgcactgaaataaataagttcgtattcttcaatatctttatttcataagtttattgatacagtaatatttccaacttttcgattttatagtcttacaatcagcaaacataaaattatagtctttaatgatagcaactatttcaaaacttttacactaaagatacaaatcgtgttatatttcaaaagatacttagcaggtgaacatatatgggagtattaattttaagttattcgggaaacaaatagcttcagcctattttaatctcattatagtctcagaaataagctactcagatatccatatactagttagtactgatgcgtaaaatcccaacgaaccgtttggagcttagggctgctcttcctcaacgggatctgcaagtgcaagattattaatttagatacgtttttggtaagcttgttgagtcaattataagccaaagtcgctgcagttcatgcaacgcagacacaataattaccagacatttatattaagtttaattgcatacgtgcggcaagtatgggcaatgtatggaatatgtaaagcgttttatgatttatgcaaccccacgagctcctcaaacccacaaacaaaaccaacaaatcatttttctggccaacgctgacagctgcaatttttcactgctaccaactgcgggcctctggaagtcatgcaacatttacaacattcactcgtccaaagtggagtccaactttaaaatgcattccccataccgtcacaataattcccaattgaaagccaccccaaatgtgagcgggtgcacacagactcccccaaaaactcctaaaccgaatcaattaaattcaattaggctcggtaaaaccacaagccaagtgcataaccttatcggtcagtgcaagtgcaagtgcaagtgcaggatacaaggatacaaggataccccaatcgccagtttgggtcccagtttcactccccgagcttagctgtcaatcttattctaattgaagcgcatgcagagggatcccagaaacacaattgcctacgactcgaatttcgcatcacaaattgacttttacgcataaacaattgaaattctgaccagatttccggttgagacttaacctttcctctacgaaatttaccccctttttgtggcaaaatcaacaagttaactgcactgccgcctgtcattcaaatggagattgcgaatttatccccttgggggctatatggcattctgtgtttggtttctcactgtctaattgacttgtgagtggagcttggaattttatttagtttgggggggccctttaaaatgaaaaacgaaaactcaaggcaaaggaaacacaattttaaatactgggagaagaatgtgatttttcccaaagctaattattgttctggtaaatatttagggaattttaaataattttaagctaagctcttcttaccacatcgatattctgatatttaattgttggtacatattaaaaagtcatgtttttaagcaagacttaaatatgactaaaaacttgtttaacatcgctcgcaacctgcaaaacatttttaaccctattgtcgttttaacctttttgaaaccagaaatttttcgcattctcttggctcacaatttttgcataatattttctttgcacccctggcgctttcgttatcattcccttaattaattaaaaagttgttgcacctttttttgggttctcttatttttttgagcaaaaaaatgtgcacaatttttatttcgcacatgcgaaattagcgctgctggggcgcacatgccttgttaaaatatttgcaaatatttaaattgacatttttccgtcatgttatgactatgaacaatgtcaatttagctggatgccttgaaggcccaaaggtttttttgtcctggaccctctccttttggcatgcccttgttcggtgagtttaaaactccagcggcgaacactttaagctgcatttgcaaaatgcccgcacacacatcgagcaactaatcaaaacaaattcaattaaacgacacacgacaagccacgacgactggcatcggatggtctcagagttggggtctctcactctgtgtatttatatgtggagtattccccactcgccgcttccgaggcactgctcctccttttggcttatctggcagcacaatccattaaaattgcacatcgtttacaccaaaaatcaattcgccaaagcatttaggcattacaaatgccaagccagccactggagctagtcggctgcgcggcattggagtccaggtttttcgggatcccgcttcaaactgaacgttgatgcccataaatttcgcatggggccctcactcttttttccctgtttgttttctggccccttggtctcttggagtcagagtctgggcttttgccgggctaccaggcgataaacgcagtccagttggcattgctttgaaatgtatccgccagatacgagtagtacaaaagctgcatttgtggagagccagtcgcaatctgggcccaagtggatggccagttgttgtcgctggtcagttgtgggcagaggtggagcttttggttaattctaggggttagggatcctaaaaacaggggctacacatccacacttctattccttttcatatcttcaatgttagtaatagtcgaaaagtatcccctttgtggcgccactgcgtgtgagctatgtttttgggtcgtgtgtctcctctagagtggagtactcaaaagattgaagtagtacgattgcgtggtggattttagaacctttttgggggaactactacaccttttctggataaaaatgtgcacttcaaaacacactttaatgtaataacaataattaatatataaatctgttaatctataaataaatgcggccgctgttatgttctctgttcaaaaaggtaatatctcgaaaagttccacctctaaaactggcaatcgtcctcgacttcggaccctttgtatgtcagtgtcacctcatgcccgacaaattatgtctatcggaaacacagaaagcctgcaaggagacaaccataaacagacccaaagccaatccgtgtatcgacggcagcacaaatgcatgtggatcgccgatgttgatggtggcgttcgttcggtggcgtccaaagtggtcagtggttcgattccagtggtgtcagttcgtcgtgcgttttattagtggcaactcaaacagcaaattgagattagaagccagtcgacgactgactgagtaagtgaggccatgagttatgggctgcattaaagcgcatcggaaaattaaaaaaaaaaaaacgtagtaggagaagcggattctaaaatgccacccattaggtttttaaactgggtgacaagtgatagagggctgtgtatagtacttaaacgacgaactaaaacatttacaaaagaaaaaataagtaaaaaagttgaatacatgttccttacaaaatggtacattattatttcgtacaacatttatctaatctgcatgtacttaagtgctttcatttatatggaagggcgtacaaagaattgaattattttacgcgcccatttagaacgcttagaggtctttacgccaccccaagaactcctttctccacttacacaaaaatttacatttgattgctgttcaatcaactctcatcgctggcgacccacagagttcaacatgtgatatccttgacatttatgagttgttggctctgtgggacccccgttcccctatacaaaataacatgttagatcaacaacgagaaatgacagatattatttgcataacactgaaacattcctcgtgagtttcttatatccctgttgcttctgtcagttactggatttcttttttttaacataaatgatagcaatctgaaatgtttttcgcttccccctcgcaacccgcataattcacttgatattcctcatctgactttcacttacaatccattccagccctcgaaaagtaaagggaagacaacattaggccttattacatttgacatgttgctccctggaaaagttttctttcattttcgtagcaacccaccccttggctacaaatcaaaagataaattgtttttcttcatgatttatatataaaaacgttctgtcgacttcgcaccaaccttcaactttcgttccttatcattggcggcgttgaaagcggacaacaaatattaatattgtttgtatttcatgcgctatctgctttttatttcgttttcaatttggccatgtctgactcggaagaagggaagtcgcatgtcaaatttaatataaattattggcgaaaaatcactggaatgggatgaaagttatatctacgctttactcacattccttggcctttttccaggagtgcgttggcatcgccttcagctgattttcgtacgccttcttggctagcacatccttggccttcggatttggcttattgcagttctccgagtcggcaaagtggtccagatactcatctcgcttgcagtagatgcacaccccgtagatatactcctcctcgcagattgttgcattcgtggatcgagcccagtcggcatttttcgccgccttaaagagtttgcccacgtagatatgggcagttgggatgggagtaaaggcattcagggcaatggtggttatcggattgtgctccaagttcagcacctgtaggttctttaacttgtcaaaaaggccgctggaaagggagtcagaacgtaattttatttaatggttaccgaaaagtcatactggggtatatatgtttgatgtctgtatttgtaatagcaactcacctctgaatgcgatccaaattattgaacgccaagtgaatctctaaaatcaagggagtgttcctgaaaagctgatcgggcagcctggcaatattgtttctttccaatcttaaggtgagcagtttcttttgcaccttaaggaagtccttgctcaaatagctgatgttgctccttattccaatgtatgccaattgctccgacatccagaacaactcggttggcacattatcaccgcaattgaagagctcgatcgactgaagttcggtcatgtgccagagttcttggggtccaaaagcggacatttcgacactactgttcttggcatcgcagtcgatcatcagatgttttagcttcgattgctttgcaaatattgcacccgacaccttgcccaaattcttgaccacaatttccaaatgggttagatttttcaaaggatgcaaaatgttaccgggcaaatcactgcttccctttaaggagagttgttgtagtgccggcaggttttcaagaaaattttcaggcagtgttgacttgaatccaatgatggatactttcttcagactctcgtgatccgtgtagtgttgctgcaggacctcgcctcgatccgttttcttgggatcgaaatagttgaagatctccagttcggtgtagttgctaacacccagcttactgagcaagtatttgatgctttctgcatttggtatggcacagttttgaacgatcagggaaccgatattgcccaccttaagcggtggtatatagccgaatcccctggcatcgaatatactacagctaatgccgtataactgcaaattatcactgtgcaattgaaggttctcgcacttgatctcctgctcctggcactcgcagagatttggttccttgaccaatgcctcacaaccagctttggtcacataacttggattgatcactgtggcattctcctgccacgacggcgcaattagggacagcaaaagaagtagccaccacatcctgaggctaggactccgagcagactgatcgctgtaaggcaggagcagaggattttaaaattagtttttacgatccaacatctgctccggaggcaacatctatagatactttactactaggtgcatctttctctttgagtctggatttcctgcaggtagcacgcatttccctggaagtgctgctgccgctgctgcgtttttccttctagccgaagacgccgccccccattttacacccaaaggccggctgccattttacacaaatttgattacccggggccggtcaggtaaaccccctgccgtatctttgccgcttctcgctctacctgttcgcttaatggcccataatttactacgcaactcgcccgatttgtgcataatattaaaccattttgaattcgcctttgcaacaaaaatcaaaaaaatcgaacgcaaaaaacggcaaacaaaatgacttaaattgccatttgcgttgccttcggtggagtttttttttttttaagttggcgaagactacggggtttttggggagtgcgagatgatctgtacgtaaaggcagcggtgtgaatccaaaagagtgggtctgataacagttgaatatgcgcgattttacatacgaattgcaggccacagatgaagaagcgaatgggagcgatctgagaaacgtttaatactgcacagtgggcttggaatagtagaaaaatgttaaaggtatcatttgatgtaataaatgggaatagcaaccaaaattaattatttatacaaatataaattcaaatctatcaaaatttcatttggcattctttattaaaagatacatagaaatgcaaaggccattttctaagtttgtatgtttgctttatgcaatcgtcaacacactgtacctttcatgccagattattcatatcgagctcttcccacctcatcgtcatcctcatcctcagccacaatcttatcccaaaccactttgaacatcctgcagtgcaatttcagtgcggagccgctgttgatcttatttcttgtgcgcgaaactgggacttcgactggctgcttctgctcgatttcgaacaaattacgattcattctggttttcagtttcattacaaatgcaaaaatgcaaaatggcaagccggccattatctcagagacccaggacggtatggtatggtatggtatggtatgagttgaaatgggatggcatgggatgtctgtctgtctgttgatcgatgatcgctgtggccgccgatgatcaagttttgtgtatcgtttgaggcgtacatgcgtaagtgcctttgatccccgcacctgacccccccaaccttgagttcggacctcctcctgcagcagttgcattcacagatcggggccaatgcatttgaatttgtctggccggcagccaaatcgatcgacaaccaatcagccccagtccagttcggtcagccatcatgccagtttgcgcagtctgcccatgtgcacccagaaaaattacgctctcattaatcatttacattaataatataaaaaatgtatcacaaaattatagtgaactttaactcaatttgtgactctatattattttaaatattttgtttattgaatatcaaaaggtgattgtttattacatataaatccactattgaagaaacgaatttgtataaaaatatctttaaaaaatatttttacttaatatcgtttctgcagatcctttcatactgagtaaaatatgcactttacactagattgcagtcatgcatttaatatcagtgttattttgaagctgctgcttctgctgctggcagtggcaaacatttcatttttcacgatccacgaaccgtctctcgtattcccaagagctaaatcaataaattacgtgacaggcatgcagaaaacctgatgcctccaactttgcgttggctttagctcaagaccacttcttgatcgccgtttgcgttttgcttcgttttgattgaatcaatcaaaaacttgtgcatttatatgaaaagtattaagcagtaaggacggccagcaaaatgaagaatgaataccctgaagtgtatgaataaattaaaatgatatgtaagcaaaggcaggatatatagtgaaataaaaaaggcaaggttgataacccctaactgggtgtaagaaatatgtgtttgaaactaaatgaaagcaagtccgagaccatttagggaattcaaatgtttttaactggataatctatatattgtagtttcccagttatattatatattagcaccaaatatgtgtactattttatttctactattttgaatacctatgatctcttccttaaatagagtattgaatgaatgtcggtgagcatggatcatacacatatcgtttgcagatcttctggcgctgccataaacataagttattattatgtcttgcccaatggccggaccagatatattttctgttctccatttacctcaccttgccatcttggtaagttcgcattaaatttgattggttttcatttgttgcgagcaggaaatgctcaataaagttcttaactcggtttaattaactctgacaaattgaactctgtgcaaaatgttttccgaaaagtaatcgaattaaaatcgaaggaaaagtcattcttcgacttgcgagtgccgctccttcaattagtaataaataatttgggctggttgaaaagttttacgccagctaagcgatgcataatccatgaaaggccacggcaccagccgagttcaggaagccaaggactcggacccataaagtctcagaaagtggaaaccaaacgggtgcaggacactctttttgttaataccgctccattgtgcggcgaagtcttcattgattttgatttcttgtaccgaggaaaatcgccttaggccaaaactttcgacccaccacaagagtatttaccattttgcaggacagacaggcaaataaatggtcataatcctggccagacaaaggctactgttcctgctccaactcctccaccttaacccacagctcataactcatgtctgtgctatttttgggggtgttcctgactcttttatgcgttttacatttgatttattccacatgcaaattgcggtatacaaaaattaagttgttggaaatgttttattccgagaaacgttttgcgtctcgccgcgactaaataataattcgcctcaaattcaaatgcgcacgtttcacaaagaatacagagcagaaaaaagccataacatagctcaaggcgcccccatatcgtgagttcttatataaatggggaggtagaactcgccccttcccaaactcttttgtcccggggcacaacccgctcttcgaagtaaatgcatgaaattgaatactcgtaccaggcccaaaataatacttttgacagagtaaccgagaaccatcatctctatttggcattgtagttatcctatggctcaatgttctgtttatttatgcgtttgcgcctatttatttattttaattaaaaggggcacgtgttgctgttttcttgttttctttttgccacggcaacataacgcccggagaaattgacgatggaaaatcggaaggcatggacctgtaaggtgtggtccctttttttttggagtgggtgggaacgggttgtggcaagtgcaacgcagaactgtatcaatgacaaccctgaagtttcgtcaaaatttaatattgtttaccgaggtaaatgaaaaattaatttacttgtgttatttgtcgaatctttcaatagaattatataataagcttattttaccggtttatttgcaatgcgaaatgaaaaggatataagtgcttaaaagagcctgtattttgtgggacttactttaagatatcaggctatcacgtgatatcacccttgaaaataaaaactattaaaagtgacagcaatgacgacactgttttccatttcacagctttccgaaaggtcagcgctttccaccccgtaattttgattgtccattcaatcgaataggcaactgccaactgtcattaaactgcagcaaatgaacatcaaacgagtgtcaaaacaaacagagatccttgggcgtggataatttaactgactaagccgagaagaaatggccagcaaatagtaataaacaggggaaacaggacgacaggacgacgaagcagcaacaatcagaacaactaattaaatgccacaacccccacggaagaacaaccagacaaagtcaaagtttctcgactcgttttcattacgagttaatttgaatgtaaatgaacagaggagtggagccgtttttttggggagtgggagtagctaaaatgtttggctaatgtttcaattaagaagacagtgaaaaatttaattttctttcatttggctcggcctgtgtctaaatggaaattgccacccaagttagtgctagaagttttccgtttgaaggcggacagtgaatttcatctggattgttgttgtcccgggtgatgttcacaaggaatttcaatgttccactcataatttcatataatttccattaattgtatgaaattaatgccgctggctttgaggccgagtcatctgcacagagaaaaatgtaggtttcaacaaaattgacaccacttaatttgaaaggtatatatgtatatactaatagttatgaatatttttatgacgtagtctttttactgcgtatttgttagatcttattaaattaattatacgtttgacataattaagttaactttccattgaaagttaagaaaattaattattagcttattgaatatatatatttttgaaacagtgaatcatttaaagcatcacaacaaaatgttgtgtagtaatgctttatatgaagtcgataatttttcctgtgtggatatccagctgcatcgtggttttggctctcgcttgttggccactccagtagccatttttatgattttctacgcactttggccatggctggcttggaaactgtctatgctaatttcccagttttgatgactagtcggctaccagcgagctactggcaacggctacctttcatttggctgtaaccaactgcataaccacgatcaccatcaatccaccgatcttgggtccagagcaccgccttttgctttgcatagatcactcaagggcatcgctatatggcttttgttctgctcgtgttcgggctgagtatcaaggagtatcgagtatccatcatcgtcatcatcattttcatcagcaacatacccgtctgggccacggccaattcccagttgaagccgcggtacaatatggctagttacgccccattttgactgggcaattgtcatggacacggcgtggaaatcagactgatgtgaatatattttttttgagtgggtagttggggaatatttcttcgggctactaaatgggttagcagaaatcaagtgaaagagatagtaaaaaattggaaaaagtgcattcgttttggctgcagcgttttcaggaagattaaaccaactatttgataatgcttacatgtcccctttcaaatggcattatttattatttcccattaaaataaggtatctgtattggttcttttcctttttatctaatccgcctgctattgccctttagcaggccgaaagtacagaagctcaacctcctttgcagtcatttcctttttgcacactcggcacaaattgcaatcaaagtcctccccgtccagtcaaccccttgctcctcttcagccaccgactttttagcacttcaaattggcaaacaaacaaactcacgttcaaatgaaatgtgagcataaacagaaaatttttcacacagccatggcatcgctttcccctagtcctgttttttttttgtactttttgaacccaactcgtgtgcaatggtaaacaaacttgaaaagcaaaccgaaaagcagaagcggaaatattgcgcatacgtcgtgttgcacgtgcaaaatgacgaagaggaagcagcaggagccgctgaataagagcaatgagcagagaaatgcgaatcgcacaggacgaaggaagaggaattggaaggaaaggacgtggcatcacttgacacgcaaatatgcataaacaaggcatgaatattcatactcacagcagacacttcgccccgtctcgctcgctcctccctagcatcttgaaaaggactcgcgtcctcgtcctggtgcccatatctcgtttagagatgaaatgcaatgcgcattgaaaaatttgcccgcaaaaagtgtttgcacaagccgaggtgagtgaaccaaaaagcagagcagactgcaagcacagtggtaatgcaaaacactttttaagtttggctaaccatgacataaactcctagcattcatttttgtcaatttttcaatgaaacgaaatattttccatacacgatcacacaattatacgtttggtcacactttaaatcatttatccaggcactggtaacactaataacaatatttttttgataaattaatgaatttatttgcttccatagaagtatcaatatcagatattgagtgtctactgtttgcccacataatatgcaattttcacagcatttgaatgaatgagcgaatgtttgcttgtgtttgcttagccattcacaagtagacacaaaatgcaaacgggtcattcacttggttttgctactccaccaacaccctttttcactgctttcgctgaagaattcctgcgagtaggactttacaaaaatttcaactgcttaggcaacaatcataaatccctgtcaatcacactcggctgtcatcatcatcaaaacagtcatcagcgctctagataggccgtgtagttgcgacttatccagcgacttttgtgacttgtgacttggctaagcggaactgattacatagccttctgttgcgacgtcatcgatttggctgcgtgacaaaaatgcctacttattttttgttttcgactgtttcgatgtcatttatatgatgctacgaatttgacagctgcgtggtggatcgattcgagggtgggagagttatgcaacactcgaacagttaatttctttggaagcttcctattgacaacaatcaatcattttctcgtatataaactgggggaaagttcgcaaaacctttctacagtattgtaaagcggtaagctaaggtagataaaagtttgttcaataccatagaagtagaatactggtgatatttttatttaaacggaaacttttttattatcgcgtacttttaatatgaatttttagtgtgccacataaattatagacgtattaaggaatgtttatcgaactatacgaaacttttcagagttttcagttttcataccccttctcaagacgccgaggggcgtctggtatgaataatttttatataaatgagaaatatctatatataatttaaaataacatgtgtgagtttttttttagtatatttcaataggtacaaaaacatttattgccagacaaatccaaatgcaagcgtctgtgcaaaaacataattaaatgtgttttcgtttaaagtagaaccgaaagactcacaaaaatttgcatacctaataaaatcggaaccgtcgaaaaaatatcagtaagaaatggcaaaaaactcggccaaatcaccggctaaaactaatcccccaaatctgcgacgattgccaaggcaaatcagagtcctgaaaccataaaaagcgaaagagccaaaaagcctggggcaacaatttaagatttacgccacttagaagacatttaagcgtgcaacaaatgcagcaacaacaacaacaacaacaaccgaaccgggtccacatgcaaaaggccaaagtcaaaagccgccaagaagtagtcgttgttgttgtcgcttatgttgtttttgcttttgttgttcccgtgcgtgctgagcttccttctgctgaagcttctttcccagcgattcttctacggtctgtggaccctgcaaaaaatcaaaaagggtctctgcctcagcggccgacagtttacaagtctttctcgtgtttcgacaacattaatttgttgtctcttccatgttgggaacttgaaaaggcaaggcctagccgcaaatgttgccagcaacaagttgccggccgacctcaggaaaccgcaaaaagagagaaaacagtagctctatggcaaacaataagaaaaattatttaatttgagtacttttcggggccggtttatttcatttttcaacagcaaagtgtgttggccatggatgtgccgaacaaaaaccgaaaaaaccgcagaattttacgagctcctcgtcgcccttaacaatgtctcattgtcaggtctaaatcatttttaacgatcaataaatgaacacagtagaaacaaaatatcgtgaaggtggcaccgtgagtcgatgacagtaaacgcgattaacttaagaataattaaaaaagggctttaataacatataatgtacactcttcataaagataagttgtttgaaattgatattcgctaacaattggatattaatttttccttaatttgttttatctaagtgtttcaaatacatacctattttggttataaggtaatatcttttgaagtttatatgacctaatggttagtgattaatggaagtgtttaaagcgaaatcacctgtcacgatcgaattatgtgtctcgagttctcatccctggcgattatctcgtatttctgtttatgtggaactcatccctcaagtgactttgtgtgcggtctctttgcgacttaacttggaagtcgggaaaggtgtaaagctaattgaaagtcccgctcagagcggcgaacttcaaaggttccccaacgacattgttgcggaagcaaagtcactgcagccagagaactattggataccaatccccaagagatttctcacccagacgcagacatacatatatcgcactattttattgccgactgttggtgggcgtgggtgggaaagtgggtggcagatagcggagccacgtgataagctgtggattgcacacatgtttcgatatttagccaaaggcaaacaaaacgacgagttgacaaatctagctacaacactgcaaacattactttatcagtctataacttttgtctgtatttaccaaacgcttcaaacagacagctgtacgctggctatccactgaaaatcgaaaattcctgcgattaaattgcaatttccacaacagatgttcgggctttagcgcatttctttttctaattgtaagcggatatttattctccatcatttccgctcatttgaattttttcgccccactcggacgggaaaaggaaacttatttgctaataaaaattcaaaagataaacacacaaatcaaagtcataagcccaaaatgaaaccgagactctgcaggacaagaaaaaccaaatcaaatgggagtaaaaatgcggaaaaatatgcgtagaaaatactcgagatttttggggtaatttgcctcggtggttgatgccggattattaaagcaacacgtgcggggaaataccgcgaaatcttgttaaacaaaattaaacgacttagttgactttgagctctgggagaaaaacatgcacacaaaaaaataaaaacccaatgggagatttgtatttgtacaactgattgcacttacaaatcgtaaaaaacgagcatcgagcagcgacagcaaacatccattaggcccactgtgcacagtgggtagcagacggcgacggttggggttggcagcctaatgctcaaaaggaaattataataagcgcagattttccccgtacggaaaaacggacaagaagatacataaataaaagacgccgccaagtaggcaatgcaaatgttgtttgcagcttgtgtaatttccctggttcgttttcccagaatttttacatatttcactggcctttatcgcactaataaaaaggattttcctcgaacgccggggaaattgtactgaaaagtcgtcgtctcgcatttctttgtatcattttactgcaggcaacggggggctctatcaagcggttggggttccgacttctgggggccgtccgccttatttatttactagtcctgtcatattgcaacaactgacttttttactttggctgttgtctggcttattttgtttgtttttccttttttccttcgcttttcctcaccgtcttccatgggtcgctgtgcattgtgcgacattgtgctaccttataaatggattatggcaattagatggtattcgagggttgtgggtttggtcattgggtcgctcgaaatatgcaatccatgttcttcggcggggcatgaaatccattagagtggcttaggactcgatttgctcaaagatgaaataatgatatgtggcaatggcaatggaaaagtgtataagatggagtagtgaatgggattgccatacgaaaagggggtaagctttggttttatagagaaaataatactcgattccagtattcaaacccctttaaaaatgtgtttaaaaaagttaaaagtttgcctactagcagtccaatgtttttttttcgatcactcaaatccattacaattcccttacaagttctgaaacttttttcttgccagtcatgcaccaccaaccgaatgaaaaaccaattaaatgcgaaacaatcatcattaggcagtgccacaaaatgataattcaaatgttttcagctgagtggccaaagcgaatcgaaacgagagaacataacaactataactaagtatgtacaccgtgaaattgaacaaataatatgccaagaaagtaggcgccgaataaaaaaaccgaagaggagattggaaaaagttcgaagccaactattattaatgatctgatatatcaatcggctggcagatcaaagaggttgaggcatggtatgccagttgtaaaatgtacagattaaaatttgaacagggaaaatacttcggattcgaaccgttgaaattccttggagcgcacaaaatgccaaacccaaaactaaaattggtaaccaagttgtgggtggaggagttttgttggtggatgttcgagagccagccatcaaagacatttaagcattttgcggttttttgtgtacccgggatgccttttgtcctgtcgcaggacatgtgcagcaaagtgtcgcatatgtggctcgacttttttacatcatatcctactagctgggattcatcctgccgctttgggtcgcttattgccaggcatttatgaaattttgtgcggaatttcggggcgggcgacttgaaaagcctgagaagcccagacaactattaccaaaaagcacaagaacgagacgagctgaggttaacaaactgccagctaaagaccgacctccgtgtgatgtgtgtgagtactgctcttactttttctagttttaatttatatgtaaattagccaactctgcggagatggtgaaaaaatcatctgccgaatgaaggcaactattagccacaaagctgtaagtaatgacaagctgagtgcaatttgatgacagttgccagtcagattgagcagctcatcctcaagccagtcgaatccgaatcgatcccaaattgatggtagaaaataaatcagccccatttagaccaaaacaaatcccactcggccatgacaaatcaggcataaaattgtacaatttacgaacaagttcatctctggtcagacatcataaattaaacaaactttaatcaaacagaagtggcacaaccactccgcagatcatccgatgttttccaattttctcacagctcacttttatgatccaaaaatcactcggggcgaaatgcgaagaagccaactctttgggtttatttaaacattaattaaatgtccgaacatgggagtgaagtagcacaaatatcaggcgtgaaagtctacatatataaaatttatgaaagcggccacaacattttaacgccagttggtaatcgacaacctcatcgtaatcgcaaacgcaattgcaatcatccactgacattcgtcataatttatgggtccttctggtctggctttggtctcctcaaatagcccaataacatatcaactaaattgataaaaaccacaaaaaagcgacagacgacaatcaactgaacagaacgggagcagattgtttagcttttggttaagggtcgacttatatgtgtccctgcaaatgcagtaattatctttacattccaaagatatgtagtatacatcactaaatgctattgaattccgaaattttcgaaaacaattagaaagtaaaataatgattcttggtaagattataatatttaattttattttatattattttgaaaacaatgagaatgtataaagatgattcttggtaagattatattgaatgctttcacatatttctctcatgagtgttttatacaaagtatctttcttgtaagccactgaaagccgcatatccccacagctactgggtagttacgataccaattgaaatgaagccgatggcaattgggcgacaggggaaatgaaaggccaacctgggagctgctgactggcagcaatcgaaagctatgcaataataataacagcacaaagtcaggaggtgagccaacagaaaacagctgccaacattcacacgtcatttaatttcgattagtcgcccgaaaggcagacaaataaagcgacaaatgcagtgtcgaatgcgaatggaaagccaaatgttctgtggtcactacattgtctttggtaattgtcgccttcgaccacgaagaatgtacaaaatgcctaattggcacttggatgggccagagtattgcgaacacatcgccttaatttttcaattctcccctgaaaatatcgatcttcgatcatttcttcggttttttgtctttgccaacttgcagctgaatatcttgatcattattcgtgctcgaatagcaatcacactttaggattcgtatatttgattgatgaacgtattttgttcgctgggcgttcgaaaggtgagagaagtctgttaatgaaccttgaattgcatccgcttctggttaatttttttttttttggaacaaactgattgacccatgagaaatggcccggggatggtctattagtgataagcttttaatttgatttcgatttaaatgattgtgagaatgggatttatttaatttagtttaaaagcgaacgtgaatttcttagccatatacaaatacaaatatttcaaattaattatatgtatattctctgactgtgtgcatacatttacagatgttgaattcccattaaaacttgcttaatccacccattcccaaaacattcatcaaagtgtccaaattaggctggatccaaaaatccattccggaaaagtctacgcaataggccccatgcgcacagcaaggaaaggctaaaaaaggaaatggttttccccaagcgcttaacaccagtccgttcatccgaactccccttaccgcccctagccatcccacacaaagtgtgaatgaaataagttaggccaactcggcagcaacaatttttcgctttgaaaatgattattaggtcagttgctgctgacaggccaaggaaaagtgggagtggcaagtgggcagcagctggacgaacgcagcccaaggcagtgagcaggacaaagacctcggaaacgggggcagcaaggggttaagcgggcagcaggcacctcgtacgaaaatagcagagattccttttgaagtttacgcacaagtatgccttcgaaatagccccatggaactcctgaaaaccaggatgcaggataataattaacgcaataatcatcgatgaatgggtggcatgaggaacgggaaaagcccagggaaaattattatgagaggggagagtgaacggggaagtgttaccaatctggctattttctagctataaacttcgggtacgtaaacatacattttttatgttgctttctgattttcatatttattacttgttgtctttagaatacaaagcatttgatagtcaacatattaatcggcagtttataggtattttaaataaatattttaaacacatttaaaaaaacaatcttttgtaatgcgttttattgtcgattcggctactgcttgtaaccaactgttgacaacactgaaaggatgctgaatggccggtcaatgcttaaaatgattaacgcgcttaacccattggtgctcaggcatgcgctcggcacctttaacccccccttgtccggcttgtgagtcccctgtcgcccctctttggccaacgctgcgtgtgttcattttgtaatttgcgtaggtgatgccatggaatttgattttcacacgtgttgcttgctactgccacacacctgcctcccacttttccccgcccaacaatccttgttgctcatgttaatgttaataataatggaaatgctgggtgtgtgcaattatcttccatttcattgattccacacacgcgccatataaaaatagaaaggcccgcgggtgaaaaacagaatcagaggcctatccgaggcccttaacccattacgaaaacgactgaagatggatatgaaaattggcaggtgagtgtacttagaagttatcgaacagattcagaagtttcctatcgattcgataggttatattacaaagttaaaacattttaaaggcaaatgttgaaggggcaaaacgaatcttaaattaccgcttgaccagcagcttacctgcagcggctaacctcaacctcgaattcaataatttcttatgaattgaagttgcactggcaagttcaaagctcacgaaacaggcaatggagtagagaaggatgaaatggtaataacaataatcataaatacagcgagacgatgacaaccctaaaacatcccagcgactagctcttgacaggaaaaactgcccagactaaagatggaatcacatggaatcacagataaattgtgcaagtctcgtaaccaaagaggtaaaagcttgcaacgagaaaagatggaaaaagaaaaaaacttggggaacgtgagtaggaggctgaaatgttgcgcgtgcgcagaaattgaaatgaaaattgctgtggcagcagcggcggagtcatgagaagaacctttttccagataagtcatgggaagatcttggcgtagatcccccatttaattgctcaattgtgttgacaactgcagccacacaaaatgtaaatatttatatagattacatgaaaaacgaaagatcatcagaagagcataacaaagtgcactggggaatttcagcgaaatgcgaaaatcgcattaaatggcacgcaattgttttctttcttttttgtacaaagtcttggccttgttttaatggccagataagcatcaactaccatatatatcgagtcgacagctctctcggccattttgtccaaacgaaatgtttgcgtgtgccgggcaatttatcaaaacatttgatttagttgtaagaaagcattttcaactcaatttcggttgggccttacgtaatgggaaaaatggcagctagcatggtcgctcctggaattggaaattcgacctgcctaaaggtccttacgccgccggcaatccaaaagagtcctgggcatccagtcaggcaaggtgagctgactaacgtaattgccactaaaatttatgtagctggtgcggtttttatgaaaacacgttttaacagcaaaagaacgaataaaaatatgttgagctgttaggaactccataaatgggtagtgaaataaatattctaagcacctgttataggtgcaaaaataataagaatataacataattattttcttatatcttttaatattattacaaaagtaatactataataaaaaatagatttattaagaaaatattgcatatatatgtatgtaaattataaatttacctttgaaatctgccttctgcctaatttgtataattaaaacacctatagctccctagccagcgaacttcggaatctcttaaggaaattatgattggagttcatcaattagttctcacatttcccataattccaccggtaatcaaaggcaattaaacaactcgactgaaacatcgaaacgaagctgttgtagcattttgtaattaaaacgtctgatacaaaaccagatgcaaatttaccaacaaaaacttgtagcattttgctataatttctgcggctgataattttatgcaagaaccaagcggcaagtatgacgaggggttaacctcgcagacggccgaaaggggcagcagtgggttaattgctccgacaccaacaatagcgactaagaaaacaatgtaagcaacacgaatttatggatttccgccatttttggactgttgatctagtatatatgttttaaatatgtttaagaaaatgcaacctgatataactttttaataactcagtttttgtactaaaagtttcaaactcttatttaaagtaaaaacagtaagattattgctgctattgaagcctatacgaatgtttattaaatggaagctagtttcagtttatatttatggaaatcattatggaaaatcaattattaaatgtatgtaggtacaattaatatttctcccaaagtgtcagatcgcaaggcattggcttaaaaactgaacttaatccaaataaggtattagctcacatgcatttcagccgctcctttcagaaggtttctgatcaaattgtaagaaaattcaaaaatttggaaaatgtctcctctggtttttccacatcttgctctttctctctttgcttgattataatttgttttatttgttttgaacacgttttggggattgcttcaatgggaagaaaagagcgaggaagcgaggagcatggtggagaaacaggcgcgaaaaggggagcaaatggaagcagcgacgtcgacgtcggcggcgcagcaataactgtgcatttgtatttgtttgtcatttcgctctctcattgcgagaatgcgagtgtgtgtgcgtttccctctctctttctcactctctctctctcgctccctcgctagctgactcgctcttttccatttcaattcccatttcaattcagattgcgatttcatttccatcgttgagactccgcccccaagagcgtgttccatttgccgaacgttccgctatgtactggcttcctttctttacgtttgtgtttgcacttgtgtttttgcttttctcgttgcctttgctctgctttttcttttggtttttttgctttattatttactcaacgactgtcttgtgtgtttggttgagtttgcgttggtgcatttgtttatgcgtctcgttttacaatttaaaggcatttcctttgtgcaaatttcagcactgcgcactctcgctctccctctctctccctagcaccctctgggtcgctttctctttcgctccctcggtatcctatccctgtcctattccctcttccatccctcaatcagaaaatattgttatattgaataaatattttacttacaaggtaaaaacaatattttggctttagttcctgcttaattttcgggccttgtggggccaagggttcgctgggtcctttgaccaggactaattttaaatttatgtttttcaaatttcgttgggcaatttcagtttgtcggttgtagttttacaaccatgatgatgtacgcgcagtgaggtggggctttctggggttaagctggccccgactcgagttatttatagaaaagtcctgtgtaacttctgcggtatgtaaatttctttataaacaattcatttcaaagaggctccgagaattcaggaaaagacaattgttttggcacttttattatgaccatgtaaattttagtttttcttatattataaataaattatatagagaagagggggcgctgtaaaacgttgcgtatacaatttcaataaaatttcaattaaatatcgaaatattcctagatatatgtataggtcgaattattactctcgtgttttattttctaattgaattaatataaatatgtaaatatagaaccatattttataaaatgaaaaatatttcatcctttgtgataaattgtaaaattaaatagaataattatttatttgattttattcaggtaatcattttttgaacccttatcaattcaattaattttcccactaataaccaaatatatcaaactctttccacttttcgccgacaagtaattttccccaattatcttttggagtttaaaattgaaagattaattgctagtgaaatgcaaaaataatatcgtatctcctgcgaaccgctttcattgtatactttcttcctttatatctctttattgaggggagtttatgtacagtccgtgtacatggcaaaatcgctgctcctggccttcgcttttctttatatccgccattttattgctttttctccgccccttttcccttgaacgcccctcgaacccccgggaaaagctcacaaaactctcgacatttcatttgcaattttcttttcttgcttgcattttatgactttttctttagcacttcgtgggcggtacaaaagggaagaatttccactggattttccccacgcccttactttttactccccccctacccactgcaaaattggcaacatctgcgtaatgcgattttcccttttggctggcaactgcaaaatttctgccttcttcgtttcttttgtagttgctggtttttcctctatcattcccgtttttctccacctttatattctcttttttccatctttttaattcctcttgccgtggcattgcattttcctgtgctaagacgtcctgcaggatttatgttgcggccaggatctttgcggcggccacacccctaattcgtggaacttgggagtcctccgagaaatggaaggatatttaccccttagtctttgtttgattttcttcgcttttccccaaagtatgctacgaaaattgtacaaagtttcaacatttaatgctggcgttttccatgcaggatatgtctgcggatgagcgtaatttagatatggagccaaaagagcccgaaatctcgaacatattttcctattttttattacccacttcgataatactttgtcgtgggtagggcgtctacgtatgagagggttttctgctaaagttgccccagcctatggtttatggacttcctgcccatcccctccaaggatctcacagctcctgatgctgccacatcattgttgcccgtgacaataattcaggcaggccaggacaaaagccaggagcacctggaaatttatggccgactcgtcctccttaacccattcccatcccagtcgtactacttgacccttaactactggaacacgttgagaaattatttggatttcttttcaaaagattgtaatttttattaaagcattttatttatagcgacttgtaacacttattcatatttttatttccaatgatttcacatgtatctgtagaaatgaaaagaagcattttgtctaaatgctctcattgtttttcccagtgcacaactaggctaacttacaggtttttgaaatctactttatattttttgggtgggacattttatcgcatttggttaggtcgtaaatacctgagtggatgtgaaatccttggtcgaaaaagttatgcaaagttcacaactttcttttctctatcagcgtcttctgcttttttatagtttcctgcatttcccaatgtcctggccactcccctttcgcccaccacactaactttattatcatatttgtttaatatattagaaattttttccactttgtttttttgcggttcagtttgcaacccctgatttggcttctttctttatttttttttgtgcttcgacttgtagcaactttgctcagcagtttttgacattttccatgatggattgcattttatgctaattgagtttaaacacagttacactttctctcacacactggcgtagaatatttttttcttggcattattttttccacttttgtcttatttgccctcagcgaaggggaagagttttttccaactatatctatatatatgcagatatgatcctgcgattgacagacagctagtggtagtgggttagcttaggattggtgggttggtacttaagtttgagtgattagctgatggaagctgcttagttggaacctaaattgattttgagctaattaaataagtaagaaagatgtaaacaaatagaagtaaaagctcaatgtaaatccctccttgtattactatatattaataaaaataaatttaaaataatatccattttgtttacgaaatcttaccttttcttttggtcaaatgttttagatggtttttcaattcccgaaggtattatctaactgtgtgccagacataattttacgtatgccactttaaataaccaaatattatatcagctacccagctgtatcaataaataaataacaaccccttcttccatttttcaaccccacaatcactcatcacgtgccaaccgcgtccaatgcgaatctccatatgcattcattaaacaaattagccaaacaggacacaaaaggcagtcgtcaagcgccgtgcccagaaatatacaatcgcaatcggagaaacctcaacaaaaatttagagaaacatatagaaataccccctacattggccaatgatgatgatgtatgatgatggattgtcaacataattacaacggcaaacaatggcgagttgcataaagtacatttgccattgtccgaatggagtatgcaaaaaggactcgcacaaaaagggactctcaacgtgcgacacatggtcatggaaatggttggaaaacgagggcgtgtgctaagggctgagctggctaatcttcggctgcaattgttagccaggatctggacagggcggaataccgaacccaaaaccgcatcataattacactatcacattccaaacacacaaactgagttgggggaacaacttcacggctaaaccagctcacatatcctgcatcctttttcgcgcagctctgtaaattagaatgtttttgctttttcgcacaattaaagtcaacacaggatgggcaaggacgtgtgtgcggagatggggtacaattaaaattctcacttgcacagctaaaaagtttcgagattctgctatcctgcgaatagagctgtaagttccattaattaatgtcagcaaggataacgactactggggattatttactatctctgactttcatgagccacttcacaaaaattcgctaaatcattccactaattgaagaagattcagttagcgactataatcatccttatgtcatattcagttgcaacaaaatataaatgtgttttaaaaatcaagcctcctatcaaatgttatacttgttagagagaataacaatttaaatgcgatggagctatttaaataataataaaaatttaaatttatttttccaaattcctttttcgcccaccatatttttatttctctcgttcaacttgtattatttcttcgcttcttgagacccaaaccatttaatggcatcaattaaaattttgtgtacgtgacaggaattttcagtcgggctaagcaaaaatacgaggagcagggaaaagaatatgctggaaaataaaactttacttttgatgtttgaggctaaagacgagaggccccaagaaccgaatgggagagataaaataatgaagaaagaggggcagtctagcacaaagtgtggaaattataaaatttcgaagcgtaaaattaaaaacccaaaaaggcaaacgcaacgaaaaagaaatcctaagctaagatattgaaacacaagtgtggaggaagtgggaacaaatgaccccgagaccctcgaaagaggtcgccttcttactgcctttttgggggcgtggcccagaagttgcacggacgacgaaaagggttaaagggtctcctggcccgcaaaaatgtgatggagatgatctttggccgtcaaagttgttacaaaccgagttctccaatcgattgcgccagttcgacattcttcgagtgtctgctaattgaagatttgatggataaattaattaatatatgatatacgtaaggtaaatcgattaattgtaaacctttctgttaaataagaaaaagtatcggttaggctgaaccaacttaagtgggcatatcgaattgccaaacttatattccatttgtaacatttcaattatagatgctatatggaatttgtggtacggtacagcgcttgtttggcttttaagaaacatatatttcatagatttttttttataaagtacccttagtgactctccaaagtttcagtacttcagtacattaccccaaacgattccagaccatataaatatatattcttcaccccctccaatcgaatcggcaagccgcaacgcatttatttgtgcaatggtgcgtgaaataaatgtcaaccgcaacttaaaccgcatatgctgatagcgcctagcacacgccccctgccccttaacgcctccgccccatttcgccaatatcacccatatcaccacctcccgaggggaacgaaccacccgagaccaagacacatggctataacctccctcccccagacgattcgcttgcctggctttatctttttattggctgccattgccgaaaataaaaaaaaaaaatagcacggaatcaatgtcgccttatgattcttttttgccattttttatgcttagcttgaaaggtaaattttcgactgacagttataatgtgagaaatatgctggggatgtactcgtatgtacatatatgcacgtgctcgataaagatttctgtcgattctgcaatagcaaaaattctttattgtttttaataggtatttagcagcgaaggtatatttgttggatttatgtattagaaaactgcatggcaggcaatttttttctaaggccacataataacattttaatattctatgcattaatcaatttagcaagaagtaaaaggtaatcagtatttaaattctgataaaagtgtgaatttaaactgaggaatagtttttctacctttaaaaataaatcttatctttattaaactccaccgaaatgtacattttttacaaaacagaccattttttttttacgtatatgtggaatagaactggctaataaatttcaaatgcaacaaagtgtcgaatcgatagacagacatggacagggcgagccaaacgggtgggggatacccaacagaagtgcaacgaagattgatctagcggaatgaatgggcgaccaagtggggcgggaaaatgggtggatgtcagtgggtggtcggcaagtggaaacaagcgattgcgcctggctgactggcggacattattcattgttctccctcggcacaaaactcccctctttcggtcaaaaacaaaaacttgaccagacgaccacgaagcgcaaataaatttactccccgccgaaaaaagtgcgggagggggcaggaaagctgaggggagcagacactcggttaaacgtttgtacaagcccatgaaatgtccttgcccgaaaaatccgaaaaagggggagaactcagttgaaacgtcgggcagctgaaaaaaaaatctctggactttacttcgtcagtgacggaggggggaattcacttcatggatttccgggggcggggggctttgcgcatttagtcagtcaataaaacttgttaacgccgtaattgccggcaatttatttatgtgggctttgtgtggtttgccactcggaaaaatagaatcgaactaaaggacctcagagtgaattatgaatgattccctggttaagcataagttagggctgaaaaattaaaaaattaattttgatatagctaatttctaaaattccggaaatatatagtaatagtatgtttatattttatatgttaatatttacatacatatgcttatattttcaagagttttccaaaccatttgtactattctcccaccgtaaacaaatacaagaaaagcaagaactttcaattgcgattgtcttccgatcgaatcttttctttttttctcggaaaacaattaaaagttcattaggaacgcacatgaaaattagtcgggagcacgcaacagctgaggttatcgggagttcgtgaggagccctcgagtgggtggtagaatcgcagagacttgaatgggtgttgttcggcccaccaagttgattaatttaaattgggtctctcggtggaagcggtgaagagacttcatttcagactgctcgcatgattacggcgaattaagttgtcgcaagtgttaaagtcagagttgtaggttgaaagacgcttatttatcgctcggtgccgccttacacaagtcggaaacgcgttccacttgtaaccacaatttttcaaagagctaatgagaagagaatctacgaagaaacgattttccgagatggactttggatggaaatgaaaattcaaattgcaggaagaaacaagacacttacaacaggtggaaaacaaaaacagcttgttaagttttaatggtatgtatgtatatttttagaaaatcaatttacttaactagattctagaacatatagtacatataatcttaaaagtaccatcgcatcagattaatcggctcaggactcataattttagcgcatgcatgaattttaatttttgtactatttcttctatcttttttcgagcgttttatattaattttaaaatccatctgctcctcccaaaaaaattcctttcaactctttgttgcccgaaagttcaaatggctacacaatgttttcacagtcaaacggctgacaatttgcataaacgtcgcgcacccagattttcacccttttcccaaaaggaaacccccattggggtggggtgggggaaaatctgaaaagcttttcgaacgtatgttacccttgctgttgttgctgttttcacacccagctacatgtgacaggaacaaactccccctctccatttaaaaaaatattttttgaagaccgtgggtgggaatatttcaacgcattttgtttcatgtgtcaaatttagaatgacagcaaatttaatcgatttatgcctttgttttccttcagtcgcagatttccgttgaagaatttggttattttagggacgtacaagtttaaaagcatttttagttaattaatttatgcagcttttgtaaagtggaaaaatggttgggaatacgaaaaagttgttgccgcaaaagtttttcgataaaaggcgaaagaatttaattgaattgaaatgtctgcttgacatgatattgtatgcactcgaaaacaattactagccccttttgactgaaacttttttaaatattctgcatttcgcaattaaaaattatggacgaaaaggtgcacacgaaaaaactattttcctatgtatgtatgtatgtaaaacagtagccacttttgagttatccaaacgaaatacaatttatatgtacatatatatgtttaacaatcaacgtaacgtgttgaattttcctttgcagcgattaaaaaattaaaactaaattgccaatttgcatgttggcgcgttgttagtgatccgcctgccttgccataacactatagcacataagtatatatattatacatatattttatatcaaattaggcgcaactatgtccgagaagaaaagaaggcaacccggggagggaagttctcgtacattttaataaacattcaaataagctgcgtagtttctgccgctggatgggtgagaaattaattaaggccagttgggaatataaggcggctctcacagttttcagctggttccgttcgaccgaggtgttgagagtcttcaattagtctttggaaactaggcagaatgaagagtgagcaactcctcgggccatgctgttctacaaaattgcagccgaacataaagataaactatggaaaaagatatagagacgttaccctgaagggtgatgcctaaaaaagtcggtggatcctgtcacatctaaatgagaaatgagacatgcaatgccttatatatacagtttactatatatattacattttgattgagaatcgcttcagcaatataattctttcccagggaaaaaactgttttaagtctcgaccccgtaaattgctttatcctcaagtttttcacccaatcgaaagccaagccttgagatcttatccgaaaccctgaacgaaaatatcaaatccaatcacattgtcttttccaaaccaattccagatgatttataagccttcgacttggacctccatgcaaatccccatcgtcgccccccccacaaaattttcccatcccgaagcattgcaaatgaagttgcaaatcaagttgcaagggcacgttttcggggaaatgtgtgtgttttttcggcagagaggcaggcatgcaaccaatttctgcctatgacagccgcacaaaagttcaactgatgatacattgtgccggcaactgcagtctgcccacagaatggattgcagttgcagcaacgagtcttcattgtttcagttttgagttcgttttgcggtcgaaaagtgttgcaaactgtgactggacgagggggcagctggtttatgaaatgaaagcaaagataagaccgaaatgggggaaaaggtgggtggaaaaacctttcgggtggcggcaaattgcattttgcaatgggaaacaccagccacggatgtcgcagttacacagcgagcaaaacaagagccttataaaataaatttttaaaaaaagataacgtttctgaattcaataagttgaattaaactatatttaagatttaatcttttgttaatattacttataattaaagtcaaacatcgttacatgggtagttccttgtatatatacccgtgaaattcgttacaccacgatactgatacggtaagcattgtgtgattttttacggtgtatgcacaccctaaagatatggggcggggggccgaggtgcccggggcctgggggagtggcaagttgacaatgtgcgaacaaataattccatcagcaggaacaaaagcgtcgagtgtttgtttgggtggcgacgatggcatcggcttcgcaatcgagcgacgttgtcctgggcgaaaaggaccaatgcacacacgggcatgggagtgtgcatgtgcaatatgttacacttgccgactggatgctgccacatccccattctttggcaattcccctgctgtaatctcgcccaagtgcagtcagcaatcttgcaacgccctcttcaaactcagttgctcgattatcattgttgaaatttatgaattgcattgctgcaggagcatgggcgtagtacgagaggggaggggtaaacaaaagctgggtggggttctgtttgtccattgcacacagacaactcaatttgggctctgtagattacgcagctaaccccatttttggggtatgtaaagtaaggaatgtgtattcaaactagatgatgttcaacgcctgttggcacaatgtgttccttataaaacagaatgtttcgaataacttgaaattaataaaaattcttacaaatacattgttagcattaaaagtataaactatcactatttagttggaaattttataataaatcccaactgaccattattatatacatttttctattaccctatacaaaacgtatcgaaatatattaatttttaggctttgattatcctttaaaagagaattacctagttctattgccacaggacatttagtgctagtgttttctcaagttccctttgtctacttcgaatcgcatctccttgtacgcttcctggcgcataattagtcgtatgtattatcggaacttcattataaacgcatccattcatacgaatgctcatccagacgattctcccaaaaataaatcacactccctaagcacgcaatgtcgacgcccacgcggcgtatgtgtaatgctgtgggtcgctatgggtctggataatttgcggatggttagaggctactttcagcacgtctgagccccatttaattgtccgctgtaatttatacacgcattaattgcacattttctaaccgccataaatctgcagctcagttgaaacatttttctttttattaatttgccaaagggggttgggccgtctacaaaaggttaaagtaaatgtgtgggaagttttcttttacctctaatcagcagagaattctattaggaattcttggaaaatgagatatatatattcatagtgcacggggttgcaaaacttgctaaataagtgaaaactgttaatgaggtttgtcaaacgataattaaattgatttcattgttttggaagttatttaatgtatacatgatgccttttatttttttgtatttcaattatattttgggaaattccgatttctgataactcatccttcgataaataataacttataattcggagggttactaaaaaaaaacacatatcccggtcgaattccaatccaatttcgcggttgtgcccatttgagttcatgatgatgatggtgatgccgcccattggtcagttcgttgcaatttcgccgaccaattccgtggccccgggatcgtccccttttttcctggcagccacaccgaaaactggcagaaaaacccccactatatcatcgccccaatcccattcccgttcccaactctccggccatttgtcgaaagcaatattttctgcatgcaaaccaaaaaatttgcatataaatgcgaaaacgcattcaaactaacaacgaccgaaaggaggagcgaaatgcaggacgcggatattgctgtggactgagaactgggactgcaaatggagctgtagcttcagtttcagtttcgtggggtattcaggggcttttgtggggcggcttggggaggcaacctggccatgcggaggcttcatttgcagtgaaataaataaagatggaaaaaaggaagtttccagtgcgaaacgcgccatcgaaaatgtacgaaaaagtaattaacttgtgggcctgggccagctaaaatggcttttgggtggtgttggtgcggggataccgacaaatgcaaatttggccaaatgcacattgcactttcagttgatggcggccattgtcgacgtcattatgactggccaatagaaaacagtggaaaaaacatgtataatataagtagtagagtaacattttatctttaaagttaagttaagttaagttaagtcttgactacaatacaacaacttgctaataatcaggattacagtataagtattttcataaaatttgtgaaagagtgagaatctattttattatttccgttttcttttaaaatataaaacatttctgtattccaaagatgttatgttctgaaaaaaactgttaaaaattccagtagtgttaactaatctgccataatttaaaaccactgtttcgcgacggccattgccaacacagacacacttatgctcggcacactcgcacacccagctcaattgcatgcagaaccagccacgcctccctctctgcccactcggacggccttccctccccctttccacggaaaactatccaccccgcaccttcccaaacaccctaccctgcaccacagacaccgcatggccgacaaaataatatcatttgacgatcaaagtaattattttgctttggtctacagcataattgcgggttctactccgactgcggggttggccaagggttaaggctggggggagcgaggtgatggaggaggaggcactgggaggcggaagaggaggagcggtcttggtggcttgggcattggacatcgcatggccgtcgctttggttggctgattgcccgcccaaatgtacagtggtgccctcgatgatggtgatcattctaattcatttattcattaggggtagaaaaataaataatgatcatgatgaattaagtcaatattaaaataataattttcaagactctaagttaagttatcatttcataataatatttaactaacacaaaaactctttatagtgggcagacaatcgattttaggtctgcaaaaacagttgttataccaaataatgtaataaagaagtaggcgcaggctatatttttggtaaatccaaaatattattaattcaatacttttagtttttacttggttttagttttcctaccactgtgccctgggacatagtcgtacttcaaccggttggtacttgctactggtggcccctcgcccactgatatttgcctttttgcacatggttgacattttccccaacgccattttggccatgttggcacagcgctggcaatgttttatggccgagaaaaagggaaaatttttgggaagcaggagggagctaagtgggcctgcacttttccaaataaaatgtcgcgcactcgctcttttgcgggccaagccgatgcagaaaatatgcaaatgcatgcaacaatttccccggccagacgccattttgtggcatcaacttttgtgcgccgaccgaacacgagaaacccaaataaatttatgtcattgctcgaaacagaaaaggaggaaaacagcaacaaaccagaagcgaaattgctaaaattttgaaattgcatgccaagcggaactcacgaaaattgagctgaatttttccttattattttcgctttatatatacaacattttgaaaggcatatatattagccagtgctgcacatggcgaaatttgtaaatagcaaacattcaataaatttcaattcaataaaattcaaatccaaaggtaagcatgtggaacaacaattctagtagatatatgtgtttgtgatatcttaaaatcattttcaatgagaagtacaaataatgttagggtttttctcaatgtggtaacctcgcctgtttcctaattacagttaaaagctctccctccacgtggccattaaaaagttagttgaaaagttttcctttttggccaattgttggcaaagtgctgaattttcggttcttttcaaagcgcaggaaaaatgctcaactatagaaatatatgtagtagatatctgcgcatctctctctataagccacaaaaactaaatcgaaacttccaactgtcggctgagcaactgaaaaaagtaatcaaaatgcaaaatgcggagtggcggatgcaggagcaggaaatatggccccgggccataccgccaaactgcattccaaatcaacaacagaagctaacacaacatgcatcaagcccatcaacatccccatcagcaaaggcaacaacaaccgactccgactttaactccggaccaggccaacagccaaacggccaacaaagtagcagccgaaaatggacgaaggtggcaacgaactaacctgatctatgcccaactcttggccaactattctgcacggataaaaaagaatatccaaataggagcacttttggattttctctttaccataaaccaatcctaagcattaagtcaaatattttcaaaattctattataattagcgcatttctatacctatgactcgcttataatgtgtgtgtttaaaatatggtatataaataaatatttttaatactcaaatattcgtttaaacaaacttaaagctttcaagttcaataaggactattaaatttcgaaattaaaaaaaaaataattaaattcttaaccaaataaaagtctagtagtaacgatattcaatataagctttatctctttttatagtcaagaattatttgttaattgttgctaaaaaactgaaatacttattcaagcagaattttattattttttctgtgtatttcaaacagataggcaggcaaactattatagagagaagagccgacacttattactcacccaaccactcttgcagttcgtaatgaacttggggcatttgattgactcgaagactcaaagacttccagactcgccgcagaaagccgcacaggcaactccgcgattcgcgacttcgccatatttgctatgaaaaatcgcagtctgacgttggtgtggaggcaatgaatgaatgatgaatgccagttatagacgggacccagccctcatatcggatcgggggaaactcttggaaacatggcagcatggaagccggcagtcgcagttgcaggccgcagagcaatatctaaatgtgaattttatgcattttatacaagacgaaaatggagacgcgacacagtgggacaaaatcaattcgaaaacaattcagtctcaataaaagttgtgcataatagacgtttaaagattaatgcgatagacaataataattcttttacaaagtctcccttattttacaatatatgtgatttaattcaattttcaatgcactttaaaatgtaacacaatcaaattttcagcatatttaaattattgatgtgtcaaagatttttcttatttaattctgtgcatcttagtcttttgcttccacttaaagtaatctattttggtaaaaaaactgtcccactgtgcaaaaactgaggtgaggatgtggcccggcttgcgcaacatgtaatccttgatgcggcatggcggcatatatacccaatatatatatgtatatatatatatatatatggcacatcaatagctatatataaatgtgaatatatataatataaaaagtgctttaggcgcggcacagctttttcagcagcagaagcagcggcagatggcagctgaaagatgcaaagatacaaagatacatgagggcatcggaggatgatgacgcagtcctcgagcaggggcgttgtgggaaagggagcttaagggaagcggggcagacaaaccgaggtgcagacattgtgcataatttcgcgtacgttttgtgaatttgtaattttgaaattattattgccaaggcggcggaagcagaggacgaggtgagacaaggagctccgtgtgagccatgctctcgtcttcgtggccttctcctcatctcattgcggttctggtcgggaacaaattgtgtctgattggaagtctctgccaagttcgcgatggctttcagctcttttcgatttgattcgctgcagaaaaaaagacattaccagcaggggaaaacaggaatctcgaaggcgtttctcgcttttatggaattggaaatatcagcgcatgtatacattttctaagaggtgagagctccgccagccacactcacaccttttttggggtgccctttcaccgcattttcctcgggtaaactcattttccgcaaaaaagtaagcgatccattaggcgagcttttgaccaatttttaagcaacgcgcttgaggttatttacacatgagtccacttaaaaaaatattacaaatttaaagttcgttttgagaaaaggatggatatcaaaatttaaaaaaaaccccaacatttaccaattttttatgagaaattatggtttatttatgtaaaaaataacataaattagttctttagaaatattttagactgcacatatctgcggacaccataaatatatgaaaaaattaccaccgcaactcatcaccagcgcaagtgaactgaactgaactctcaactgtttactcatgtaaataattaagcaaaataatggcgcaacaacagcaacaacgaggaaggaccttcgtcactgcggcagtgatttttcacacacatacacaaccgggtgtccagctgcgtgcgagtgtgtgtgtgtgtgtgccaacaaaaagacaaagtgacgctcaggttcattgttgtgggtccttttttttggtccttagcacgcgttgccctcaactctttggcccgcacatatataaatatgtatatatgtatatacaattacatatatcccccgattcatccttgcgtgtctggcgtgtgaaaaaatggtcagctttatttttcatattgttaagcagacaactcacacacaaaagggacctcacgcagcctcatacattttttaacaaatttattgggcgtaaaaaatggtatttaattgtgtgtttggaattgttttccgcgctagaggagattaagggaaactgcggaaaagaatacattgatatggctttcagcgaatttaggtggaaaatgtattaacaacaacttactgtcaggcaatgctaaaagttgtaacaatgtaagacaaataaatattttcaatagaacgtagaggcgtctaattgatgctgaaacctggactggaaaatacgtcctcttaagtccttaggcccaaagcttttctcttagccgaggaatttagcttagcgttttccagcacaacttaagtgtgaaatcatccaccgaaagccacccaaaaaccgaatgcaaaccacttttgacttccttcccatcggcgaccgcagaaaagtgcggccaagtcgtcctgactcctatttaccttggcgcaaataccatttgccaggctaagaagtaaaattgtaaatgaattattggatccattagcaaaatccatttacacaaatttaatgccaaagcagctaacagctaccccattcctcagctgtgagaagaaaactttacacacttcgttgaactttttggcagacgagaaaggctaaagtagaaaggccaaaaaagggctgagttgagctgaggtggaaataagaacttagcaattaaaaaataagcaaagcaaaagaaaacatttttagaattacgcataatgcgcaaaggggttgtgattgcaaccagaggttttcctcagactggcccaaaacatccatttccacagtgaaatcgaacgatttgcataggaaaatagacaaatgtggatggtctacgaatttggcctccagctagaagctaaaagaaccccagtcttgttcgagggatgggtcttgtcacaatattattttaactttggccttaagtaaaagttggtggtattattcgagtttctcgaaaagcattctaaaagtcgactgaactgtacagacgatgcagacatggctgttttatatgattagttattggtttatattattaatgtattatttgtgatcaacaggcaacaaaaaattggcaagcgcagtttatgtaacaataacatggccgcaaatttatttacatttttttacgcactcgctattcaatttatttacaaaccacttaatttgtttttatttaatcagattctgttttaattacattctatatgccgcgttaagtccgaaattaaaaatgcatacgcttcgattccggattttcatttttttttcccccaatttcccatcaatatttattggagtgtccacgtggctcagtgttttttttaatgcaattacgggcaatgcaaacaattggtttttatggacttataaaccatttttatgaccaacttgtctgtctttgctttcaccctctccgtcgagatttatgttctgctttatatttttatatatattaatattttttcgcagctatgtttgaatattgtcggtagtggtgcattaagtggcattaattattatttatgacattgtttttgtcatttgattttgatgatatttttcaatgaattattgccgcgacgactttcttttgttcggttccgtatgaaataaaaattaattagacttcgcccaagcttgttaaaaatatggagatacgtagttaatcagtctttaaacttatgtacttcaagatatcgtaagtacttcacttcatgggcttttatttccccgaactgtaacctctgcaccagtgcaaacaaaaaaaacgcattttgattgaccacaaagcgagatattgatttacggcaacagttatcagaaagtgtaggacagaattggccagaaatgaggcttaatgctgagccagggccaactgtcgccagtcgccactggcaccgccactaaggtttcccttcagcttctgctgacacttgagcagcagaggcccggtaaatcacatgagccgggccaagtggccaagtggccgaccgaaagccaggccaataagcaagtcagttagctgcaactggtaactcgagcccacaaaaagggaaacgtcaggctggtaagggggaagaagttggccaaatcgacgccagaaccaattgagcagaaaaccagaaggcgccatcgaggagaggaaatcggggaatcgacgtgcgatggtaacaatccttttgggcccatggtattttgacacttgccactcaacgacaacagttatttgggcttataatgaatatgagcaacacaccgaaggtcatgctactcaaaacgaagtccttcaaggtcccgtttcgtttttttttttttgtatttggcattctggattctgtattggtgacatgtggcgccatgtagtcatccgcaaaaaccaaagcaatatccggacccgacaacaagcaggaaactctagctgacagatagatggatacattccaagtttactttgagatccgaagtctctaatgaagacagcaacaaaatgtccttacctaatgaatggcagtgaggggcatttctggacagactgactacttggaataaacctccaacctccgccatggacatagatagcccaaagaagtgctctttgactcattaaaaattaaaaattctaggcatgctgtatcttttttcttttggttggttgactgtatgtaggtgggtacttaacatgctgttagtagattacatttaaaagtgcattgtatatttttgagagatttatcaaacaaataatgttagaaaaataatgcaaagactttagacttgtattaacattatttaactttgtttcatatcacccagaagggtgtgccacagtcgctgttatcattaactttattcatccgctgttttttttttcgctttatccatttcttttgcgctagaatcaacaacaatttttaatttcatttttcaaacgtcgctttgatacctgcacgccgcattaacacccccagatcccccagaccaaaaaccaaaaaatttgaaatccaaggctcgacccagaatttcctgctgatggactgactgaacgaatgactgagtgattgaatgactgactactgcccagcccatgactgataatttgatatgccccggtctgttaatgcggtgggttcataagggcgaaaatggcgtgggggcgctttaattttatttgcacaaaaatgcgcgtcaatattaccgaaaaaaatacatttagacaaggcgacgttgccgcgtgttgttttcatttcggtttttttctctgcggccaaagcaaataaaattcattatgaatttctaattatattgcaaaggcaaccctcaaaaaaaagccaaaagttgcctcaaaaaagtttacattttttccgggttccccctcctttttggaaaatgtcaagccgcacatttgacaatgatgaatttcctgttggccagcaaccctcagaagggcggccaagaaaaaaaatgctttagataaactgattaggcacatcaattgggcagagcactcgtctcttctagcggcaaaggaaaaccgtcgcctaatggcaattgttttgtgaaaattgaattttcctctgttcttgcgggcattgcattgtctgcccggttatgaaaacttcggaaaagcgtcggctgtctaattagaaatatgaaataaggcaaatgttttgcggtgttctgcacctgctgccacagataatgaagctgaaggtgagcctggggttggcgaaggtatttgtttaaattattattggacttaattattgccaagcagggaagccaagaatgcgcaataatggaaaacaatttcaagttttcgcggcaaaaaggtaaataaaaatgtgagaaaggcttaaggctcttggaaaagtttcaattattgcggtgctatacaaatggttttgatcatttacaagagactttaaatgacctaaatggtattgtattgtattttatattagagttttgttagaaggttactcttgaatagcaacagaaaaagttattaaataaggcctggcatatactgttttaaaacagttttaattccgatcccagtgttctggcgtattcccttatttagtccgaaaactattaaagttttattgaacactaaagcttatgtcaacatcaaagcccataagtgtaatacaatctgactatatagcacattaattcacacattaagctatttggcattgatttctatttgcccagcaatgattgactgattgatgatatcgaaactagccgcattaaacacccaaaatgacccaaaaagaccaaagcaaatagttggtagatggaaatggggatttgtggctaatagactgtggacatgggctaaggttagaaatgctttggcttgttatatctgggccacaatgatatgggatagatatgtgtaccatacatatatgtacatatgggtggggtgtgaggcaaacaatgagatgatgatgagccaggcctccgatataaatcaaacaacaatgagagacacagatacagatatggctgcggataaaacgcacacacaatcgaggacattcgaggataatgccgcctctcatcacgaacacgcctctcggacctcgtcccccgatttttccgggtttttattgtcaacgctaagcagcgtgtgaggattatttcgcattctttggcaaggacccgccatgtcctttgtctaattggttgtgtcacatacgagagtagattcctgagtacatcggatcagagatccatccccatcgcattgttgtgactgtcgtcattagctgtcccatttcgacttttgcccaaggaccatctcttcgctgctttgtttggggtatttaatgcttcaattgatttctgatttaagtgcctccccgtgggcccaaaacagctgccgaagattcggctgcccagcaggttgtcctccactcgagagtcggctcttttggagcggttcggagttagctaattgaaagtctttcaccttcatcaggagccaaatgacgacagcgatgacgatgcgtaaatgaggtagatcatgaaaaatcttatggcaatgtatggaagataaaaagctggtttttatgtttcatttatagatcgactaaaactgcgttttaaaaataataaaatatatacattattatctacatactctgtaagttcattagtatccttttatatgaatatacagttatctgtaaaactttcatcattaatttctgttcaataattgttattaataacatataactccggttttttcagtaccctttgaaataaatttaattttgcaagtaaaacaaaaatccaaaacactcactaaaaacgtgaaatacgtcgtcgccataaaaaagacccctaaaagttgagtcacggcaattcgtgaaactgtattagctgacagggcatcacaaacaaacgcaataaagtcggaaaacattgacaggaactacgtaatgcctgaaaaccagataatggcatcatcggcagaacagtgagataagcaaaaatacagcagctaagctataaagcttttgaacgagatttcagttgctaattatcagccataaagtcaggacgtggtctctaccaaaagatgagattccagttgttttatatactgggcttgctcagtgtgacaagtttgacccatgctgccagcaatctgatttgttattatgactccaactcgtatttgcgccaaggtttggccaaaatgcataccaacgaattggatttggccctgcagttctgcacccatttggtttacggatatgcgggcctgaagtccggtaccctcgagctattcagtctgaatgtggacctggacatgttctactacaaggacatcaccgccctgcgacagaagtttcctcaactgaagattctcctcagcgtgggtggagatcgcgatgtggatgaggcccaccccaataaatatgtagagcttctggaggcgaatcgcacggctcagcagaattttatagacagcagcatgattttgcttaagcgaaatggattcgatggccttgatctcgcgttccagttaccccgtaataagcccagaaaagtccatggatcccttggatcttactggaagtcgttcaagaagcttttcactggtgacttcgttgtggacccgcaggcggaggagcacaagtcacaattcaccgatctcgttggaaatataaagaatgcctttcgatctgctaatctgatgctgtctctgacagtcctgcccaatgtgaactccacttgtaagtatatatcctatttttacatatagtaggaactattttattaaccacctaatcaatcatttcgttagggtacttcgatgtccccaaactgcatccccagttcgactatataaacctggcggccttcgactttctcaccccactacgaaatcccgaggaggcggacttcacagctccgattttcttccaggacgaacagaatcgcttgccccatttgaatgtggagttccagattaactattggctgcagaatcattgtcctggccaaaaattgaacctgggaatagccagttatggcagagcatggaaattatcgaagggatctggactcagtggtgctcccattgttcatgagacatgtggagttgcacccggcggaatacaaatccagagtgctgagggcttactaagttggccagagatttgctcgaagttgtcgcagaacgcatccgctcaatatagaggagaattggcgccgctccgcaaggtcacggatctcacccagaaatacggaaattacgctctccggccagcagatgataatggagattttggcgtatggctgagcttcgatgatccggattttgctggaataaaggcagtatatgccaagggcaaaggactcggcggaattgcccttttcgatttaagttacgatgacttccgtggactttgcactggccaaaagtaccccatactgcggtcaattaagtactttatgggataaatgatttgtttgttaagcctaacaaagccatatattttaagttttctaataaatgtttcatttgaattacaaatattgaagcgcatgtttgcggttgaacacattatttaataatcggtctcagtgagaaaaaacctttttggcaaaaatacaaatcattggtttgtaatttactaaaaacccacaataatatattcaaacacatacgagttgcaaaacaaaactgaattctatagtgcgtgtgataaactaaatcatgtggtatagacgggtatttccaccgcttttagttctatatatgtacacttacgaaaccaatcagaaacactgttttcgaattctaatcagcaagcgcgtttcaatgttttcagattatttgcttgtttttttttttttaattttagaggtcacaacgttttgaccctgcgtctgcctcgtcgcaatcgtcgtcattaatttctgtgtacacaattaagtcattgcgagaataagtaaggcaatgagctcggcttcagatcggctttcagacccctcttaaagctccgctcaagctttttgtcatcggcttggggctggggttttggtttcggtttcgttttccatttcgatttcagtctcagttcgatttcatttgatctgctctgcggttgtgcctatagagatatatccctggcaccatgaaggcgtggatctggtttacgtttgtcgcgtgcctctttgcggcaagtacagaagctgcctccaacttagtctgctactatgactcttcgagttacaccagggaaggtgagtgaggtggtcggaatactccagaaagtgaatatgacagacaaataatatatacatagctttagaaaacttagatcacagatcgatgaggttttaacttgttgtaaaatattctatctagcaatcaaacacagaaaaagttacaacgtaaaaacaatttagttgttcaaactggttccatttagcactagagtattataagtattactcactaaaatgttgttgatctgttttaaattcttttaatgaatgaaaactgaccaacttaggttttatgaatatacacacttgattgtcatccaaaatgccttttgaaaagctttgaaaaacagtaattctggtaaaaccttattaaccaactaagccacgtttgaactgaacgacacatttagtaaatgaactaaaatatgaggaatgggagtaaaattgaaagtattaatcatttattcaaagttatccaaaaagcctaccaaaataccgcctgtcttttgagtagcgtgtgccaaatttacagacgaatgaaaacaaaagcatcctaatcgagttacataaccatttctgattcaaaacaaaactcggacttaatttaattcaacttgcagtgcttatcgcctggcgagcgaaacagagagataaagagagccaaagctagttttatagaggtcagtggcttatctggccagtttatttctttttcaaaaataaaacacagagactggctctcccgcagagtttcgctcgcaaagcgataaaaagcagaagttctgatcggattaacaagctaatttgagcgggtgtaacttaccaaacaaaaataatggaatgaattctcaaaatatggcaattagttgattattttggtatagggcgagttaagtctatattattgagccgatcccacgcattcgaaatgaaaaaccagagcgttcaacacacagcgagtccagcacgacaactgccccgccagcggacgctgacttggcaccagcgatccgagcaagtggcaagcagagcaccaagtgactcagcagcgctgcacagtgtccttaggataggggaaaaatgagataaatatcgtccaatagatgcattcgataggtaaataaataaaattaataattaattaaataaatttaaatttgtaaaaatttttaaaacaggtagaagttaaaatgactgaagttgatttgttagcagctcaaatgtatgttcagaaatatgtttaggtacaaaccgaaaagttcatttataaattctgctttcaaataacgtttaattaaatattcttatataaatgcaaatgattatattttacattaagctcttaacacaactcaacccactgtgctctgcagccgagccaaacaataataaaccgctcgctgggctcacactgttggcgttcaattaagccactgaagtcgacgagacaatggatcagcatccgagaggaggtggctctggtcagggggagatacaccgatctccgatctccgctctccggtagttttcaccgagagcgagagtgttgggtgtcggatcactgtgcgcagatagtgtcccacagcaatgaccacttcgagtctctgggattatttgttattcgagtgcagctcgttgtacttttcgtgcatactaaatatgccatcttttgaatttaaactgtgttttttccaggtctgggcaagctgctcaatcccgatctggagatcgccttgcaattctgcagccacttggtctacggctatgctgggctgagaggtgaaaacctacaggcgtacagtatgaacgagaacctggacatatacaagcatcagttctccgaggttacctccctcaagaggaagtatccccacctgaaagttttgttgagtgtgggcggcgatcatgacatcgaccctgatcatcccaacaagtatatcgatctgctggagggcg

SEQ ID NO: 12476 - DNA, 1858 bp, DROSOPHILA
ctgtgtgttgaacgctctggtttttcatttcgaatgcgtgggatcggctcaataatatagacttaactcgccctataccaaaataatcaactaattgccatattttgagaattcattccattatttttgtttgcgatcagtctgctcggagtcctagcctcaggatgtggtggctacttcttttgctgtccctaattgcgccgtcgtggcaggagaatgccacagtgatcaatccaagttatgtgaccaaagctggttgtgaggcattggtcaaggaaccaaatctctgcgagtgccaggagcaggagatcaagtgcgagaaccttcaattgcacagtgataatttgcagttatacggcattagctgtagtatattcgatgccaggggattcggctatataccaccgcttaaggtgggcaatatcggttccctgatcgttcaaaactgtgccataccaaatgcagaaagcatcaaatacttgctcagtaagctgggtgttagcaactacaccgaactggagatcttcaactatttcgatcccaagaaaacggatcgaggcgaggtcctgcagcaacactacacggatcacgagagtctgaagaaagtatccatcattggattcaagtcaacactgcctgaaaattttcttgaaaacctgccggcactacaacaactctccttaaagggaagcagtgatttgcccggtaacattttgcatcctttgaaaaatctaacccatttggaaattgtggtcaagaatttgggcaaggtgtcgggtgcaatatttgcaaagcaatcgaagctaaaacatctgatgatcgactgcgatgccaagaacagtagtgtcgaaatgtccgcttttggaccccaagaactctggcacatgaccgaacttcagtcgatcgagctcttcaattgcggtgataatgtgccaaccgagttgttctggatgtcggagcaattggcatacattggaataaggagcaacatcagctatttgagcaaggacttccttaaggtgcaaaagaaactgctcaccttaagattggaaagaaacaatattgccaggctgcccgatcagcttttcaggaacactcccttgattttagagattcacttggcgttcaataatttggatcgcattcagagcggcctttttgacaagttaaagaacctacaggtgctgaacttggagcacaatccgataaccaccattgccctgaatgcctttactcccatcccaactgcccatatctacgtgggcaaactctttaaggcggcgaaaaatgccgactgggctcgatccacgaatgcaacaatctgcgaggaggagtatatctacggggtgtgcatctactgcaagcgagatgagtatctggaccactttgccgactcggagaactgcaataagccaaatccgaaggccaaggatgtgctagccaagaaggcgtacgaaaatcagctgaaggcgatgccaacgcactcctggaaaaaggccaaggaatatcccgttgaggaagagcagccctaagctccaaacggttcgttgggattttacgcatcagtactaactagtatatggatatctgagtagcttatttctgagactataatgagattaaaataggctgaagctatttgtttcccgaataacttaaaattaatactcccatatatgttcacctgctaagtatcttttgaaatataacacgatttgtatctttagtgtaaaagttttgaaatagttgctatcattaaagactataattttatgtttgctgattgtaagactataaaatcgaaaagttggaaatattactgtatcaataaacttatgaaataaagatattgaagaat

SEQ ID NO: 12477 - protein, 455 aa, DROSOPHILA
MWWLLLLLSLIAPSWQENATVINPSYVTKAGCEALVKEPNLCECQEQEIKCENLQLHSDNLQLYGISCSIFDARGFGYIPPLKVGNIGSLIVQNCAIPNAESIKYLLSKLGVSNYTELEIFNYFDPKKTDRGEVLQQHYTDHESLKKVSIIGFKSTLPENFLENLPALQQLSLKGSSDLPGNILHPLKNLTHLEIVVKNLGKVSGAIFAKQSKLKHLMIDCDAKNSSVEMSAFGPQELWHMTELQSIELFNCGDNVPTELFWMSEQLAYIGIRSNISYLSKDFLKVQKKLLTLRLERNNIARLPDQLFRNTPLILEIHLAFNNLDRIQSGLFDKLKNLQVLNLEHNPITTIALNAFTPIPTAHIYVGKLFKAAKNADWARSTNATICEEEYIYGVCIYCKRDEYLDHFADSENCNKPNPKAKDVLAKKAYENQLKAMPTHSWKKAKEYPVEEEQP

SEQ ID NO: 12478 - DNA, 6974 bp, DROSOPHILA
cacttattgtgaattttgtttaaatgccttggcctcttcgcactttgctttcctgccttttgttgttctgctctatcttcttgctttttcacttttcgtgctcctcacacgcgtgactctgcggtcgcattaggtggagctgcatttccctcgcggaaactgcgtcggttgtcctgtggcggcctgcagaggcagtgcgtcaaagcggaggctgaccactcgaatgtcgggcgactcggattgcaaacttttccattaaactcgcgcagcactcatccgcccttcgcgttgcgatgcgatttccgtcgacagcggagcgtccgtgcgttcgcagcaaagtttttttttcgattaatgtgaccagtcggcggggtctgcgattagtactgccaagagtatggcgctcttcggttcgggggaaaatgctgaggacgtgtaaaaactatcctacaccgttcacactagcaatgcgatattgttgtactgttggattttcaatgtttgacataagcttatagctaattgtatatcttatcactaaagttggtaaactgtcgaattcgaactattaacattcgtatttgccaaaatcagcttagtataaacacattgaataattttaatcaataattaattaatgataataataataataataaattaataataataataataaaataataatattaacaatgataataattaattattacataatatataatgttgtatttcacatagcttaatgaataaattagaatgggtacaaacatttacggcttgaaacgctttaaatttactcaaagttcgaaagtgaactaaactttaggctaacaggttcgcttccccactgcttgtccgttcgaaaaggttcgagtgcgcactgtccgccagtggagtaccgcaccctgcattcgcctcgcacatctgtcattttttagtgccattcaagtttcgctggcgctttcgcgtcgcttggtcactagtgtcgttttcgtaagttgttggggtgggttaaaatccgcgcgcagagctataattttattcctggaaaatcgtcgttgtcgctgaccgcgtcgcattgcaaagttaccgtacgccaccgaaagtattagccctttgtagccggacaactgtcaaacggatttgactgacacaagagcagtgatattagcagcgcaacggaaagcaattatacgacataaaaatgttctcacgacccaggtaagcttttctttttcgtttggttttttatgcaaggactcgcctcgaaggatttgtgtgcgcgtgggtgtgtgtgtgcctcgggcgcaaattatgtaagatttcacgatgcgggaggagcaactgccccagctggtagcccagtgacctagtcactcggatcagacgagcggccgccaaggcgtccgtgtatatatacaatatattcacatagtatatcatcccatttccccttctcttttcctcctccttttgctgcgcagctttcgttttcactgggaagcgctatgtgcgagcgagagggattccgattgggaatcgcacatggcctggcattgacccttcggcttccctccctttctcgcacttgctggtcccgttcggtgaacagctgttttcagaattttcacttttcccttgcaattgcataagcgttttcgaacatgcatgtcttcgttttttggctgccaaacaagaaacagctgaaaaaatcaatgggctgcagagagagaaacggggtgctacgtatcataagtatatgtgctttaattttgcttttcttcggtggaggaatatcgccgcacataattcgtatgaattttctatgattcacagttggataggaagtacaaatacgaatgtattccattgtttagtagtattctaagaaaaaaaaaggaatggaaagtttatcatcatacttttacaatcgaaaacattttgtttcctgtgtagcgaaaacacaacaccttcaataccatggacatggacatatattcgaaagatggtctggcggaattctaaatttagtgcatataccgaaaaaatgtgtgctttgtttcgccgctgtcagcgtttttcgttgccaagttcatcaagaatgttttcagctggtctgctatcttgcctctcgttcccacgcaaaccgttagccagaaatttggctaacaaaaaatggaaagacgtaaagagtttaatgaacttgcccagctttttccttcagactccagttcttagggcttttaagaccctaaaaataattattggtagcactcggagtatgggggtatcatttacgacacgcacttattccgtgtatttggctcagatatgcgaaattgtttagcactcgacgtggtgggggctcatgtgagtgccattcaaataaatggaaaaaattgacgagtgatagcgttacctaaacgataattatcaacccaaagtgctcgccttttgtcggtgcaagggatctcggggtttccagcccggcgcacgtcactaaccggtttcaacttgaccaaaatccagcaacgacaccgataccgaccctctgccaatcccaattccactccccgcgagcatgattccatcaatgaaccgcaaacacaaattagtcacacgcctctgtcccgcgatatttgcctctctcgtaattagcaccatctattcgaactgccagctagcaaaaaccaaacagcaggggtcaaaattatagggtatcttataatatatgatcttcgcttggcacttcgattacagtaagagtgttgcataatcagaacctgtttttaattaactgatctagtccgttggggtccataatattgtatatttttgtaagcccttcactacgagttgttagttttgcaatcttatctgggggtatttacgcttcaagaacagaaaaacattttcaagttcaatgatccaattggttttgtaattcattaaattgatacgatcacaagtaagtgcacagaaaattacctactttagttgtccctagagaataaataataatgcacttcaatccaagctgtagaactgaacttgtagtttttaaatattttttattctaaagaatttagataagttatttataagaatttattacaagttattaagattctgaggattagatgctagatttatgaccgcggctgtgcatagatttttatcgtgatgttgccaggccatccatcccccttatcgctggcgctttggattccgggggacagctgtaaacaatgcggcttagtttccttcttttctgcttttcattttatattttggcgtgcccagcgcggtgataaacaaaaagcagctgatgtcgaccttgggcatggcgtttttattccataaatatatgcatatgtgtgtgtttgtgggtggacagagggggcccccccattgccagtggcaatgtcaagaatgacagtgggcccacctcaaagtcaagggttcccagggggttctccaattgccgcgctgataaagtgattcacgtaatgcacttttgcaatttgcagcttatgtggaactgtgggcaaattgtgtcgatgcggcacttcagcaacaggaaagactgctgtggcagcagcaacagttcccaccgctcgacactatcatgaggtggtgggcgatatcatctgcccgtctcaggtgcgcggcatagatcacatccgtgatccgcgactcaacaaggtaaggagcactaaattaattgtgtgacacttttgttttgtataaacaaatgcttttgtttctagggccttgcctttacactggaggagcgccagactctgggcatccatgggctgcagccagcgcgcttcaagacgcaagaggagcagctgcagctatgcaagatcgccgtaaaccgctacacggagccgctgaacaagtatctctatctgagcgatctgtacgatcgcaatgagcgtctgttcttccgcttcctatcggagaacatcgaggatctgatgcccattgtgtacacgccgacggtgggcttggcctgccagcgctttggcctgatctaccgacgtcctcatggtctgttcatcacctacaacgatcgaggacacatctttgatgtgatgaagaactggccggagccgaatgtgcgtgccatctgtgtgacggatggtgagcgcatcctgggactgggagatttgggcgcctgcggcatgggcattcccgtgggcaagctggccttgtacacggctctggccggaatcaagccccatcagtgcctgcccattgtggtggatgtgggcaccaacaacatcgatctgctggaggatcccctgtacgtgggtctgcgtcagaagcgagtggttggtcgggagtacgacgagttcattgacgagtttatggaggccgtggtgcagcgctatggccagaacactctgatccagtttgaggactttggcaaccacaatgcatttaggttcctggacaaataccgcaacacctattgcactttcaacgacgacatccagggaaccgcctccgtggccgttgctgggctctatgcctccaagcgtattacgggtaagtccttcaaggactacaccttcctgtttgcaggagccggtgaggccgccatcggcatcgccgatctcacggtcaaggccatggtgcaggatggtgtgcccatcgaggaggcctacaacagaatttacatggtcgatatcgatggtctgctgaccaagagccgcaaggtgggcaacttggatggccacaaaatccactacgccaaggacatcaatccgatgtcagatctcgccgagattgtctccaccatcaaacccagtgtatgttataacaattgttatttctgatggaacttttggtaatcctaaactaatcaacaggtgcttattggtgcctcggctgctgccggcattttcacaccggaaatcctgcgcaccatggcggataacaatgagaggcccgtggtgttcgccttgtccaatcccaccagcaaggcagaatgcactgccgaagatgcttacaagcacacggatgtaagttattttcattggatattgtaatgaccaactaatgagatgattgaaatgcacaggctcgcgtgatcttctcgtcgggctctcccttcccaccggtccagatcggtgacaagaccttctacccgggccagggcaacaatgcctacatcttcccaggcgttggcttgggcgtgatctgcacgggtactcaccacatacccgacgaaatgttcctcatcgccgcccaggagttggccaacttcgtggagcccagcgatattgagcgcggatcgctgtatcctccgctgtcgagcatccgcaacgtgtccatgaacattgccgttggcgtgaccaaatgtgcctacgatagaggtaagataccaatagcataccaatcttggtggaacagaaaatataactaatttggattatttttgtaggcttggcatctacctaccctgagccacaggacaagcgcaagtggctggagaatcagctgtacaacttcaactacgagagctcgatgcccgcttcctgggtttggccgcggatgccctacattaagactcgtgatttagtccccacaaagctctatggaaaacaaagtgaaaattaatttctttctttattttattctaggcgaagaaagcccgctcattgccgccatcaaataaaatagcattaatgcgttcaactggttgatggcaccgttctgttttgcatctaacacactctactacttccaagcgtacaccatcagcaccaagcaacaaaacaaccaaccgactactaactaccctagactagataaatttccagtgctcactctttttaaatgtttgttaatcgatccgttggcatcgacagtcaaactcagtcgcaactaaaaaatgattaaaatgtttttgatattaaataattagaacacctaacaagctgcgaggtcaagggatcggttcttaaatgtattttcaaattgtttaatagtattatgtatgtatgccatgtttttatatatgtaaaaattatcatgttattaattttgtgataccgaaacgtacgatactaaatgacgacattgacatgacgactgtgacggtgactacgccttcgaaaaagcaattacgcagtattctattctatcctatcactatcctatctgtatttaatctatgctatgtttatggtttgctgtaacttaaacacccgattggcttcgcaattccattcctcgccgcttgccatagctatcccgcattataagtgtaccccagcttccgatatgatctgctgtgtctactactactactaactctgacggcggcatcaagcgagctctgaagctatacttatttatcaaattcacgcttaatcacaatccacccgaaattcgacaattgattgatttatctattgctatatgctcctttcgttcacacacagagagcgaggaagtaatgtaaattatcgattacccccctacaaaccgaccgcctagaacaattggctagacagcagagctaactggtgagaacaacccaaacaagcaaacaaccaaacaactaaacagccaaccatccaaccgattccacatgtaaaacaacttaactcgctgccgttaaccaccaccaactatctaagttagaacattatgctttctatcgattagttcacttatatctgtagatatattcgagcgacgattatgtttgttgtttagccatatctgatatttattaacgcaattaagcagctttgttataatttattgttaaaaggtcgagcctaatgtatcagtaactagaaaacctaaccccttatgatcgatcggaccgattcagccattgtaccactgactagatgatgatgatgtgcgataaacaataaaacgaaaacacaagttaaacactctcgatcctttatgccaattgcttgctggagatctcttgagat

SEQ ID NO: 12479 - DNA, 2343 bp, DROSOPHILA
taagttgttggggtgggttaaaatccgcgcgcagagctataattttattcctggaaaatcgtcgttgtcgctgaccgcgtcgcattgcaaagttaccgtacgccaccgaaagtattagccctttgtagccggacaactgtcaaacggatttgactgacacaagagcagtgatattagcagcgcaacggaaagcaattatacgacataaaaatgttctcacgacccagcttatgtggaactgtgggcaaattgtgtcgatgcggcacttcagcaacaggaaagactgctgtggcagcagcaacagttcccaccgctcgacactatcatgaggtggtgggcgatatcatctgcccgtctcaggtgcgcggcatagatcacatccgtgatccgcgactcaacaagggccttgcctttacactggaggagcgccagactctgggcatccatgggctgcagccagcgcgcttcaagacgcaagaggagcagctgcagctatgcaagatcgccgtaaaccgctacacggagccgctgaacaagtatctctatctgagcgatctgtacgatcgcaatgagcgtctgttcttccgcttcctatcggagaacatcgaggatctgatgcccattgtgtacacgccgacggtgggcttggcctgccagcgctttggcctgatctaccgacgtcctcatggtctgttcatcacctacaacgatcgaggacacatctttgatgtgatgaagaactggccggagccgaatgtgcgtgccatctgtgtgacggatggtgagcgcatcctgggactgggagatttgggcgcctgcggcatgggcattcccgtgggcaagctggccttgtacacggctctggccggaatcaagccccatcagtgcctgcccattgtggtggatgtgggcaccaacaacatcgatctgctggaggatcccctgtacgtgggtctgcgtcagaagcgagtggttggtcgggagtacgacgagttcattgacgagtttatggaggccgtggtgcagcgctatggccagaacactctgatccagtttgaggactttggcaaccacaatgcatttaggttcctggacaaataccgcaacacctattgcactttcaacgacgacatccagggaaccgcctccgtggccgttgctgggctctatgcctccaagcgtattacgggtaagtccttcaaggactacaccttcctgtttgcaggagccggtgaggccgccatcggcatcgccgatctcacggtcaaggccatggtgcaggatggtgtgcccatcgaggaggcctacaacagaatttacatggtcgatatcgatggtctgctgaccaagagccgcaaggtgggcaacttggatggccacaaaatccactacgccaaggacatcaatccgatgtcagatctcgccgagattgtctccaccatcaaacccagtgtgcttattggtgcctcggctgctgccggcattttcacaccggaaatcctgcgcaccatggcggataacaatgagaggcccgtggtgttcgccttgtccaatcccaccagcaaggcagaatgcactgccgaagatgcttacaagcacacggatgctcgcgtgatcttctcgtcgggctctcccttcccaccggtccagatcggtgacaagaccttctacccgggccagggcaacaatgcctacatcttcccaggcgttggcttgggcgtgatctgcacgggtactcaccacatacccgacgaaatgttcctcatcgccgcccaggagttggccaacttcgtggagcccagcgatattgagcgcggatcgctgtatcctccgctgtcgagcatccgcaacgtgtccatgaacattgccgttggcgtgaccaaatgtgcctacgatagaggcttggcatctacctaccctgagccacaggacaagcgcaagtggctggagaatcagctgtacaacttcaactacgagagctcgatgcccgcttcctgggtttggccgcggatgccctacattaagactcgcgaagaaagcccgctcattgccgccatcaaataaaatagcattaatgcgttcaactggttgatggcaccgttctgttttgcatctaacacactctactacttccaagcgtacaccatcagcaccaagcaacaaaacaaccaaccgactactaactaccctagactagataaatttccagtgctcactctttttaaatgtttgttaatcgatccgttggcatcgacagtcaaactcagtcgcaactaaaaaatgattaaaatgtttttgatattaaataattagaacacctaacaagctgcgaggtcaagggat

SEQ ID NO: 12480 - protein, 617 aa, DROSOPHILA
MFSRPSLCGTVGKLCRCGTSATGKTAVAAATVPTARHYHEVVGDIICPSQVRGIDHIRDPRLNKGLAFTLEERQTLGIHGLQPARFKTQEEQLQLCKIAVNRYTEPLNKYLYLSDLYDRNERLFFRFLSENIEDLMPIVYTPTVGLACQRFGLIYRRPHGLFITYNDRGHIFDVMKNWPEPNVRAICVTDGERILGLGDLGACGMGIPVGKLALYTALAGIKPHQCLPIVVDVGTNNIDLLEDPLYVGLRQKRVVGREYDEFIDEFMEAVVQRYGQNTLIQFEDFGNHNAFRFLDKYRNTYCTFNDDIQGTASVAVAGLYASKRITGKSFKDYTFLFAGAGEAAIGIADLTVKAMVQDGVPIEEAYNRIYMVDIDGLLTKSRKVGNLDGHKIHYAKDINPMSDLAEIVSTIKPSVLIGASAAAGIFTPEILRTMADNNERPVVFALSNPTSKAECTAEDAYKHTDARVIFSSGSPFPPVQIGDKTFYPGQGNNAYIFPGVGLGVICTGTHHIPDEMFLIAAQELANFVEPSDIERGSLYPPLSSIRNVSMNIAVGVTKCAYDRGLASTYPEPQDKRKWLENQLYNFNYESSMPASWVWPRMPYIKTREESPLIAAIK

SEQ ID NO: 12481 - DNA, 4363 bp, DROSOPHILA
aaagctttaaagaacatagattttaagaccatttcctataatcgcttaaagtttatttactttcttataacctctaattacacttcaataacaacctaagctgatttgcatagtgtttgtgcgttcgaaacgaatcaatacgacagtcagaatgagttcgcattccattcatttgcatgttgagtgctcattaatttcatctggccaacagcattgccacgcccccaaaaatcaccacacccagcgcccatttcttgcggcagaaataaaggtgctgcaagtgcaccaaagtgcgcgcataactcgattcgcctttgatttatggtacgcaataataatcttcatttgcatgttgcctcaggcggcgcgagtcaacagggcgtatactcgacgccattatatgcaggtgtagctgcggctacgagttgcgcttccggcagctgcaagtgtccttgccccgactttcagcactgatttatgtggacaggaaaaaatatttataatttgtgggtgtattttaaaagtcgtacggcagcatttttaaattgcgcaggcttaaaatgtatatgcctaagcatttaaatttaaagactccgccattttctacatttttaagatgaaatgtataattttcgcaatattattcgctgtgtatcaatctcacctgctttctattttccatttcgttttagcattggtagcctcattagcaacttagtagaatggcgcaaaggaaaccgtaaccaaaaaccaccaaaaacgggaaaaaaaaggatacgccgaaagggattaggagcagcagccactgaaaaggttgagagcccataaaaaagcacaaagaaattgaatactcacagcgaattttaggcataatgagttcgctgtcgcgtccctaaaaaccgagcacctcaaatgcaaattgatattaagccgccaatcataatcagcaccgatattaattaaaaacccgctaacagtcaacaataatcaagcaaccgccatggcctcaccaccggagagtcccatcgaggaggtggtctatgagttggaacacacacgagtgcctaagcccattcccgttgccctcgaggatctgtgccggcagaccaagttcaccaaacaggaaatccgcgtcatgtacagaggattcaaaacggtaggaaatcaaattgatgttggatgtcaatgggttccaaatatactattattttagcactttttaaaaatatagttctttgtatgccaagaacaactcattgaccagctgcgatgtaaaaacgagagctacttaaatgtctgtcattttaatgcacacgcgttttgaatttcattgcaaatgaattcgtgaattcgctcctttcaagcgattgtgtgtccaagcacttttacaccaaagagtgcggaaaaaggccaactcagcgaaaaagtttcaatatgtgggtcaacaagagatgagctccggggtcaagtaaatggatagtttgagccagagagctcgccttattgacagtttgccccattgatagtttgcctttgtgatatttggctgctcgctggtagtttaccttattgatgagtttcgttggctggtgacttgtactttggatttcgttaggaaatatatggaattccaaactttttaatttagcaaatgataagcacgaaagtagagcatagctttttttattcgactactgcattacttttaattaaatgatatcaaaggtcttgctaatcctttttgcccttttggaactcactgtccctacatttgcctttttctttattaaccgagcaaacacttactttcattgcgatttcattttcatttttttcgcaggaatgccccgagggcgtggtacacgaggattgttttaaggatatctacgccaaattctttccacatggcagtaagtatttgtgtgtggataaatgtcgcccattttggggtgtgtctgtgtgtgcgggtgctgtcgctaaggtcttatgcttttcctttttatagtagcgcgtcataaagcgccatttaagcgagcatttcgtccttgcagcatctgcgaccgaaatgccaaaatacccaaatagccagaaaccgttaaaaaaaaaatcaccctgacacgcctactttgcttatgttctatttatacagattcaagtttatacgctcattatgtgttcaaagcgttcgatgttaattgcaatggcgccattagttttcgggtaattatttctcattatattaacatctacacagtattacgtatatttatacgtttcaatgtttatcaggatttactggtcaccttgtcgaccttgctgagaggttctgtatatgagcgtctgcgttggaccttcaagttgtacgatctgaacggcgacggaaggatcagtcgcggcgaactgagtgaaattattttggccattcacgagcttatgggtcggagaccacatcaacctgaggacgatcgcaaggcgagggatcaggtaagctagcatatattaaatataaaagtttctttaaaaaatcttggcctaaactatagtaagtacaagtctcgaccttgatactcggctagtacggcctttaacaatcgatgctagactttaatcaacttgttcgaggtacaaaagaaaatctctgcttatccgcaatgagcattatgttctaggccattctgttgaaatgtctatttgcatattcatcgcacttcctctggcgcagatttgtatgcttcattctttatgcaaaagccacacttcatgaaacgtgcagcatccgctgacgttagtcgggcgcacagtgcgtatgagtaattatgattgggagcacacacagaagtatgcgcatacatacgaaatgcataagtcgggaatcgaaattgcaacggcaacggttggtgaaaaagcgagcagggaaaaacggatgcattcatgtgcggaaacagcagcggatattttacttaatgatgaaggtttcactttttcccgcggataatacttaaacgaaaatgccaatgaaaagtcgctgaaattgaaatgagcgattaaattgaaaatggctttgtgtcagtcaacgaaatttataagagtaataaacggaaatgagagtaagggggctataacttaatttaattgatcagtaataaggatattttggtgtctttaaaaaatttatgtatgctatttaaagagtcttttagtaactcattgtgtgtttgatcttttattattcaggttgatcgtgtgtttcgcaaactggacttgaaccaagatggcattataacgatagaggagtttttggaggcctgcctgaaggacgacttggtaactcgatcgctgcaaatgttcgacaacgacctttgatgacaagagggggagctagagccagggctacgcaattccaggactataatatctcttatagatctataagtgcaataagcaactctaaggaagtgacaaccctaaaaaaaattacaaaaatattacaaaaaaaaaaggaggggggagaaccccaagcaagcttgaaaaacaccagtgaaattgatggaaaacgaggaaatgaaacatattagtaattaaaattagtttaggcaaatatcgaaggaagaaatctttaaactttatgagtgtgttattatataactaacgaagaggtcgactaagattgaatataaagaatatgtaattttttgagcatattatgaatttaatcctgccgtgaaaagcgaattggtcttatatatatgtatttactatataaatatgtacatgtatgatatgatatatgtgtaaatgaaattgatttcgacaacagaactaaactaaaccaccaaaccaaatgtttgattcaggaatggaattggtataccgacaacaagagaaaccgagctctcaacacgatttactttactacaattacgcataacaaataatagaatactaaagtataaatttacacttagctaaatgaaaagttaccaaacaaagggtatttccttagttcaccttgatagtcatattttcgatttaattgttttaaaagatcctaactgtttaatccttttttgctttgctgtccaatacgcgaattgcagtataaattaaattaattcagattgtggatagttctattagccccatatgttttaatgtgtgtgttattgttttgcatcaactaattgaatttacaatttgtctcaataaagctatcgcccagccatattggtttaaaacggcaaaaaaaaaatagatactacataaacagatgaataaataaagcctgggttttgtgtgcccgaccaaccaccgatatataaatagcacttgacaattacgcttgatttaatatttatacaaggtc

SEQ ID NO: 12482 - DNA, 621 bp, DROSOPHILA
atggcctcaccaccggagagtcccatcgaggaggtggtctatgagttggaacacacacgagtgcctaagcccattcccgttgccctcgaggatctgtgccggcagaccaagttcaccaaacaggaaatccgcgtcatgtacagaggattcaaaacggaatgccccgagggcgtggtacacgaggattgttttaaggatatctacgccaaattctttccacatggcaattcaagtttatacgctcattatgtgttcaaagcgttcgatgttaattgcaatggcgccattagttttcgggatttactggtcaccttgtcgaccttgctgagaggttctgtatatgagcgtctgcgttggaccttcaagttgtacgatctgaacggcgacggaaggatcagtcgcggcgaactgagtgaaattattttggccattcacgagcttatgggtcggagaccacatcaacctgaggacgatcgcaaggcgagggatcaggttgatcgtgtgtttcgcaaactggacttgaaccaagatggcattataacgatagaggagtttttggaggcctgcctgaaggacgacttggtaactcgatcgctgcaaatgttcgacaacgacctttga

SEQ ID NO: 12483 - protein, 206 aa, DROSOPHILA
MASPPESPIEEVVYELEHTRVPKPIPVALEDLCRQTKFTKQEIRVMYRGFKTECPEGVVHEDCFKDIYAKFFPHGNSSLYAHYVFKAFDVNCNGAISFRDLLVTLSTLLRGSVYERLRWTFKLYDLNGDGRISRGELSEIILAIHELMGRRPHQPEDDRKARDQVDRVFRKLDLNQDGIITIEEFLEACLKDDLVTRSLQMFDNDL

SEQ ID NO: 12484 - DNA, 4341 bp, DROSOPHILA
aaagcaactataaagagcgtttcttcttgttgattaataattaggtaaactgctacaaaacacataagttaattaaagaaaaacgaaagcataaagaaaaccggaaaaccaaagccaaccaagcaaaattagaaaaagtgagttaaatttaaaattatagccataaaggccaacgaaatgcaaactaagcaaatttgcttttagctccatgcaggtacaagaggaactcccaaaaaccattgattctttgcaaactaaaataagccaattaaatgtgaaattgtttaagaaggccataaaaaaaaaaactaagcactatctcctgctgcaaggcaacgaaccgaaactctgttagacaaatagccaaaagccaagttgtaatcatttcgttgcgtgacctttgcgtataatttgaatggttcgattggttccactagatacgtacatatatactgagaacacatactatgtaaagcagcgaaacaaaccaaaaaaaaaaaaaacctaagaaaacgagcattataaattaaagagaatttgaaaagaaattatcacccgtgttattttcagatgaagtgattcaagttggctcctctaacgaactttccctacaaaaaacttgcggtttccgtacttgttctttattcacgaatataatgtcggtaaggaggtgtgtgaaaagtgcggatccggggcattttgtgggctactcggatagcgcactcgtgtacaactacaaacacactataattctatatagccaggtataaagtacatatgcattgcagcgccataatgaacggaaagtaaaacgaggaaatacacaaaaaattggaacagcccagattggctggtcgtcaatcttatcgtcctggttggtaggttggtttgctgttgccgcaggtgatctacagtactcgtatggtgtatatcgatatgtaaatactatatagtatgcgatataaatatataaaaaaaaaacatcgacggccgcggcggactaccacacgctgcacttttccgccggattcatggtgctgcccagtgggcatttgtaggcgctggcaaagtcgcgagaattcgaaagtggtcccaggacacgaacgaatccgggcgagtggaccgcggagcggatcttggtcagagcgtcctccggccgcatggatccgcaccagatttgggcgtagttgagaaagaacagctgatcgtgggtcatgttcaggccgggcagctgctgctcccgcccatgtaaggtctcccatttcttgtaggcctggaagggatgtaattagagggcttgcgattcacggcatataaatggacttaccctgaaagcctgttttagaccgccgttgtcggcgatgttctcgccctgcgtcatccgtccgtccatgaacatgtccacctcgttaatcttgtagcgcgagtactgatcgatgacgcactgcgtccgttcgcgaaaggcctcgatggtggcattgttccaccactgcatcatgttgccctccttgtcgaactgcctgcccttgtcgtcgaatccgtgggtaatctcgtggccaatgaccactccgattccgccgtaattcaaggacttgggaaagtgctggctgtagaatagcggctgcaggatgccagcaggaaatactaaggtatgtaacgaatgcaaatgagtaagatattcatcttagcaggggaatgacctccggacccacctatatcgtttttattcgggttgtagaaggcattcaccaccgccggttcggtggtccacttttccttgtccaccggctggcgaagaagtcgcagcatcttctccgactcccattgcagaatgctaaggacattgttgatgaagttgtcggggacaattgttagctgtggacagataatgcagtttagggactcgagattgacgaaactgttaatctatatatacccacattcacgtactcctgctccagctcggtggcattggtgagcagctccggataaccaatccgctcgttcatcgagtccgccttctccttggccaccgcccgcgtctcgtcgtccatccaatcgttctcggccagaagctcgttgaacgccgcacgtatagtgtggatcatctcgagggccacctccttgctctcctgattgaagttgtcccggatgaagagggctcccacggcgacacccagcttcttgttagtccactcgacgcactgtgaccagcgtgtcctctccgactggatgcccattaggatcttgcggaactccacccgctcacgctgatactcatcgatcatgtgtgacatcaaggacatgaccaggcgccacagcatatagttgtgcaccacacggcgatcggtgtgcgccagtatcttgcccatttcggtgagatagtgcagcccgtaggtgaccagcggctcgtcctcctgcaggggaatccccggacccagagctgcctgtagatactcctgccactgcacctcgggcaccagttcctgcagctcgggcagcaacatcttacgatagaccaggctagtgtcatgacgatccgcctccggcaaggaaacattcactagctgcgtctcgaagagcacaactttctccagttccgcggcggcggtggccggatccgctcccaggagcagcgccacctgtgtcatataccgatggtaggcccttcggtcgttcgcactgctctccttcaggtagtagtccctcgagggcagggcatactgcagctggtccatctgcaggatgttcaccgagctgttcttgtcgtcggcgcccacgtacagctcgatcatcaccggctcgctgtagttcagtcggagctgacccattagccgctccacggagagatccgccggcggactccagttccgctcgatgaccggccagccgcccagggattgcagtacctgcttgagtcgacccgttccgattttgcggatttgagctgagaatgggaagtaggaaaaatagttattaattctaaaaaattgctaaagaccctcgttgttaaaaagtggtattaatatagagttaaacttacgaatatccatgcagctcttgaagaaggttttggcctttatggtggctttgttgtcgcgttcatcgatgggttcctccagaactgcgcgcaggataacctgctgctgatcggacaggacctgcgtgaaattaggataagcacttagaaaaccgaatcttacggaggcatatcccaatctcgaaataaatacctcaaacgtgctgatggagctgcggtcctcgggaatgggatgcatcttgttccacgtgccgcacgcgtactggaaaaagtcctcgcagggatcggagttgaggtccatggccgagagcagggaggcggctggatttagataatttttggtgtgttaaacccggtttttttgtgtgttaaactgaatactgtattcagtgcagtaaatcaaacgcaacccggtgggaaactcttcagctggagtgcaattagtgcttcaacccgttgaggtcataatttatgcctacttttgatcgcaccggccataaacttggaccacaaatcatcaccggaacttttgcgataagcgataagcaaagtagttttcaccaccgcaaaattcacacacttttttccccgatgcaacttttcggtcacacaaaagttatgaatgaatgcggaactgaactaccaaggaggagccatttcccgggatagacctgcattgttcactggtcgtgctgccaatccataaatcaacgtcattaagctgaatttcattatctcggaaaactaagtgcgaaactcattagtgtgccccccccccccacccccaccttcaagatttttcttacttctagaaacgtccttgatttatgctgtagctacaaagccaaaggatactagcttgccagcaaaaattgcattctggaaatttgaagttacctgtcggacttaacactcatttgtcatccacttaagcaatttccctaattcaataacttgaaggccaacaatctgtcatttcattactcgattcctcgaaggtgttattatctagagaatatgacaaatagccaaaccccttttttgcttagttcaattaagcaactgatttgggttaccaattagggtgaacccccgaaaagtatgctaagtggagcactcgaatcgatggcatcgcctggtaattgtgcccatgtatatttcaggatatgccctgcaactggacaggtgtatctatatgccaatccctccaaccaaccaactatctatccaacgaactatctatgtagctatacatttctgtgtccgtgtatctaacggcatgccaagcagtcagtcaatca

SEQ ID NO: 12485 - DNA, 1986 bp, DROSOPHILA
atggacctcaactccgatccctgcgaggactttttccagtacgcgtgcggcacgtggaacaagatgcatcccattcccgaggaccgcagctccatcagcacgtttgaggtcctgtccgatcagcagcaggttatcctgcgcgcagttctggaggaacccatcgatgaacgcgacaacaaagccaccataaaggccaaaaccttcttcaagagctgcatggatattcctcaaatccgcaaaatcggaacgggtcgactcaagcaggtactgcaatccctgggcggctggccggtcatcgagcggaactggagtccgccggcggatctctccgtggagcggctaatgggtcagctccgactgaactacagcgagccggtgatgatcgagctgtacgtgggcgccgacgacaagaacagctcggtgaacatcctgcagatggaccagctgcagtatgccctgccctcgagggactactacctgaaggagagcagtgcgaacgaccgaagggcctaccatcggtatatgacacaggtggcgctgctcctgggagcggatccggccaccgccgccgcggaactggagaaagttgtgctcttcgagacgcagctagtgaatgtttccttgccggaggcggatcgtcatgacactagcctggtctatcgtaagatgttgctgcccgagctgcaggaactggtgcccgaggtgcagtggcaggagtatctacaggcagctctgggtccggggattcccctgcaggaggacgagccgctggtcacctacgggctgcactatctcaccgaaatgggcaagatactggcgcacaccgatcgccgtgtggtgcacaactatatgctgtggcgcctggtcatgtccttgatgtcacacatgatcgatgagtatcagcgtgagcgggtggagttccgcaagatcctaatgggcatccagtcggagaggacacgctggtcacagtgcgtcgagtggactaacaagaagctgggtgtcgccgtgggagccctcttcatccgggacaacttcaatcaggagagcaaggaggtggccctcgagatgatccacactatacgtgcggcgttcaacgagcttctggccgagaacgattggatggacgacgagacgcgggcggtggccaaggagaaggcggactcgatgaacgagcggattggttatccggagctgctcaccaatgccaccgagctggagcaggagtacgtgaatctaacaattgtccccgacaacttcatcaacaatgtccttagcattctgcaatgggagtcggagaagatgctgcgacttcttcgccagccggtggacaaggaaaagtggaccaccgaaccggcggtggtgaatgccttctacaacccgaataaaaacgatatagtatttcctgctggcatcctgcagccgctattctacagccagcactttcccaagtccttgaattacggcggaatcggagtggtcattggccacgagattacccacggattcgacgacaagggcaggcagttcgacaaggagggcaacatgatgcagtggtggaacaatgccaccatcgaggcctttcgcgaacggacgcagtgcgtcatcgatcagtactcgcgctacaagattaacgaggtggacatgttcatggacggacggatgacgcagggcgagaacatcgccgacaacggcggtctaaaacaggctttcagggcctacaagaaatgggagaccttacatgggcgggagcagcagctgcccggcctgaacatgacccacgatcagctgttctttctcaactacgcccaaatctggtgcggatccatgcggccggaggacgctctgaccaagatccgctccgcggtccactcgcccggattcgttcgtgtcctgggaccactttcgaattctcgcgactttgccagcgcctacaaatgcccactgggcagcaccatgaatccggcggaaaagtgcagcgtgtggtag

SEQ ID NO: 12486 - protein, 661 aa, DROSOPHILA
MDLNSDPCEDFFQYACGTWNKMHPIPEDRSSISTFEVLSDQQQVILRAVLEEPIDERDNKATIKAKTFFKSCMDIPQIRKIGTGRLKQVLQSLGGWPVIERNWSPPADLSVERLMGQLRLNYSEPVMIELYVGADDKNSSVNILQMDQLQYALPSRDYYLKESSANDRRAYHRYMTQVALLLGADPATAAAELEKVVLFETQLVNVSLPEADRHDTSLVYRKMLLPELQELVPEVQWQEYLQAALGPGIPLQEDEPLVTYGLHYLTEMGKILAHTDRRVVHNYMLWRLVMSLMSHMIDEYQRERVEFRKILMGIQSERTRWSQCVEWTNKKLGVAVGALFIRDNFNQESKEVALEMIHTIRAAFNELLAENDWMDDETRAVAKEKADSMNERIGYPELLTNATELEQEYVNLTIVPDNFINNVLSILQWESEKMLRLLRQPVDKEKWTTEPAVVNAFYNPNKNDIVFPAGILQPLFYSQHFPKSLNYGGIGVVIGHEITHGFDDKGRQFDKEGNMMQWWNNATIEAFRERTQCVIDQYSRYKINEVDMFMDGRMTQGENIADNGGLKQAFRAYKKWETLHGREQQLPGLNMTHDQLFFLNYAQIWCGSMRPEDALTKIRSAVHSPGFVRVLGPLSNSRDFASAYKCPLGSTMNPAEKCSVW

SEQ ID NO: 12487 - DNA, 12839 bp, DROSOPHILA
caaattgctccttataaattccaattaactacgaattataagaaatagaatccagttccataatgttggcaacgaaattggatggagtacctaatacaaggccaacaaatatccgtttttaatatataaaagttagcaacactattttccatgttaataccggtcgttttgtaccgttaagctttaaattaaatatatgacacttagccaagacgcgaacccatacaggtgcgtgttacccagacagcaaccgacacagaagtaccgcatttcgttggtattattttcacaccaacaattggcgcgaaagccgtgccaaagcagagatgcgataaagaagaggagtgcagagaggcggcagtctgtggagaaacaccagtggaatcgcacacaagcgcggcgattcgaaagcggacgtgtgtgaaaatccagaccgcgggttttttaaaattttttgttttattttttcgcgtgcggtgtgggagggtgtcacatccaaaaaacacaaagcgacagcaacaacaactccgttaatattctggatcgggcacacacgcacacaaacataaaaaaaccgaaatatacacatgcttggcggagttcgtgatttaaaaataatacaaaacaccagaattaaatatacgcgcacgcacacacacacgcgtatgtaaggtgcaaaataaagtttctttactggtttctggtgttaacaacaacaaaaaacatgaataactaaagaagaaaccgaaaatataaacgaaaagaggagccgcaaaaatgccactcagctgttacggcgaaaaaacagcgaaaaacgccaaaaacatcgaaaatcaggtgtagcgagagaggaaatatggtgattaaaacaaagagtggaattggaaacgaaatcgttaaaaatcaaataataacaataactacaacaaaggcggcggcaacctgctcttgaaattgccacaaatcttgctttaatcttttgttttacaataacccccaaaatcgccataaggcacaagtgcaataaaaaccataacaacaacaacaacagcaagaacaaacaaaatcaatattcaaattaagcagcagcaccaacaacaacaactcaacgagccgagtcgataagctaaacgataagtgcgagagccaaaaaggggagaagagcgctcgacagagagcgcgcgagagaaaagccgagagagtgagaacacagcatccacccaaaccaaatccacaaaattaccacccccacaaaatgggacgtcgaacgtatttaagccggtcctcaacgatttcctaccccagcagaatcgaaggatggctggatgtctgcggtgagtgggagttacatatgtacatacatataacatcatagacttcatagtgaatatctctctaatttatgttttataagtgaaatatagggttgtagtgtaacctcattcaataataatgaacttaaatgaacttaatgaaactaaagtttaatgaaccataaagttagttagcggggatgctgtaatctggtcccttttatcgaacctaatggttttcaatgtacgattatctctttctcttaaaccttaaagattaagatattgtcatacccttaaactaaatgattggttaattcatccaattgatcctattgaagccctgtctaaataaggaatagctacataaacatagttttctataactatcccctggatttttaattacaaactcaaaactaagattactttaaaagttaatagtaccaggagataagggaaacaattgaagacaaataatggtacccaaaagtgcccaccgtcggaaaacaaatgttgcgattagaaccgcaactcaaagtaaacaaatagatctaatctaatttactattaggtaccattaaatacaatttactagatacaatctttatgtgtactgctgctaatgaatgcggctcagattgaagttggctaaagagctacaatgtctggtatgaatatacgttttaatggtaaccattactaaggaagcattcaattgagcatagcaaattttcaatgggaaactatgcttctggagtatgccaacacacgaaagtcaaacccagtgaccaactcgaattgtttatcacttggctatacatttaacacctttttaaaagtgcataaaaatggtgagccagtgttcataagttggctttttaatgtggcaggttcatatgtgggttttgccgtggagaggggaaattcggatggaaaagtgccctaccggcggatgcggatgtggaagcagttgcggatgtggatgcggatgtataatgtttggtttggtgtgggctgtgggatgagctctctcgagttaagtgtcttcgtgtcacctgtgcaaattccttggcctgggaaaaaatacctttccacatttttcgggcaggttcatgtttgtggactagcgtttttccccgttatctcacattttacctgtcgcaggttgtcgctgccttagttgttggtgttgtttcagcgaggggttgctcgtacgtccctcggaaaaaggtgaaaacacacacacacacacaagtacactgcaaatacccaggcgaatagacaacaaagcccctgcgcagggtctctcctcccatcgaatgttcaggcgaccaaagtgtcgaaggtgaagtggaaatctttggacggaaccccaagatcgtttgtattatgtacatatatatgcatactgcttttggagagctaaaagtaatagaggataaacgtacaactagagtcaatctcttagcacaacttcttagaaataatacatataaaaactataaccaatctattaaaatgtattcataaactaacaagctccgcatatttaaacaaatttgtaaatcaccacttatttctatttattccggaaaacatattgcagtaaataatactttgtataaggggtttcatgcagaagtttttcaaattaattaatgcagtattgaataaaagtatttaaagctagttaataaaagcagtttaaaagctattgtctcaaaacagatataaattaaatctataactggtaaaagggtttcaccacggcaaatagtaaatgtttttgtcgcctgtgaccgatatgcccatgtgcatttggattagcatgggccattgggggaacacgtacagcagaaattggtaatagcagacagccacacacacacacacacaatcaaacgatcgcgataagtggcagcaaacagtaaaaaaggctaccttcgccttgaaggcaacttctcttattgccgttttcggatttcgttcgcttgcctcatttgctttatttttccattttatttttttttcttacctttctgttacggttatttgcccgcagcggaaggaaggtgtgtttatttccaggtgaacacgaatgtgcgtgcgtgtgtgcttgtgtgtgtgtgcgtgtgtgcgtgcgggttggtgtgtcaaggtcattgatggcattctatggtaaccttttgccttgccatttggcttcgtctttgtccacgtctctcttacgtttgttgttttcttgcaatcggttttgaagcccacctacaaaactcggttaacaaacaagcgcacaggcactgaaacacatgcacagagagaaaaaacgcacgacatctgttaatcaaatcattggacactttgccatctttttcgttcagtgctctgctgtaattttattagtatattgcttatatctattagatactttttacaaaattattatgtatttttgtttagtaccgttatgcatttccactgtttgcttcagtttcaaaactacttgtaaatattatcacattcttgagttactaactcaaatcttgcacatgatatacatacatatataataagttcccatttctgtcagtgtattcgagctaagaacaaatcgtagaagttcgatccatttggttgttcctgttatttttttttatatttttttcattttgctagagttgttctttcgtgttgcccgctggcttgacatcatttctgtcatgtttcgtgttgtagctgcctttttatttggtcggttgttagatgacacagtgaacaatggccacaatgaacgcaacaacctccaaaacgaattttataaaaacatgtatagtataatcgataactaatgataaccactaagtctaaaatatagcttcgttgccttgcagacattcgtcaacccatagtgtccactgtactctgttaaccccctccctggctttcgctttgcatgtcacttggccatgtccaaacgcttcttcttcttggcccgttcggtgtggttcgacttggttctttgcgcttcggcgtttagaaattggttatgaggccgcttgcgtacaaagccaaagccaacagcaggcaggcccatgccaaaagcgttaaaaggaagacggcgagaagaggagaaatcgactgggccaaaaggcagactgaaaagcaaagattgaagactgaggtggagatggaggaggagtggccattggccacgacaagccgatggagaagaacgataaatggtggagcgacactcaagtgtcgagatgatggcgtcattaacttggccaaaagcttttgtcgctgacacactttttgccattgcactcgttgttgtcgtttttgttggccaattcgatttttatgggttaaagcgacgccaccacctgctaactctcaaattgcaggtttcagatacaaatgtatctcgcagtttctagttttaaaaacgccagcgattagccaatctcatagtaaaactaaaatcatataaatgaaagatgattaagatccaatcaaaaataatgtttacagttgtaaacatcacatgatttgtcggggaaaattgatatttttatatttttaacgagtaattagctgattaataccttatgattgaaagatgattaatttaatgaataactatgacaagaatggctttatattggcgtaaaatatatataatatttcgctgaagaacatataaaatacataaatttcggatgagtcatttgtcaaattcccttcaaaaataaatgaatattttgattggaaaattgaacgtttcaagttcaatgatcccccggccagcggataactttcgtttgaggaaaacctttccaattgcaatccatccataatctggctgggatctgccgcctggcgagcttgacccactgcatcggctagaaagtgaaacatggtcatagcaacatgatggggcggcctgggattacctgttgccccgttgtgcgaaagagagcgcggcaggaagaaggaaagagacggccagctgtcggatggtgggggaatctactgtaattttctattttcaagtatcgaatgcgttgcgctgtcgccgctgtaaatgttgcccaacaactttctatgaaaaaattcacttttcctcctatgaccaacaacaacaacaacaacacctcaccaccacctgcgtctcaaagtctacgaagttaccaagtgttttgggggtccaaagccggctttttttttttttgtggggcttttagcaaatcgaactcgaacaaattaacacattgccccgtcgctaaaacaaaagggaaacttcagtgaaagaaaacccgtttcggatcgtaccaatatacatacgaacatatatagtttttttagttatttagaaaagccaaaaagaagcgataaaatgatgattgtccagatggaagtcgtcgcattttgaattcccagcgcattgaatcacatttgggcttgggctggcaaaacacttgttcttccgccatcatcaccatcatcatcatccaaacgaatcaaatccaaataagtctgagcggaatgtaaacacattttcaaaagccaaacaaaagccaaatgaaaacaattcacacccgaggaattcgactaataatccgcaaaagtgtcgcattttcggcggctacgatttttatttagatcctatagtgtttcatttcggtgcaattcgtcgccattcgccctttatatacaggtatttatttttctttctcggaaataaggtgtcgatttatcaaaatcgcaatcagatgtctagaaaaaatgaagtatttcgttattatggctcacataaatcaaacatcaaacgatggcagttttttatttttatttttaagaatttccttaccttcaagatatgatataaaagctttgaggaaatgattgaacatttatctttagttatatactcgtactaactcagctatcatcagagaaatggttataaatatctcagttaagatagtatgtatcttttcgaactataatcggaatttccactaaataaagcgttccaaattgaaaaatttgatcgtgtgtgtatataatatggcacaacattggcggcgatcgcaggtcacaaagagtcgtgattccctttgtcatatcaccagaaaatagatataaaacatcaaacacaacaatgtgggagagaagttgggaagtcgaaagaaaaaagtctataaatgaattgacaaatcaaatgcaagcaggtcgctgctattacatgatgcgaaatccaagttatgctataattctgcattgtttggttttttttttcttgttgtagaggggaaggggggggggttggggatcttaaaagtggaacagcgccagttggtttgttagatttcagtctccggtattttttttttttttttgcccggttgtttgtgtttgatttttcgaacgtttcgcatatttcccataaacctaattaaatgcgtttgttcgttcgtttacgcaacgcatacgatttgtgtcgggattgcgtgccatctatatatatgtacatacatacatatatatatatgatatatatatatacagatgtctgcgcatataacacggatatagagacacatagagacttactatactcgtatatgcatctgggtcgggcgggtcaccgcccaaaatgcaacatgttgtttttgtgggcgtggcggggcgggcggtgtgcgcaagagatgggcatgtagatgatttgggacagctgcagcatgcggaagctatagcctaaacgggacactcaaaaaaaaagatgttgcacttgcaattggttttatagtcactgaaatttgaaatggttacgttttaagaataacaaacacaattttttttaaatatttgattatcaatataaaaatcacttgtatacttttttatgtcttaaaaggagtttattaattgcatttacgatttgtaggcaaatagtactaaatatgacacaatatcagaacaattgaaaagtttattttattagtaattgatatacacttttacttcgcgtgcaattcaaataatttaagaaccattctttacagttttttctgtaaatgcatttcgaaggcgtgctgccacgcccccctctttgcttgaacaaaacaccaaccgcatgaaaagacacatttctttcttgtggtttagctggcgacaatggacaagggaaacagcttgacttcccctcactcaacaccacccccaccccgcgccccatcgattttccccctcaacaacaagaacaacaacatccacccccctccccccttgctaacacccacacaaatgcacagatgacgcagagagcataaattattttaaattagttttaattggcaatgtctttacgttgcgccttaacatttaataattcaatttggtgcgatgcgttttgccatcgcttaagctgaagaaaaccacaaaaataaacaaaaaatatatagtgaatcaatccgaattccgataagtgagtgaatgaaaaactcaactggaaatagtgggaattgtgcaagattcgcgatgatgtcattaattatgcgcggtgatagcgaaatgaaagaaaaacacagctcgaagatgtgagaagttgtcggcatggtaatgagataatttcaattagcataccattcttattgtcagctaatacagtgcgtttcgcggcggtaagtcgatcgcggctcaattggaaaattaaactaatcgttgtgaatcgagaatttcaatcgaagtaaactgattgaatgattgaatgagcagtgttaaagagttaattaatggcttttgcttgttatcatggatgtttatttgagtatttgttaattagttgttaatttatcaaataacatcaataaatatattgactcacttggtttcatttaatacatatcttgaatcacttatgtacattttataaatttatctaactcttcccaatgaaatacaaattaatcagcaccaaaacattcccattctgattttgttcagaatatcaaacttttaactggggttgtgaattttcaaaaaaaaaaacatgctaaagggtattaagttaagattcaaattttcacatttcatttgtatacaattaatgcgattgcaaattaattatctccttattgcgttgcgaaattatattgattgttcttttgatttatggtgcccattttcccatgcttacaactgatattattccggaaaatatttgcttaattatatgaaacgcactgtaggtcttgggaactatgtgttcgacattcatgacgagatgaggtttacgtggaattaaatctgtcagttgtatcttatctttgtggcgcatacatacatatactcgtatctacatatacatatacataaatgcgaatgccacggcgaaatgcactgcgaaccgaagataattcacagattattcgaattattcaagaaagaaataagaaaacagaagcaaatgtcatgttcgagaagaaaatattcacagtacattttttcataagtttgcttttcaataaattggcaatgcatcctcttattgtctagcatttcagattgagttcgccaactcctttttccttctgtgtagaattattgacggaaaatagtattggtgtggtaagggggggggggagagaggggtgtgtgggggtaagcatcgtaaacacttgtttttccacgttttccacgctcagatgccagctgatggccaaggtttgtgtgcgtttgtccgttggccaaccgcaagtcttcgctcgccccctcgaacccccttctaagctccacttttcagccaccccccccctccacctaccattttagcccctcatcatcacctgttgccgtgtgcagaaaagaaaaaccgctgacacagtacattgaactcgagaactcaaaaagcgagaaattcttatgcaaaaagcagcaaacacaaaaaaaaaataaaaaaaataatgtgaaaaaatgagaaaatttataataaagaaacaaacggccaacgaacgttaaaaaaaaatagagaaaaaattaacgcaaacttgctgagcaacgacttcaatttcgcgccctctctcttactccacatagccccgtctctttctgaagcttcgacgtcatcgctccgctcgactactgcagttgttgttgttgttgtcttcacaattacttacaatatttatgttaaatgggcagacggcgccggacttgaaaaatacactcactcgtacgtatgtacatattgtatgtgaaatgattcgccgcttaaataggaaaaaaacagagaattcaacgaagtcaaactttaaatacactgaaaggaatgcagtgtgccagggataatcaaaataattcagcttggaccttattattttaaatgtacatagattttgcttgaattgcgacaagtttaaatacatgtttattttaataaatgtaaattacatatctcatgtaaatatattttgtagaattttcaagagtaagaattaaatgtatctaaatcatgatatttggcttttgttaattttctatgattagttacgaacttataagtacgactgtgcaaacttttcgagttttctgtgtaatccgtgttacgcccacatctccacgaagctaaacttcaaattaaaatcatttttgtagctgcctcacattgttatctcatagagagaggaggaaaataagaagaattgaagaaggagaaagcatgaagaggacgcaaactgagtgaaacgaactttgagaactcagacacgcaaactgaaaactgaagaggaaaaaaaaaacggccattgaatcacaatgcggttcaacttggctaagcaattctcattgtttttttttgttagcagctactacagcctcttcttcttcttcttcttcgtcttccaactacacccattagataaattctaatgcatataatttgcacattagaaacggcatcgcagtccaaaagttgcaattgggactgcatttgcgattgcagatgcataaatgcataatctaatctagtttgctggtgcataattagaaacacgcatgcgccacattttctgcgaggtttttggcacaattacatggcatctacatgacgtttgacggtgtgcaattttggatttggtttttttatgactcaaagtgcagttgaaatggctgttagttatatgtttcaaatccaatccagtttgcagatcagtcattatatacttacatttactctacatttgagcgagtgagttgcgtgtagataacacgactatgtctgctagattgtaaacttacacgaattttacatttgctataggaaataatgcctataagtaggcagcacttttccaatagctgcttaaggcattcgccaacaggtggcgccacttagtgataatgcggctaagatttaaaagcaagatttaaaatttatttaatgctcatactaaaatgttttttatttttttttttgtacagaaaccgagggagaactaactcgcctgatcaagacgcttccctggggtcctttatactgcgtgctgcaacaggacgatcagacattcaccgcctactgcagcgaggagatttcggtgagcactcccagattgtattgatagatattctaagatatagataactaacacacacacacacacatactcaaacacccagtaatacagacatctaatcgctttgtaattgttaacataatcaagttcattggctttgtattttcgtctgtgtatatctatccctgtctctcaccactgcacactatcgctaaccaatatggatgtaaacaaaccgctactactactatcgttctactaacctgtagatattcccggccacgcccaaaaaggaggtgggtagcgcaatacgatgcggaactggaaaaccgcccatcataatcgaaaagacacgttactgtttccgtttttgaagtcatcggttattcaattgaattgcggacagttatttaatgtgcaagagaagaatgtaaatgtaaaatctaaaagcttagatcgcaatatatcttcgaaactaaatggaaatttaaatacctaaaaactagattaaatctcagtaaaatactaattcctaacaatttatattttttttgtctatatgtcttaaaatttcgacttttaataacataaattttaagtattgtttttgaagacatacaaaatgtagacagcttagaaaaataccttaaacttgtgcttaaaacggaaactgtaatatgtcgtatattttccatatttctgggacaccatgcttattattcttacaatctccttgatcttcagctaggcgatgtttgctacgaggacattccaagggttcggttggaccgagttcgtcgtcctgcgaaggctttgtgggacggaccgccgacgttggtcgaggaaaacgaggattcagattcgtgtgttgggggcagcggcggcatgagtggcatcaacgacatcgtcctgaatacgacgctctacagtgaactaggtaagtaagagcctatttatttcaaaaaagatgaaactgttgtgttgttttgcaaaactctattaaaatgtcaccctacctttgtctatttttggctaaagtattttaaggaaaaacaaccttagagtttagaacataaagagttatttaagtgtgaccaagttaaattaaaaaaggggcaatgtaggatattttaaatattttcaatacaatatggcaattctcttgagtgtaaagtttaaaatagttattacgggatattttaatgtttgcgatattaagaataaataaatgactccttttgtggatatatcttaaacaaagaaccaattgctcaggatctgttgaaacgatagcatttcacttcggaaggaagtgatacttcgctaacccgatactggtatatcaccctattcaagcgttatgcaatatacatatgtacatatatggcttcgcgtcaggtggatttgatttgattttgttggtgtggtcaagcggggctttaattgcatttgaccggcaagcgggctcatcagtgctcatcagtaattgcagttttattttttgttcatgctttgctgtgggtccgtaacacttttcgatcgtatctagaggtgtgtgtatctgtgtcttgggtttttttttctatgcattctgtgtgtgtgagtagtcaggaaatttgtttgtatcgtcacgcatgccggagcattcggcacaatggcgaacgggaggtggtttcggcttggggtgcttgcagtgggaggggtgggcggtttttggttttgggcccatgtggaaggtgccgtccgtgcagccgacacttccgtcgatggcgagatcgtttcggttctattgctcgactgtgtgtgcggcaatctataatataagatgtgtggctcattaagaacggatacattttaatccccccccaaacatttacatttagatcccaatgtaaagcaatacgaaacgtcatttcaatggatgcacatagtaagtcatccatct

SEQ ID NO: 12488 - DNA, 648 bp, DROSOPHILA
aatcgccataaggcacaagtgcaataaaaaccataacaacaacaacaacagcaagaacaaacaaaatcaatattcaaattaagcagcagcaccaacaacaacaactcaacgagccgagtcgataagctaaacgataagtgcgagagccaaaaaggggagaagagcgctcgacagagagcgcgcgagagaaaagccgagagagtgagaacacagcatccacccaaaccaaatccacaaaattaccacccccacaaaatgggacgtcgaacgtatttaagccggtcctcaacgatttcctaccccagcagaatcgaaggatggctggatgtctgcgaaaccgagggagaactaactcgcctgatcaagacgcttccctggggtcctttatactgcgtgctgcaacaggacgatcagacattcaccgcctactgcagcgaggagatttcgctaggcgatgtttgctacgaggacattccaagggttcggttggaccgagttcgtcgtcctgcgaaggctttgtgggacggaccgccgacgttggtcgaggaaaacgaggattcagattcgtgtgttgggggcagcggcggcatgagtggcatcaacgacatcgtcctgaatacgacgctctacagtgaactaggtaagtaa

SEQ ID NO: 12489 - protein, 130 aa, DROSOPHILA
MGRRTYLSRSSTISYPSRIEGWLDVCETEGELTRLIKTLPWGPLYCVLQQDDQTFTAYCSEEISLGDVCYEDIPRVRLDRVRRPAKALWDGPPTLVEENEDSDSCVGGSGGMSGINDIVLNTTLYSELGK

SEQ ID NO: 12490 - DNA, 4788 bp, DROSOPHILA
gtttatagcttcgcaaaattgtgcattaatattttatgtatttaaagataagacacttgcttgaagctttaaaaatgcgagcacttaaatcatttatgaataatttgagtagcaaaccaactatcagcctcaaaagttaatacacagataattgcttaatatggagcataaattaatatttggtgtcacacaaatcaggtatgaaaaatgtttctggagcttaattgattttttaataagcgcatgcaggaatgtgtatttttttaattatttcccaaatagtgatgatgtatttataattcaattaaggtggaatttacataagcttaaatcgatactttcatgaatggaaataaagtcgaatttactcaggtcactttgggtctctgatatcatcaacttacgaccaaaactaacttttctgccgcttcttatcattgcaggtatgttaatgaaaccccagtctcagcaagtcaatatccttgccagacaaacaccaaacaatgaccagaagccaagagaaaactaacctaatgaatttatgtacggggtgaaaggtgaaaacgcacaaggccagccaaaggctccaactgaaagtacttaagcccataaaatattcagcctgtggacatgtggggaaaattacaaagaacgctcggaaaaggcgcacgaaaatccagaataggggaaaaatgggaggtgggaaatagatggactgatggaaggaccctcgaccaagtaacaaaatcttaaacggatacataaggaaaataaagaaaatattatttttttttttaatttttgcaccttttaaaacgagttttcatttgattgatatgttaaaagctgagtttttctacgtttcaatattgagcttgtgccattttatacatataaacattttccactacctatattttgcgtgtacttctttaaacttatcaagtgctcggtttcagtcgcacaatttgccactgtagtgtagataaatggagggaacatggagatatggggatatggggccttgctcctgccctcgggaataggcagccagccactgattgaaaagaaaattacggcaagtagtcggttgggtggccgccagatggtctccgcatcgacagcgctgctgatgagcagcataaatgtcctgcggagagacgggcggaaacggaagcgaatggcgccgccattgggaccagcggccttgagttccggaagtggtaagagccaaaggaccgggagcacacggctgccagccatttgcatttaggagtacacatagatacgtacgtatgatggcaactgtttcccacagctccacagagcaggtttctttttcacatttactgtggagtttgtaagccactttgaagtggaagtatagctcgtatacagattctgggaaataaaagcaaagcaagcgaaacaaattaaatagcagatatatatgtaaaagtttaatctcaaaaaaaaaaaaaaacacgagtctgctgcttgccaagtattcaggtagttgaatattgtgcgatcttaaagttttaagaatgggtattactcgacttcattacattcaatacgttttcgttacacataaattgtgtaacaatttccaactttttttttcgtaataaacccattcttgttataagaagctaaaaccatttgatttttccactgtgccgacactggagcagcccgagaactttaaaggcgcagaggagaagcagttcgggtggcacgttgtggatattaagcatgtccttaagcataaaatgtcaataagtgcagccaatcgatgctaagcagtttaagttgcgacaagccactgaggcaccgtctcaatccgagtcctttacgtccttcgatatttccactttccagcaggaactgcgctaacaatgcaaaggacacggaaaagcacaatcaccctcacacacacattcaaacttatctttatgcatgcgtctcatatttttcgataatcgtatttgcgaatttttgttacaagttacactaaaaaaaaatacattacatttgacatctaaataaaacaaggcaaagaaaaatattacattaaaaaccgaaacattttcataatagatttgtactcttaaccgagcttcgacgaaagttcgataaacattaataaatttctactttatcgcagtatacatatcttttatcttatatctttcttttcggcttatctttttttgtctgcagaattttcccatcttagtgaaaagtagtacagaatatgctagtgttttttctgtacttaagtttactcctacctggttacattttggtagcaagcaacttgcgtaaaagtacatatttagtttaaataaaattgaattcaactgctgacttcgatatcattttaaagtgacatactttaccaccgtgtaaaattcaagttcaattcaactttatcaattgagcaattgaaagggtttcccaaaaacgattttggcaaaaacattttgagtaatcgacacctttcttatccgcttgtcactcatccgaaacatttctaatttcattgtgaaaatatgtttgcccttatcagcttgtttcgatatctaacaacaagacacgacaaaaatccaagataagtggctgtacttaaatgtagcaatagattgggaaacgagttcagtacgcgtttagttccggaacagttggcggtcttaccaaaatgagaggtactaaaagcggagtgatgaatgacctgagactaaagatagctcatcgtagttccgccatgtggattccatttgtgtgtcattttggccatagtcgcggagattagaggattttcgatggaggacaagtgcaaattgtgggctggaactggctatattggtgatcccagtgattgccaggcctggggatattgccaggacaacaaactcatcgatagacgtagctgcactgaaggattactatacagtttccgagatggcacctgcaagagggcatccgatacgatttgtcattcccagctctcggagatttgcgccagcctcgagccttggaattacgtggccaacccagctgattgtcggagattcgtcaagtgcgcggatttggatgatcccacttggggcgactgtggtgtgggtcaggtgtttagcaacaagaagcagacctgcctcgaggaggttgccggctgtccacaggataatatctgctcccatatgaaagatggctcctttgtgggcgatcccaagagctgtcaaatctactataaatgccataatggatttggcaccatgttgaattgctccgttgggcgatactttaatcgcaaaacgggtaattgccaatcctggatgccgcattactgttccaaggatgatgaggataacatattaacgccaccatccacggaccataatatctgctccaagtattatcaacgggatagagatggagtgcaactcctgccggatctgatgacctgttacggatattactcctgcacatcccagttcgacgtgggcaagtggagcagctgtccttggggactgcactttgagtggtggagccagcggtgtggctcgccgaaagacaatagctgctcctacgatcgctgcgccaataggaaccaactaatggtggccaccattaacacgggctgcagggagttcacgatctgtcaagataatcgttcgaagagctcgcaaaagtgtccggaggactatccatatttcaatgagctattgcgacagtgcaccgatgaatatcccaatcatagggtgtgctacatggatggataaattaaataaattaataatattccactaataattaacaagaaagtaagtaagtaagagggtatgctagattcgttgaaaagtatatatctatatattcttgatcaggatcaatagccgactagatatagccattctaggcattatggttatcaatatatatcgatatcaaatactttatcgtgtggaaaacaaaactcggaacacaagaactttaagaatgttatcaaaatgtaatacgagaaactattgggattggtgatcatattatattatatgtatattcgatattttcatttgtgttttcatagtgctcctagctacataattacatcaaagagcagccgtgaatgaatcgggtaaatagcgtctacttcgtggattaaaacctatatcatgagcttatcaagagcgtcgtcaattctaaaacttgatgcctgcagctgtgctcatgatcacccccttgggtgcaaatcaactccatggcgtctatgcattggaccaccaggtggctaatatccgatttctcaagcgacatttgaatatcatgttttggccgtgtacaatatattataaccaagttgttccgagtacattgtatatgaaataaaatttggtttgtgatgatcaatggagttgatcattattcagtaaaggcattcgtaaattgcttgcgttacatatgccattacttgaaatgataacgattaatgatagcgaaaagacaccaatgtgagaatggattcatgatttctgtgtttgtctttctttctgctgaatactgctcttcaatgaatgctattcatgtcatcagtgattgatcagttgactaatgataactaattatgtcaagtgctgcccatctgcttttgcattcagtcaagcaaaagtgaagaatcaacttgaaccaaagacatctttcagttgaagtcttcgtgccagaaaatcaaatgaatcaacgaaaaattgaaatattcctccgagagctgtatttatgaaagtg

SEQ ID NO: 12491 - DNA, 1206 bp, DROSOPHILA
atggagatatggggatatggggccttgctcctgccctcgggaataggcagccagccactgattgaaaagaaaattacggcaagtagtcggttgggtggccgccagatggtctccgcatcgacagcgctgctgatgagcagcataaatgtcctgcggagagacgggcggaaacggaagcgaatggcgccgccattgggaccagcggccttgagttccggaagtgtcgcggagattagaggattttcgatggaggacaagtgcaaattgtgggctggaactggctatattggtgatcccagtgattgccaggcctggggatattgccaggacaacaaactcatcgatagacgtagctgcactgaaggattactatacagtttccgagatggcacctgcaagagggcatccgatacgatttgtcattcccagctctcggagatttgcgccagcctcgagccttggaattacgtggccaacccagctgattgtcggagattcgtcaagtgcgcggatttggatgatcccacttggggcgactgtggtgtgggtcaggtgtttagcaacaagaagcagacctgcctcgaggaggttgccggctgtccacaggataatatctgctcccatatgaaagatggctcctttgtgggcgatcccaagagctgtcaaatctactataaatgccataatggatttggcaccatgttgaattgctccgttgggcgatactttaatcgcaaaacgggtaattgccaatcctggatgccgcattactgttccaaggatgatgaggataacatattaacgccaccatccacggaccataatatctgctccaagtattatcaacgggatagagatggagtgcaactcctgccggatctgatgacctgttacggatattactcctgcacatcccagttcgacgtgggcaagtggagcagctgtccttggggactgcactttgagtggtggagccagcggtgtggctcgccgaaagacaatagctgctcctacgatcgctgcgccaataggaaccaactaatggtggccaccattaacacgggctgcagggagttcacgatctgtcaagataatcgttcgaagagctcgcaaaagtgtccggaggactatccatatttcaatgagctattgcgacagtgcaccgatgaatatcccaatcatagggtgtgctacatggatggataa

SEQ ID NO: 12492 - protein, 401 aa, DROSOPHILA
MEIWGYGALLLPSGIGSQPLIEKKITASSRLGGRQMVSASTALLMSSINVLRRDGRKRKRMAPPLGPAALSSGSVAEIRGFSMEDKCKLWAGTGYIGDPSDCQAWGYCQDNKLIDRRSCTEGLLYSFRDGTCKRASDTICHSQLSEICASLEPWNYVANPADCRRFVKCADLDDPTWGDCGVGQVFSNKKQTCLEEVAGCPQDNICSHMKDGSFVGDPKSCQIYYKCHNGFGTMLNCSVGRYFNRKTGNCQSWMPHYCSKDDEDNILTPPSTDHNICSKYYQRDRDGVQLLPDLMTCYGYYSCTSQFDVGKWSSCPWGLHFEWWSQRCGSPKDNSCSYDRCANRNQLMVATINTGCREFTICQDNRSKSSQKCPEDYPYFNELLRQCTDEYPNHRVCYMDG

SEQ ID NO: 12493 - DNA, 4701 bp, DROSOPHILA
acttgaggggtaaaagtatgcacatatattagactcgttgaaaagtatgcagcaggtaataggatgcgtttccggcccaataaaataataatgaacgttatcaaaatattaacccttccgtggtccatggtcaaagtcggtagttatgtatactttgccttgaaccaaacccaatacgtcgaactatttccaaacatgagagctcagaaagatcaaatgcacccgtgactttgaagaaagaaatagtttggggcacctgataaagctacaactaatgtaacagacatgcttatcaggtttataaggccaccaacctccgtgaatttggcttggtgaaagcaggactgtatatgcacgaatttgattggttatgatcgattatgtttccaaagttgagcgtctttacaaaaatttaacttagaatatgttccagctgatctagtttatcgaatttcatgaatgatgtatatggatcggatacttaacctacatataatcgcaatcaactttacgatctgatcttacatacttaatcaaaaagtaataaatgtcaccaaaaaatctagcgatcaggcacacgcgtgtttaaattaccggcaatgtttgataagaaagtaatttgcagaaaccgattgggcaaggacaaggacaaggccgttaaaccccttagcacctcatatcccaatatgtatgtactgttattgtttacttcagatgaatacttccatttgtcggccgaattgttagccatcgataagataatcgcacttcgacccccataatatgcaaaaacaaaacattcttgaatgatgttaatcaaaattataaaatacgtgattatatttgaagccatttccgatgttgcacagtcacgttaacgtacaaaaaaccgggctaatcaaaagtgcccatatattactaatccttatcgcagaccagcaccagacatcgcttataaaaagggttgctctagtccagatgccaattattcggtagttgaatgtccacagagatggccaaagtctcagtagtagtacttattcttggcctggccgtaaccagtgccctcgattttggtccggaaataaatgaaggcaacgaactagatgcacaggactaccagcgtctgaacaaagttcgtcatttgtcggagcagttttttagttattacaaaaatgttaccttggatgacttggtgcccgaaggtcgacttcccacagtctcagatcttcagtgctatgcggactttgctcagctaaccgccggattggccagtggcagcctttgggcctacagaagtaagtgggagtcagtgggagagtgagtgaacagagatatttaagactttctgcacagtgattgactcctggggatccataccctcgggcatccttaagggtcatctcaaggacctgggtcactacgacgagtgcattgccatcgaacagtccgcggcgtcgggctcgactctgctgggaaagtactgcctggccagtctgccgctgcagcaactgttgggaaacgttggccggatgatgaatgtccagacggcggtttgttttcccgcttcctgctcggccaccaatatggacacacttctgcgacgagtcttgaagcaattggttggcttggaactaaactcaaaccagaatctggtcagtgaaaactcctgcaagacttccgagcgtgatgcctacgatggaggtgccattgccgcaatgtaagattcctttttacattgcttttgctgacttaaattacaatcctaatttacagcgttattttatccgtgttcgggggcgcagtgattatttctacattttacgactacttcctgtgtgcggatcaaagtaaatagactgcattttttttttgcagtataagtgttaatacatatatttgtagataaactgcctgctattctgaaggttttctctgcacgtgctaactcacgatcacttttccgcatcaccaccaaacccaatcccaatgtgattgagtgcctccatggattgcgaggaatgtccttgatctgggtgtgcttcggtcatgactttatcatatccatgacatctccgaacatcaacctttatgacgtgtatactgtgcgtagcgagaaatccttttaatcgcgattagattgctaatattagttctttctcagtgggccaagacaccgtttaaagatataattcaggagggtgtttttgcagtggactcatttttcttcattagcggactgctggttgcgatggtggccttgcgttcgatggaaaagtaagtcgcctatccaatttatacccgttccgttccacagtctagcataattatagggccaagggaaagctgaatattccactgatgtacctccatcgctatcttcgcctaacgcccatcgtggcagtatcaatattgctctactggaagttgctgccccatttgggcgacggtccgctgtatggcaactggaattttgatagctacgataggtgcgaaggtaactggtattggaccctgctctacgttcagaactacgccaccgattccgaggtaagtccgcattcgctgtatggtcgctattggtgataactattccttctattctaacagtgtctggctcacacatggtacctagccatcgatacgcaactgtatatcattgcacccatcctcttgattattgtgtacaagtggggcaagaaaggtgcagcagtcgttctgctgcttttgttgggtctcactgcctatcttttcagcattatagtgattaataattactctttgtaagtattaactttagcattggagcagaatttagtataacttttaaccctgactacaaacatttaggatcagcggcggaggtggtgggggaccagatgattactctgaagacctcgatcactatacccacaaccgggcttccggctggctagttggtttcctgttcggttacttcctgcatacgatccgtggaaaagcgatcaagctgagccgacctgctgtctggattggctggatcacctgtttggcctttctatttacctgcatttttgcgatgtatccttatggaacgggcaagagcaaaacccttcccacccttaatgaagccttctacgtatcgctctcccggatcgcctggccgttgggtctgagttgggtggtctttgcgtgcatgcaaggatatggtggactggccaactcgttccttacatcaccattgtggcagcccctgtccaagctctctttctgcgcctacatgggccatctgtttattcagaaccttaatgctgggcgcacgagggtgaacacctacttctcaaactacgacattgtaagttttatcagtttttcctttaaagttatcaactgcagtgttttatgttccttaacagatgttgcgtttttggcaagacttcgggttcacggtcctactcgcttatgtcatgtacattttgatcgaagctccttgcggtggactggagagtctgatcctgccgaaccggagaccagctccccagccaaaggtgcaggctgctgaaccatctaaagaggaaatcccatcacctgttgacctcgaaaagcaaactccagaatcgagtgctgccatcgatcttgcaaatgacagcacattggcaacagctcctccattagaaggcaaaactcaactgcaggctagcgaaggaaacgaaacttcttaggcaaatcgaacggacaaaaattaatatagaatattatttatacttacatgtagtattaaaataaaataatgaaaaataagtttttaattaaaatgcttgtttagattatctgcttgccaataccaaacgaaatataacaaattaataagagaaattaactaagctgcagagttataataatattttatgttactatgctcatataagtaaagtccagggatcgatgaggattgatctaccctatacagactgcttattatcgaatataatttacataaatccattccccacagatcctaatcgatcctcacagatatcctaacttgagcatagttttcttaacccaatccaatcccaaatggaaccaaggaatccatcaatcaatcttgctaaaacacgcattatgagcatgaaggcttgcgtgtttagtgaaataaaattaaatacataatgaatatgcggtttatgcttaagtgatgctataaaattaaaacactgaaaaattatgcccaattttgtaaaagatctaagaaaaacacaatgagtccaaattcttatattaataacttaaagaactaaatttatttaccaattggtttattgactccttttttagttcgaagaaataaaacataagtgcatagcgttaaaatgataagaataagtgatttattgttggtaaatagctgcgattagttatggtactcaaagccacttgctattaacaaagttgttctgaattatggtagccccttaattgagagcttcgtaagaccttttaacgttaaattagcgattgtgttgaaatggtattggtaaagtagagggtaaagtctctgcatgacaaggatgttttacaaaaatataggaccttaacatatttttaaacatccataactccaactctcatttctcttactttttgaagtaaatcatttatgcatttttttggtttttgtcccgttagcttatgatcatcgaactagtatcctgattgtca

SEQ ID NO: 12494 - DNA, 2160 bp, DROSOPHILA
atgtccacagagatggccaaagtctcagtagtagtacttattcttggcctggccgtaaccagtgccctcgattttggtccggaaataaatgaaggcaacgaactagatgcacaggactaccagcgtctgaacaaagttcgtcatttgtcggagcagttttttagttattacaaaaatgttaccttggatgacttggtgcccgaaggtcgacttcccacagtctcagatcttcagtgctatgcggactttgctcagctaaccgccggattggccagtggcagcctttgggcctacagaatgattgactcctggggatccataccctcgggcatccttaagggtcatctcaaggacctgggtcactacgacgagtgcattgccatcgaacagtccgcggcgtcgggctcgactctgctgggaaagtactgcctggccagtctgccgctgcagcaactgttgggaaacgttggccggatgatgaatgtccagacggcggtttgttttcccgcttcctgctcggccaccaatatggacacacttctgcgacgagtcttgaagcaattggttggcttggaactaaactcaaaccagaatctggtcagtgaaaactcctgcaagacttccgagcgtgatgcctacgatggaggtgccattgccgcaatcgttattttatccgtgttcgggggcgcagtgattatttctacattttacgactacttcctgtgtgcggatcaaaataaactgcctgctattctgaaggttttctctgcacgtgctaactcacgatcacttttccgcatcaccaccaaacccaatcccaatgtgattgagtgcctccatggattgcgaggaatgtccttgatctggtgggccaagacaccgtttaaagatataattcaggagggtgtttttgcagtggactcatttttcttcattagcggactgctggttgcgatggtggccttgcgttcgatggaaaaggccaagggaaagctgaatattccactgatgtacctccatcgctatcttcgcctaacgcccatcgtggcagtatcaatattgctctactggaagttgctgccccatttgggcgacggtccgctgtatggcaactggaattttgatagctacgataggtgcgaaggtaactggtattggaccctgctctacgttcagaactacgccaccgattccgagtgtctggctcacacatggtacctagccatcgatacgcaactgtatatcattgcacccatcctcttgattattgtgtacaagtggggcaagaaaggtgcagcagtcgttctgctgcttttgttgggtctcactgcctatcttttcagcattatagtgattaataattactctttgatcagcggcggaggtggtgggggaccagatgattactctgaagacctcgatcactatacccacaaccgggcttccggctggctagttggtttcctgttcggttacttcctgcatacgatccgtggaaaagcgatcaagctgagccgacctgctgtctggattggctggatcacctgtttggcctttctatttacctgcatttttgcgatgtatccttatggaacgggcaagagcaaaacccttcccacccttaatgaagccttctacgtatcgctctcccggatcgcctggccgttgggtctgagttgggtggtctttgcgtgcatgcaaggatatggtggactggccaactcgttccttacatcaccattgtggcagcccctgtccaagctctctttctgcgcctacatgggccatctgtttattcagaaccttaatgctgggcgcacgagggtgaacacctacttctcaaactacgacattatgttgcgtttttggcaagacttcgggttcacggtcctactcgcttatgtcatgtacattttgatcgaagctccttgcggtggactggagagtctgatcctgccgaaccggagaccagctccccagccaaaggtgcaggctgctgaaccatctaaagaggaaatcccatcacctgttgacctcgaaaagcaaactccagaatcgagtgctgccatcgatcttgcaaatgacagcacattggcaacagctcctccattagaaggcaaaactcaactgcaggctagcgaaggaaacgaaacttcttag

SEQ ID NO: 12495 - protein, 719 aa, DROSOPHILA
MSTEMAKVSVVVLILGLAVTSALDFGPEINEGNELDAQDYQRLNKVRHLSEQFFSYYKNVTLDDLVPEGRLPTVSDLQCYADFAQLTAGLASGSLWAYRMIDSWGSIPSGILKGHLKDLGHYDECIAIEQSAASGSTLLGKYCLASLPLQQLLGNVGRMMNVQTAVCFPASCSATNMDTLLRRVLKQLVGLELNSNQNLVSENSCKTSERDAYDGGAIAAIVILSVFGGAVIISTFYDYFLCADQNKLPAILKVFSARANSRSLFRITTKPNPNVIECLHGLRGMSLIWWAKTPFKDIIQEGVFAVDSFFFISGLLVAMVALRSMEKAKGKLNIPLMYLHRYLRLTPIVAVSILLYWKLLPHLGDGPLYGNWNFDSYDRCEGNWYWTLLYVQNYATDSECLAHTWYLAIDTQLYIIAPILLIIVYKWGKKGAAVVLLLLLGLTAYLFSIIVINNYSLISGGGGGGPDDYSEDLDHYTHNRASGWLVGFLFGYFLHTIRGKAIKLSRPAVWIGWITCLAFLFTCIFAMYPYGTGKSKTLPTLNEAFYVSLSRIAWPLGLSWVVFACMQGYGGLANSFLTSPLWQPLSKLSFCAYMGHLFIQNLNAGRTRVNTYFSNYDIMLRFWQDFGFTVLLAYVMYILIEAPCGGLESLILPNRRPAPQPKVQAAEPSKEEIPSPVDLEKQTPESSAAIDLANDSTLATAPPLEGKTQLQASEGNETS

SEQ ID NO: 12496 - DNA, 5326 bp, DROSOPHILA
ccgctcgcaaacagtttgtctatttttaaatagaattcaagaaagtattcggggaggaaacgtatgtacttatgcatgaatcacataatcccgattcgtaagagcaaaatataaaggatcggggatgtaattggatttaaacacatttaactacgggacaatggaaccttggaattttggttttactttaggtttccatgggttcgttgctgtcgatcgagacactatatctgcggggtatatctatttatcgatgtacgccgtattatgtgagcatgtatgtatattcgcacgtatgtatgtatatggatgtgagtaacgctgccggctgctacactgggcgcaggctttaacttaaaaattaaatcatcggcgcgagcgatcagttgaagactaaagacttgatgaatcgccgcgccagccgaaagctcttcattacagttgtgctctctggaaagcgattctccgcttctctttgcaccacacaaccaaaagaatctcgtgggaaaatgcgagagcgatccgtttagggttgtcgagcggctcgaactatagagcaaatatgtagaaataaatgaacatgatcgcattcgtacacaaaatgatctttatccttataacaatagtttcaattcgatacataaacagaaattacagaaatgaaaactaatcatgatgacaaatcaataaaacaagaatattaacttgtctgccttggtttatcgtggaaatgttgctgttactaatgaagaaaaactaatgtcgcctcaacggtgaaaaattactaactcgatttatgatccacttttggcataccatacaccaaatctctccttgcatacaagtttaaaaaatatacaaatacaatattgttagaataattcaaacgatgttaacaggatttgacagcggtaggacgattagaccaagttgatcaaatgctcgcgcagaataaatacggaggtggggacaaggacgagaacgaggacaacgagaatgcctatttggcgggcgaggctatggagttgtttagtgaattgtttagctgctcctcctgatccttgtccaagccaagggctgtggtcaacagcttgaccacacatcgctgctcgtgcacctcgcccttctcgttggaagtaatgtccttttctagttttagcttctcttcggcggccatcaggatgccctcctcgatggtactctcggaaatgagacggtaaatggtcaccggacgctgctgtcccatgcgatgacaccgatcctcggcctgtttatcgttgtacgggttgaagtcgatatcgtgaatgacacaggtgtcggcagccgtcaggttgatgccaacgccaccggctttggtggagagtaggaacacaaagatgctatcgtccccattgaagtcggtgatcaaatcctggcggacatttacggcggtcgccccgtccaggcgacagaaaccaaactttcgtattcgcagatactcctccacaatgtccagcatcatggtgaactggctgaaaagcaacacacggtgtccttctgccttcagttttggaagcaacgtatccaggtagaggaattttccagaatcgcatatcaaattatcgggtattttcacgtcgtaaaactcctgaaagatgcacaaatttagtcattgtcattggacaacctctttgatagtcacttacatgcttgttcatcatctgatagacctgaaagtctgacataacggctagctcttcaaagatgtattgctcgttggtctttttaaaggaactggcattagccaggcgcttagagaatccacgtagattggcgtcggtgaagtagtgacgcatcagcaacggatggtttgcaatgcggcgcatctccatcatgatcgctatgccggccctttcgctgctgctgcacacctcgcccttgttattggaataataatcgaccagctcgtgatagtatattttctgttgactgctcatgggcactttttcctttaaataaaaaacaatttaattattgtataatatttattttcgcccgacgtacttaccaccaggcttagcttcttgggcaggttcttaaggacatctttcttaagccgtctgagtacaaatggcttcatgatacgctttgctctctggatttgtgtttcctggaactgtgaaacctcatcctgatctccatcgctttttcccttctgcaaggaacatgaagtttatatattgttttgtgtgaaaccaatctttgttttaccttagcaaacaacgattttatgtcctcaatgctcttggcaaagaatttgggcatcacgaagcagagcagagagattagctccagcagattgttctgcagcggagttccagtgagcaggattcgcatcctagcgtttatggttataaggttagcatagcgttgcgtggtcatgttcttcagcatatgggcttcatcaaaaatgacgtagtccaacttgcaaacccggaacattttcctctcctccggcgtggatcccacaatgtgatatctgttcaaaatgtacaagaaatttaagcttagattcttttatggctttgtggatatttacgtggtcagaagaacatcaaagccggtaaatccatccttggcaaagcggcctcgcattctccttcgctcgtcctgcgagccatggtacttctccaccaccagttcgggacaccagcggctaatctctgcctcccaattatccagcgtggacgagggcaccacaattaaatgtgcagcctggctaagaccattctcctttagataggccagaaatgcaataacctgaattgtcttgcccagacccatttcatctgccaaaatgccattcatttcttgtttgtgcattacggtgagccaattaaggccaattatctgataatcagccagctgtagactgcaagaggaacgaaaatagaaacacaaatggggacatgcatgctggttaaggctcacccgctgctaagaagcttaggttgctccacaatgccagcaccattggaaatcgccttctccagacgcgacaccatgttattgcacttacttagaatagcggccaccgtgttctgtttgttaatcagctcttgagcgtaattcaaaagatcacccgacatcctgatgctctccagcttttggcgcaaatcagaccaatcactaaatggtcgcacatcaatgatggctaatgccttcttctcggacagcgttttaactgactggagttcaattagcgaagcctcgttcataaactggaaaacttttttacgttgccccgtcatcttggtggacatctcgctatcgctgtcatcgctatcatacacctggtccttggactgcttcacatcatcgtcgtccgaatggtcgttatccgagaagttgcctccactaattccgtttgacctgggtttcagcttggacttggccagtggtccattgtgccccttgggcttgcagttctcccttaggtatcgcacggaagcggccacatcccaattggtgcgggaaagagactcctggatggcctacggaacatatttgaaatttatttcagttaaaatcgagatttatgcaaaatattgcattaaaaatgagcaattttaagctataaaatattctgattaattttaaaattcaaataagaacggtgataatgtccggaaatattttatatgaggcacaccaaagtagtggaaacagttacacgagagggttattactgctcccatccccgtcagtgacgcccctggctaacgacagctgttcgcaacgccgggccgaaccgaatcgccatgttccccgaactcagatgcagagacgcgcgtttccccgcgaatcgccccgttttaccttggtggcatttcggccggaaacctaccattgtgtcaaagtggggcgaaatcttggcggctgccatgtagcgctcctccttttccttaacggtcagctccagtttggtcttcttgggcgtctgggagtcgttgccatcgctgtcactatcggccatcacctggatgcgcttctttccaggcacacgctctgaaatcaggcagttagctaccgtgtcaatcgcttggaattttagctcagcaagtaccagttctcgaaggactagcgacgacagaggaagcattcttgttgatgcggaactgacgcagatcgctgaggctcgacttcgcggacgatgaggcggaggccgacgcagatgcggccactgtgctgtccgacatcgtgggacaaggcgaaacgcttcctggcaatctgtcagtccttattaacaaattctgtttgcaactcctacaatcttaagttggtatttgtgaatattcgcatgctagtgcggccgtttgattatcccgataaaacctatttctatttctccaacggaatgcggtcacactgtgcgccaatttaagtattagcttaatgattattattatttttcatttatttttatcgaactgtaacgcattagtgtaagcttctatgagattatctaacaatttgcttttgtatatatcgtatatgatttgatttcgtcaacctaaccgtaagtaattaaaaccgatgccaaaatgaaagaaagaaacttaaaaaaatcccaaactggcggtaaattaagaaagttgccagagttgccagatgttatcggcttaccgcaagcaatcggccaacaatcgaaacattgggacgcgttgcaaccctctctttttttcgcttgctcttgtaggttaattgaaaacacttttattgcaaataaaccgcttgccgagccaagggcaaaccgataaactggcaaacatggctggcggcaacaccccgcgtgtgatccaggtgaccaacatagcgccgcaggccaccaaggaccagatgcagacgctgttcgggaacattggcaagatagaggagatccgcctgtacccgacaatccgtgatgtctcctgtccggtgcagtcgcgcatctgctatgtgaaatacacggacacgaccagtgtgccggtggcccagcacttgaccaacacggtgttcatcgatcgcgccctaattgtcatacccgttctggccatacccgaggagtatcgggccctggagatgctcaagaacggaaccattgtgccgggactccagaagccggactccaagctaccgcccgaagtcattaaccgcatcgagggacagctgccgcagcaagtgatcaagacgtacgaccccaagttggtggaattcaatctgccggagtacccggccttaccctcgttctacgatgcgcgcaaaatcgaggagattcggcgcaccattatcgtgtgcgatgttaaga

SEQ ID NO: 12497 - DNA, 2623 bp, DROSOPHILA
aataccaacttaagattgtaggagttgcaaacagaatttgttaataaggactgacagattgccaggaagcgtttcgccttgtcccacgatgtcggacagcacagtggccgcatctgcgtcggcctccgcctcatcgtccgcgaagtcgagcctcagcgatctgcgtcagttccgcatcaacaagaatgcttcctctgtcgtcgctagtccttcgagaactgagcgtgtgcctggaaagaagcgcatccaggtgatggccgatagtgacagcgatggcaacgactcccagacgcccaagaagaccaaactggagctgaccgttaaggaaaaggaggagcgctacatggcagccgccaagatttcgccccactttgacacaatggccatccaggagtctctttcccgcaccaattgggatgtggccgcttccgtgcgatacctaagggagaactgcaagcccaaggggcacaatggaccactggccaagtccaagctgaaacccaggtcaaacggaattagtggaggcaacttctcggataacgaccattcggacgacgatgatgtgaagcagtccaaggaccaggtgtatgatagcgatgacagcgatagcgagatgtccaccaagatgacggggcaacgtaaaaaagttttccagtttatgaacgaggcttcgctaattgaactccagtcagttaaaacgctgtccgagaagaaggcattagccatcattgatgtgcgaccatttagtgattggtctgatttgcgccaaaagctggagagcatcaggatgtcgggtgatcttttgaattacgctcaagagctgattaacaaacagaacacggtggccgctattctaagtaagtgcaataacatggtgtcgcgtctggagaaggcgatttccaatggtgctggcattgtggagcaacctaagcttcttagcagcggtctacagctggctgattatcagataattggccttaattggctcaccgtaatgcacaaacaagaaatgaatggcattttggcagatgaaatgggtctgggcaagacaattcaggttattgcatttctggcctatctaaaggagaatggtcttagccaggctgcacatttaattgtggtgccctcgtccacgctggataattgggaggcagagattagccgctggtgtcccgaactggtggtggagaagtaccatggctcgcaggacgagcgaaggagaatgcgaggccgctttgccaaggatggatttaccggctttgatgttcttctgaccacatatcacattgtgggatccacgccggaggagaggaaaatgttccgggtttgcaagttggactacgtcatttttgatgaagcccatatgctgaagaacatgaccacgcaacgctatgctaaccttataaccataaacgctaggatgcgaatcctgctcactggaactccgctgcagaacaatctgctggagctaatctctctgctctgcttcgtgatgcccaaattctttgccaagagcattgaggacataaaatcgttgtttgctaagaagggaaaaagcgatggagatcaggatgaggtttcacagttccaggaaacacaaatccagagagcaaagcgtatcatgaagccatttgtactcagacggcttaagaaagatgtccttaagaacctgcccaagaagctaagcctggtggaaaaagtgcccatgagcagtcaacagaaaatatactatcacgagctggtcgattattattccaataacaagggcgaggtgtgcagcagcagcgaaagggccggcatagcgatcatgatggagatgcgccgcattgcaaaccatccgttgctgatgcgtcactacttcaccgacgccaatctacgtggattctctaagcgcctggctaatgccagttcctttaaaaagaccaacgagcaatacatctttgaagagctagccgttatgtcagactttcaggtctatcagatgatgaacaagcatgagttttacgacgtgaaaatacccgataatttgatatgcgattctggaaaattcctctacctggatacgttgcttccaaaactgaaggcagaaggacaccgtgtgttgcttttcagccagttcaccatgatgctggacattgtggaggagtatctgcgaatacgaaagtttggtttctgtcgcctggacggggcgaccgccgtaaatgtccgccaggatttgatcaccgacttcaatggggacgatagcatctttgtgttcctactctccaccaaagccggtggcgttggcatcaacctgacggctgccgacacctgtgtcattcacgatatcgacttcaacccgtacaacgataaacaggccgaggatcggtgtcatcgcatgggacagcagcgtccggtgaccatttaccgtctcatttccgagagtaccatcgaggagggcatcctgatggccgccgaagagaagctaaaactagaaaaggacattacttccaacgagaagggcgaggtgcacgagcagcgatgtgtggtcaagctgttgaccacagcccttggcttggacaaggatcaggaggagcagctaaacaattcactaaacaactccatagcctcgcccgccaaatag

SEQ ID NO: 12498 - protein, 844 aa, DROSOPHILA
MSDSTVAASASASASSSAKSSLSDLRQFRINKNASSVVASPSRTERVPGKKRIQVMADSDSDGNDSQTPKKTKLELTVKEKEERYMAAAKISPHFDTMAIQESLSRTNWDVAASVRYLRENCKPKGHNGPLAKSKLKPRSNGISGGNFSDNDHSDDDDVKQSKDQVYDSDDSDSEMSTKMTGQRKKVFQFMNEASLIELQSVKTLSEKKALAIIDVRPFSDWSDLRQKLESIRMSGDLLNYAQELINKQNTVAAILSKCNNMVSRLEKAISNGAGIVEQPKLLSSGLQLADYQIIGLNWLTVMHKQEMNGILADEMGLGKTIQVIAFLAYLKENGLSQAAHLIVVPSSTLDNWEAEISRWCPELVVEKYHGSQDERRRMRGRFAKDGFTGFDVLLTTYHIVGSTPEERKMFRVCKLDYVIFDEAHMLKNMTTQRYANLITINARMRILLTGTPLQNNLLELISLLCFVMPKFFAKSIEDIKSLFAKKGKSDGDQDEVSQFQETQIQRAKRIMKPFVLRRLKKDVLKNLPKKLSLVEKVPMSSQQKIYYHELVDYYSNNKGEVCSSSERAGIAIMMEMRRIANHPLLMRHYFTDANLRGFSKRLANASSFKKTNEQYIFEELAVMSDFQVYQMMNKHEFYDVKIPDNLICDSGKFLYLDTLLPKLKAEGHRVLLFSQFTMMLDIVEEYLRIRKFGFCRLDGATAVNVRQDLITDFNGDDSIFVFLLSTKAGGVGINLTAADTCVIHDIDFNPYNDKQAEDRCHRMGQQRPVTIYRLISESTIEEGILMAAEEKLKLEKDITSNEKGEVHEQRCVVKLLTTALGLDKDQEEQLNNSLNNSIASPAK

SEQ ID NO: 12499 - DNA, 7551 bp, DROSOPHILA
acccagaataaaatgtttataaggaccatcagatatttgacgcacgaacagcagccgttgagacccatggcgcggattgatattcttaaataggtaactccttaaaaagtagctgcaatttaactggtttttcaaccacttggagatgctctttttccaaggaaccccgaactgcagtgtcgcctgcacttttcgaccttttgcactttttcaaaacacccgctcgattgtactatatttttcaaatttttttaaaatttcccgtgctaaaatccaccgatttgagccactgtttgcgcgattggccgttgcacccgatttgttttaaaaattttatttgtgcatcgaggcgtccgtccaacgtaaaattcttgtatcagtgcgaccattagctcggccgttcaaatataccagcgggtatagaaaggctaaaaaccgaaaagtggtgacccttagaagataccaaagaagtggttgaataactttgatgaggcttagcatggcttgcaacctgcttggatttgcagcctatacgcaaaccaaagtggcctatcgatattttggataagttctattgccaattttcccaataaaataaaaacttcacttgaatgttaaaagtaatttagtttcagtgtttacataatgttcaaataaccttttgattgttattatgaaagttaaaaattaaaaatttagatattctaactaactattatccccaatgtttcagctataatcaccatatttaaagtagatttcattttaaagtataaatttgtggttgtttacattattttaacatgtctatttaattattactatgaaagtgggtaattgaaaattaggatattccaggtttttgatttactttggctatgattttcccaaaatatttaaatctgtaaatgtaaacagtttgaaatgtgaccttaatagttcatgctttgttcattcttctgcgaaacggtcacactgttcgcgcaggcgaaaatggcctaaagcgtgaaatgtttaattcgttgttgtttctcctccgcaatagttactaatagaaacaaatgcaaaatggctgtctaacgtttaagtgcagcgaccgccgaagatcgtggaaatatgcatgaaaagcggctcgcaggcaaatgaaaggcgcgtgaaaatgtagcagacacctttttatcgcgaaaacgaacatcggtgcaaagggaaaaacaaaaaccaaggaaaatacagccaaacgcgaatgtgaatgtgaaggcaaagtaagcgaaaagtcccccaacttttttggggagtatcgagtgcaccacatacgtttttcaatatatatttcgattgcattgaaatcagaaacatgacaatttccccccttcccttattgctgttgttgttgttgtcggcttgttgcaagtttgtgtgagtgtgtcttgtaattttgttacgcagtggagcgaagttggagttttgtggaatggaaatggaatgaagtggaacgaagtggagtgtaaccaaacacgaaatggaaaaacgaggaaaaaaccttaaagcgcagcctaagctttagtcgtactgaaaatttctcaagcgctgcaagccagtctttgccaaagtaaagcccctacctccccccccctctttttgcataataaacgaaaaacgttgcgcccactttacgcacttgtttttatgctttccgcgttcagtgcacttaaaaacttaattggttcccccgtcggcggtgctaatgtagcgcatttcactgttttcaacgtaaatataattatattagcaaacgtttacaagcaagattggattagtaatatgtagtagcttgctagaaatcctaataaaaatgtgaataataatatatacggtttcatttaatattttgaaaagttttaatagaaaaaagtacagcttttctaaaagctacccttatattgtgtttctttctcacgaaataaactactgtgtagaaggtagcggtaaatatttatgtttaaagtccactctcttctatgttagaggtatacccctcgccccttggccactgcgaatgctgtatcttcgccaatttcactttcacattcgtcgtgggcagttacagcgaagccaattgcttggtacttcttttattttgtttttgttccccactttggggcgtttcaaattagaaagtgtttgcgtgtgtgtgtgcgcatatgtaagtttatgcgtgagtgatgcgagcggcgttttctcaatgattttggctaattatgtagctcattttcgataaccgctttaaactgtgaaaattgtgtcaactttggatactgtaactttacacccgccacataatttcattttaattagcgctcgttaacagttttccatctcccctctccattttgtcgccctcttgaaattgcaatgtgtgggaaacttaatttgttgcatctaggaggtgaaagagggagatagaaactgtgggagacgagaaaaattaaatgaacaacactaattcaaatgcaaaatgaaatgtacagacacagatacagttgtgtaacaattgttaattaattaacagaaacttttaaactcaatttttgaaagacatgaatattgaattctatatcaggattatttaaagcactaagcaaagcgtagttaaaatggattaaacctgttttcaaatataaaatgagaagaaatgtgggttatttgggctcaaacaagttttaattaacctgtaaaaatacgtgacattttgtatatttcttgatttcggagctttaaagaatccctataaatttggccatcgcttcatttatacattattacatacatatgtacatatgtacgaatttcaatcatttacattccgcacacaaacatgaaaagagacaccaatacacatgcacctacatttgccaacagtcaacataaattagtgcgagcaacggcacttggcaacatgcaacaatagcaacaaaagcgacatgattgaagcaacaacaacaccgaccaaggaagttgccaactgtcccgctttgtctctcttattgtcattcgcaactatcccgctctgtctccctattgtcattagcgagttagcagagcgccgctctaataacagcgcctttacatttccatttgccaagtgcaacaaccctgcgtgggtgtatgagtgcgttgtgtgtgtgaaaatactatagaattggtggcaataacaatggaaaactggcatcgtggaaaactgggtaacgcttttataatttattccaattttaactgctttttacggccttcttcttgtctgttaattgttgttattgctgcctgtaaatcccatgcggacaatctgttattttctcacaccggttgttgttattataatttccctacacagaaaacaaaacgtgttcaatttaaaaaaaaacgtttcttattgttttagagatatctatttgtgaaatatggaaatttatgatgaacgtttttgataattattttaataaaattaactttcaaaatgatgtggtataatatttttctctgtttcttcactcaatgtctagaaaggaaaggtgcatttgtagctttaaataagaaatggggaaataaaatataatttctatatatagacagagtccatacatgtgtatgtttatatgatatgtctggacgcgtttttaccgctatttttaaaagtgtaaaggtaaacattcttccaaaaacaacattgcgttttccgcagtttctgagttttattttcattacatagtttattgccttgaaatagggggtcagttacaggagtgtgatatattcattaatatttaaaaaaaaaaagctataataaacaaattaaaaatgcaggaatgacatttgcagtttatgaatgtcatatataaacatttattagttttctatccattagtttaaatgatgttcaatttataagcgtatacaaatttctcattttaagatatgtatcttgtggatacaataaatgtgcacatagccctgctgcatgtctcaagtttcttaagatcaagtactttctggtgcttaaaatgaatttcgggctgctgacgattctaaattgtacttcactttttagagtgtgtatggcgttctaatttgctttcattacctaattcgtgaggcgcgtgaaagttgaccccaaggtttccgcgctcgacttaaggcgacatcgtggaaaataaaccttgggagtgagtgtgtgctccgaatagcctaatcgcagttgtccaaataacctgaagaaggtaaaaaagtatacggggttacgtgcgataaggtcggcaaacaaaatacttatcgttaaatcaatatgcctaaccaaaatacttttcatttcagtttggattgaagcggtgcagctgacataagaacgcgataaatccagcgcaggacgaccgataagcgaagaagccagccgactggcgactacaagtgatatctgaaactatatctgcgatatagattgaagtcgcatccggaggaaccggagcgagcatgtcgcacggtggagccggtggcggtctgggagctcaaactgttggagccggccaacttggaggcggtgcagcggcagctggcggtggagaataccgcgaactccactggacggtctcaagcgtaatggactcgtctcgggtctctacctgcctcatatcgatgctgctgatagtctacggcagctttcgctccttaaacatcgagcaggaggcccgcgagcgggagcagaagaagcgaaatgaatcgatgaccaatcttcttaccggcgagcccgtcgagaaggaaccaagtatgtgtgaaatggatctaaaagcataaggaatgttttataagtttcagatctgtatttcacagcggataaattcgccactctggacacgatgcatgccctctgtttgcccctcggagcttccatctcactgctcatcatgttcttcttcttcgactcgatgcagctgctcttcgccgtctgcacagcgagtaagtgtggttaaattatatatatttctacccgtttatctgcttatggtttccttcaaaaatatttaataaaagggatccacacaatgcagtaacgcagtcacaagctactcttcgaatcacattcaagctttttaattataaatttatgcgctgataaactcatacttcttttaattttcaactcgaaagcgataaaagccatcagaaccattcagcttgcatacttattcaaaacatgacgaattttttgctttattcaataatttgaaatctctctccacagttatagccaccgtggcgctggcctttctgctgctgcccatgtgccagtacatcatcaggccatgcacagatggaaagcgattctccttcggattctgcggtcgcttcacagccgcggagctcttcagctttacgctttcggtatcgattgtgtgcatatgggtgctcactggccactggctgctaatggatggtaagaaacgatgtgaaaaagtacgaaagagtttcctgtaacaaagttttaccccttttttttatagcaatgggcatgggcctgtgtgtggcattcatagcgtttgtgcgtctgcccagcttgaaggtgtccacgctgctgttgaccggcctgctcatctacgacgtcttctgggtattcctctcctcgtacatcttcagcaccaacgtgatggtcaaggtggcgacgcgacccgccgataatcccgtgggcatcgtggccagaaagttgcatctgggtggcattgtgcgggacacaccaaagctgaatctgcccggaaagcttgtttttcccagcctgcacaataccggtcacttctctatgctgggcctgggtgatgtggtgatgccgggcctgttgctgtgcttcgtcttgcggtatgatgcgtacaagaaggcgcagggcgtcacatcggatcccacattgtcaccacccagaggagttggctcccggttgacatactttcattgttccttattggggtaagttgttgaataaatggaatgtttgagtatacgaaaaattgcttacttataaaaatatatataaatactaatttccattacattgcagttatttcttgggcctgctaacggcgacggtcagctccgaggtctttaaggcggcccagccggcgctgctgtatctagtgccctttacgttattgccgctcttgctgatggcgtatctgaaggtatactccatgctcgaatagttccgaatttggtcgatatctgtaatgttttgttacttgttgcagggcgacctgcggcgcatgtggagcgagccgtttatcgcgcaacaaccatcaaaacaactggaagtctgagtgtactctatctaaaagcaaagaaaaacaaaaaaccaacagcatacaatgtgaagaacacacacacataagatctaatactaacgtttgtctcttaaataacgtattgagtatgtattttttaactcaacttaactaagtttcgttttaagttaggtgatcctcgttttcatagtgaaataaaagcaaaaaccgagtaattatagtttttagcctaagcggaaaggttttatatattcacatatatatatacttcatacgagagttcattcaaattggctttaatgtctccaatcatgcagataactagcgagtagaacaaaggtcaagcgaaatattagttactaactaataggcattactaataactctgtaaaccatagcgaaaagactagcaagaagacagtttgagattcgaatttcaatcatacatcatccactcgaaatctgttccgggcagtacgttctgtaaatacttaagttatgtgtaataataacaaaccaccatgcaacaaataatagttagtaagctcgccttcatacacatttaatcgagatccgtttccgtttcacacgctcatttccgtccttcgattttttcgttttgtcacccaatgtttcccacacatcttcacaaccataatgatgttttgccaaaatgcatgtgttcgttgcaaacaataaatcaattaataatgctagacgacaactgttgcactgcgtgtgtttcacaaaattaagtttcaagaattttaattatttactattaacgcagctaaaaataaataaatactgtatgcatatggaaacgatagttacatattaattttaagtaaatgcaatttcgaaacgtatagaaacaataaaaatgtgagatttaaaacaacattgcctataagcgttttttacaaaaattggaagcatgtacgctttttgtaatgtagtaggtagatcttttttgaaaccttacatttaaatgttggcgccaaaatattcctaagtttcccaccattttgcttaccaaagtttacaaccttgcggtaatcgggttttctgtggcgagcggtcacaacttagcgggtaaattcatgttagcgagtacacacctccatttagcggggttacgttccagaaagaacatcgatacaacaaatatcgatagatatatactatgcatatcgattttcgtccggctcta

SEQ ID NO: 12500 - DNA, 1870 bp, DROSOPHILA
aaagcgtgaaatgtttaattcgttgttgtttctcctccgcaatagttactaatagaaacaaatgcaaaatggctgtctaacgtttaagtgcagcgaccgccgaagatcgtggaaatatgcatgaaaagcggctcgcaggcaaatgaaaggcgcgtgaaaatgtagcagacacctttttatcgcgaaaacgaacatcggtgcaaagggaaaaacaaaaaccaaggaaaatacagccaaacgcgaatgtgaatgtgaaggcaaatttggattgaagcggtgcagctgacataagaacgcgataaatccagcgcaggacgaccgataagcgaagaagccagccgactggcgactacaagtgatatctgaaactatatctgcgatatagattgaagtcgcatccggaggaaccggagcgagcatgtcgcacggtggagccggtggcggtctgggagctcaaactgttggagccggccaacttggaggcggtgcagcggcagctggcggtggagaataccgcgaactccactggacggtctcaagcgtaatggactcgtctcgggtctctacctgcctcatatcgatgctgctgatagtctacggcagctttcgctccttaaacatcgagcaggaggcccgcgagcgggagcagaagaagcgaaatgaatcgatgaccaatcttcttaccggcgagcccgtcgagaaggaaccaacggataaattcgccactctggacacgatgcatgccctctgtttgcccctcggagcttccatctcactgctcatcatgttcttcttcttcgactcgatgcagctgctcttcgccgtctgcacagcgattatagccaccgtggcgctggcctttctgctgctgcccatgtgccagtacatcatcaggccatgcacagatggaaagcgattctccttcggattctgcggtcgcttcacagccgcggagctcttcagctttacgctttcggtatcgattgtgtgcatatgggtgctcactggccactggctgctaatggatgcaatgggcatgggcctgtgtgtggcattcatagcgtttgtgcgtctgcccagcttgaaggtgtccacgctgctgttgaccggcctgctcatctacgacgtcttctgggtattcctctcctcgtacatcttcagcaccaacgtgatggtcaaggtggcgacgcgacccgccgataatcccgtgggcatcgtggccagaaagttgcatctgggtggcattgtgcgggacacaccaaagctgaatctgcccggaaagcttgtttttcccagcctgcacaataccggtcacttctctatgctgggcctgggtgatgtggtgatgccgggcctgttgctgtgcttcgtcttgcggtatgatgcgtacaagaaggcgcagggcgtcacatcggatcccacattgtcaccacccagaggagttggctcccggttgacatactttcattgttccttattgggttatttcttgggcctgctaacggcgacggtcagctccgaggtctttaaggcggcccagccggcgctgctgtatctagtgccctttacgttattgccgctcttgctgatggcgtatctgaagggcgacctgcggcgcatgtggagcgagccgtttatcgcgcaacaaccatcaaaacaactggaagtctgagtgtactctatctaaaagcaaagaaaaacaaaaaaccaacagcatacaatgtgaagaacacacacacataagatctaatactaacgtttgtctcttaaataacgtattgagtatgtattttttaactcaacttaactaagtttcgttttaagttaggtgatcctcgttttcatagtgaaataaaagcaaaaaccgagt

SEQ ID NO: 12501 - protein, 417 aa, DROSOPHILA
MSHGGAGGGLGAQTVGAGQLGGGAAAAGGGEYRELHWTVSSVMDSSRVSTCLISMLLIVYGSFRSLNIEQEAREREQKKRNESMTNLLTGEPVEKEPTDKFATLDTMHALCLPLGASISLLIMFFFFDSMQLLFAVCTAIIATVALAFLLLPMCQYIIRPCTDGKRFSFGFCGRFTAAELFSFTLSVSIVCIWVLTGHWLLMDAMGMGLCVAFIAFVRLPSLKVSTLLLTGLLIYDVFWVFLSSYIFSTNVMVKVATRPADNPVGIVARKLHLGGIVRDTPKLNLPGKLVFPSLHNTGHFSMLGLGDVVMPGLLLCFVLRYDAYKKAQGVTSDPTLSPPRGVGSRLTYFHCSLLGYFLGLLTATVSSEVFKAAQPALLYLVPFTLLPLLLMAYLKGDLRRMWSEPFIAQQPSKQLEV

SEQ ID NO: 12502 - DNA, 3660 bp, DROSOPHILA
ctgagtgacaaaacagcgttctttgttgcctttgtcaagccgtacgaatgctgaaattttaggtttttgactgcgatatttgtttttggagctcagattcggattgtagcttttttcacctcatccgataagctcgcagtgcatttcaattagtatagatatatatgtgaatccggttacggattagccaaggtgagaagtgctgcataccctgcgaacgggtaggtgcgacttatcggttgcatcacccccttatgaatatgcatatgacacatggaattgcacacgtttcagataggagactcttacataaatttaattacgaaatgccatatgaatgaaacatttgcctgagtcaccagttctaagaacataccttttgatagtagtctgaaaatatcagcgagatattataactgaaatggcatttgactattgctgatcaagtatgcaaattgctgatctagattcaattgcttgcgatcgtaaagtcatgcggtgaccttagtttgcgtgaggttttcaattaacacacgaaggtcccggcgaaaattggcttaattctatctaatcttatcttatctagtatattgaagagctttagaaataactatatgggtattatctttgtcataaaatgtgtttgagaaataggtttagaaattaatcaattcaattgtctttcatgttacaggaatattggcgaagaaatttattaaagtttgaaaataacgttcactcggagctgtcgatttcgattttaatcgataatttgacgtaactgtatgggtttggttcgcggcttaaatgtttgtcaattggttcaagtactggctatgatatttttttttttgaaaaattggttgatgagtaagctacatgggctgccaacctttttaaaacttacgcttagctaacactgagcaaaatgacttctagttgtgtgttttgtttattaacatatctattactgaagcagggatctatagtattatacaattcagtacaaattaaatatttccaaatttacataatcgcggttagccatgacaaaagccttgtgcgcattgacttgaatggccagatccacgatattcgtattgctaaagtagtccatggcaaccacattggcattatagccccaaggtccttttagccacttatttatcttgggattcagcaccgccgcccgctccttggcggtctgcaattggtgggcgttcagtgtctgctccatgctcctcaccgccgtgaatatccatccaacattccgaactggagaatccggcttcctgctgaacaacagacgcatatagtccagagtttgagaaatattcataaagctggtgctaaaacgctgccacggcgggcagagcatgttcgattctggaaaggtttttgcgaatatgatttttgaaaagtatttttcaattaaaatatcattttaagtactttacatacctctgtccggatagggcagctcctgcgtgggaaataatatcaccagatgcctcttttgaagcagtatttcgctgaaatttcgattcgcacagttttcgtccttgcccacattacgccgataggtctcatcgcccagctcctggcgaattagccggaatagcgagctgtagatctctggatgcttgtaaaagccgatgggaaaactactaaaatccaggactaccacttcgccagatcttttaacaaactgacgaacatcacgtagaactgtgagtagcggtgtaatcagcatattctcgttggctatccagaaattatcggcatcattctcggtgttcatgttcttgtatcttgcaggtggaaattgatttatgtttcggtgaaaaattagaatttctgttagtacttacccaatgcttaaatcgagataacgtatgccaaagactagctgcgaccaaacatcgagctgctgggccaccaggtaatccctgaccagtatcgaattggacttactggagctgcccaagacggccgccgaggcatgtgtgccgggcaggaagatatccttcagcgccattcgattgatgtccttgatctggcccatccaattgggctgtatcttaaggcaatccaccgtgagcagctcggtgccattgtagctggccacatagtgtggcaggcacttgcccttgagatattgcgttgccggctgatcgctactatcttttttgttccagccaccgggaaaacgaagcttgcccagcttgatgggcgtctgcattttgccggttatattgaaaataccattgatgcgcagatctggctgaaagttggagatggccggatcctggctgtagatacccacccactcgggtggtccatagcagttcgggccccagttgatctcgagaaaggtgtcctgcagggttttgcccgtcagcgaaatggttaggtaaacaggacagcccgctgaaatcaatggcaaagtgagatatacaaacaaggcgaagctaatactaagattaagacaatactaagatactatttctagtgcgagttacttaccttcaagggagccaatcaaaagaattgactgcagcaaaggcaccaaaattatatacgcttttatcatctctaaacttgacactcaattagaaattacgtgcactttgaatagatttggcgtgttgtttgctcggcatccagcgccgaattgaggcgaattgagatacatttctcatccgtgcatttccacatacatatgtatgtatctcgttacccggcgacaattgaatcaaccattttcgcccccgcaacgcctttaatactgagcatactaagcttttagatcgtttgatccgagagagtatttcaaattgagaaaaacatagttgagacaagaaacattataaaaaacatttattacgataaaacaaactaggacataaggcttccacttaaaaatatttcaaattctatttacttttagtctaactttgacttaataatatttcatcattaattaaaactattgtggcgactatttgctttcattagcagtttaaaggaaaaggctgatgcaaaacgatttcactaattaagattattaaataaatcgaaattaataaaattcataaacaattggttaacccatagataatatcttaaattaaacattgcctcgatttggtcctgactagcttgtaagacttccacttttatcataaatttagtttcgtatccattgaatcttgaaactgctggtttttaacttttatattttctgcttttattcgattatttgatgtttaaatttagagtaataaattcaaaatgtatggtatgagtttagcgcctgcaccgattgcaatcttccactttgcagtagcgattgccattgccgccacatccgcgatagttcatcttttcgcatcttctgctccggctattatagaaccacatgccattctgggcagtcaagccgcaaaatcttccattgcgattgccttcatccctgccgccagtgcatagctgaaagacttaatacgtttgccgtggttgaaaggatttctcggacatcactatattttcttacttacctggacgaccttggcaaatctgggcattaatggaggcgacatacagagttaggcaggccatgatcaataggaacttcattctgaatgtctcacttgttgt

SEQ ID NO: 12503 - DNA, 1366 bp, DROSOPHILA
ccgagcaaacaacacgccaaatctattcaaagtgcacgtaatttctaattgagtgtcaagtttagagatgataaaagcgtatataattttggtgcctttgctgcagtcaattcttttgattggctcccttgaagcgggctgtcctgtttacctaaccatttcgctgacgggcaaaaccctgcaggacacctttctcgagatcaactggggcccgaactgctatggaccacccgagtgggtgggtatctacagccaggatccggccatctccaactttcagccagatctgcgcatcaatggtattttcaatataaccggcaaaatgcagacgcccatcaagctgggcaagcttcgttttcccggtggctggaacaaaaaagatagtagcgatcagccggcaacgcaatatctcaagggcaagtgcctgccacactatgtggccagctacaatggcaccgagctgctcacggtggattgccttaagatacagcccaattggatgggccagatcaaggacatcaatcgaatggcgctgaaggatatcttcctgcccggcacacatgcctcggcggccgtcttgggcagctccagtaagtccaattcgatactggtcagggattacctggtggcccagcagctcgatgtttggtcgcagctagtctttggcatacgttatctcgatttaagcattggatacaagaacatgaacaccgagaatgatgccgataatttctggatagccaacgagaatatgctgattacaccgctactcacagttctacgtgatgttcgtcagtttgttaaaagatctggcgaagtggtagtcctggattttagtagttttcccatcggcttttacaagcatccagagatctacagctcgctattccggctaattcgccaggagctgggcgatgagacctatcggcgtaatgtgggcaaggacgaaaactgtgcgaatcgaaatttcagcgaaatactgcttcaaaagaggcatctggtgatattatttcccacgcaggagctgccctatccggacagagaatcgaacatgctctgcccgccgtggcagcgttttagcaccagctttatgaatatttctcaaactctggactatatgcgtctgttgttcagcaggaagccggattctccagttcggaataccgccaaggagcgggcggcggtgctgaatcccaagataaataagtggctaaaaggaccttggggctataatgccaatgtggttgccatggactactttagcaatacgaatatcgtggatctggccattcaagtcaatgcgcacaaggcttttgtcatggctaaccgcgattatgtaaatttggaaatatttaatttgtactga

SEQ ID NO: 12504 - protein, 432 aa, DROSOPHILA
MIKAYIILVPLLQSILLIGSLEAGCPVYLTISLTGKTLQDTFLEINWGPNCYGPPEWVGIYSQDPAISNFQPDLRINGIFNITGKMQTPIKLGKLRFPGGWNKKDSSDQPATQYLKGKCLPHYVASYNGTELLTVDCLKIQPNWMGQIKDINRMALKDIFLPGTHASAAVLGSSSKSNSILVRDYLVAQQLDVWSQLVFGIRYLDLSIGYKNMNTENDADNFWIANENMLITPLLTVLRDVRQFVKRSGEVVVLDFSSFPIGFYKHPEIYSSLFRLIRQELGDETYRRNVGKDENCANRNFSEILLQKRHLVILFPTQELPYPDRESNMLCPPWQRFSTSFMNISQTLDYMRLLFSRKPDSPVRNTAKERAAVLNPKINKWLKGPWGYNANVVAMDYFSNTNIVDLAIQVNAHKAFVMANRDYVNLEIFNLY

SEQ ID NO: 12505 - DNA, 3726 bp, DROSOPHILA
gtgtaccccagcttccgatatgatctgctgtgtctactactactactaactctgacggcggcatcaagcgagctctgaagctatacttatttatcaaattcacgcttaatcacaatccacccgaaattcgacaattgattgatttatctattgctatatgctcctttcgttcacacacagagagcgaggaagtaatgtaaattatcgattacccccctacaaaccgaccgcctagaacaattggctagacagcagagctaactggtgagaacaacccaaacaagcaaacaaccaaacaactaaacagccaaccatccaaccgattccacatgtaaaacaacttaactcgctgccgttaaccaccaccaactatctaagttagaacattatgctttctatcgattagttcacttatatctgtagatatattcgagcgacgattatgtttgttgtttagccatatctgatatttattaacgcaattaagcagctttgttataatttattgttaaaaggtcgagcctaatgtatcagtaactagaaaacctaaccccttatgatcgatcggaccgattcagccattgtaccactgactagatgatgatgatgtgcgataaacaataaaacgaaaacacaagttaaacactctcgatcctttatgccaattgcttgctggagatctcttgagatctggattgcccctttgttttcagagctttcgagagagtttcaagattgtgtgtcggcaagagaatgagagagagcggcttgggaacgcatttgattttaactcgttttgttattgtctcgggtagtataaacaaatgtttgaaaatattcggatatttccataaattgttaattctattccggatcacggggcaagaagcgatgagattaaagctccgatttaaactcgatttcgttctctcatctgctgctgctgctggcggtataaaacgcaacttctcagcttgttatctcccagtcgcgcttgaaacgtctgtttgcccagaaatccacgtcacacgcacactacaggttccgagcagtccagatcagcgattccagcgagatgatgatagccagcagcctcgccgtcttatatggcattgccatcgtgtcgtcgatgggcgtgcaatctgcccgagcaggttagaggaattctccgaatccgcgtcgatgggatgctaatgctaatattggtgtacattattgcatgggccagactacgccgacgactgcaccacaccggatggcgatcagggtcagtgcatgcccttctcctcctgccgcaccatcgaggagcgcctgacggaagcccagaaggccggacagaaggtgccagccgactacgccagttacctgcagaaggcactctgcggcgagttcaatggagtggtgagtccaagaatgaaggttcaatatactatattgtcaacattatctgtattctgtataattaaatcaaacaaaaaccccctgtgtaaaagcgcgctgaattacaatgaactacaattatgatattcatatatagaatgaaactcattgatatgtaaagcaaactataaataacaagattctttgtaatttctagattctataaaaattataactttgctctaataactacttagtgattagttttaatgatgtctcttttttagcgccacttctgctgcccctcagccaacattcagcacaactccaaggtgatgagcctgttcaaggacgaaaactttgactgcggcaacttcctcagccaaagagtgtccaatggctacgaggtgaagctctcctccagaccctggatggccctgctccgttatcagcagtttggagagtccagattcctttgcggcggagctatgatatccgagcgtatgttttcctcccaagaaatcttatgtgatctttaataataagaatatcgctataggctacatcctgactgctgctcactgtgtccacggtcttcagaacgatctgtaagtaaacgaatcccatattggaagcattcgtatcttaatctccatttgcatagttatgagatccggctcggcgagcaccgcatctctacggaggaggattgccggcagcagggacgcaagaagaaatgtgccccgccagttgtgaatgtgggcattgagaagcatctgattcatgagaagtacgacgcccgccacatcatgcatgacatagctctcctgaagctcaacaggagcgtccccttccagagtaagccaagtcaagtgtgaaccgccatcaacatctatagctaattgtatattcaccatgcagagcacatcaagcccatttgcctgcccatcacggatgagctgaaggagaaggcagagcagataagcacctacttcgtgaccggctggggcaccacggagaacggctcgtcgtcggatgtgttgctccaggcgaacgtgccgctgcagccgcgatccgcctgttcccaggcctaccgcagggcagtgccgctcagtcaactttgcgtgggtggtggcgacctgcaggactcctgcaagggcgactccggcggccccctccaagcacctgcccagtacttgggcgagtatgcgccgaaaatggtcgagttcgggatcgtcagccagggtgtggtcacctgcgggcagattagcctgcccggtctgtacacaaatgtgggcgagtacgtgcagtggatcacggacaccatggccagcaatggcctgtgaggagaatcatcattcgttggcagttcttagagcgttccttagtattaagtcaaacccaaaaatatattaaatacatatttgtaaactcagtcaacacctttgcggttttattcaaaatgttttttgtatatgactatatgacacctaaatggcaaatgatttgaatgactcgatttgtggataccctgtcggattgaaaaacataacggattaagtaaaaacctgtcctaattattcttttttcccaacaatttcaatcacttgtgtatgaatcataaatacctcttattactattgggtaggcgaataaattcacattttctatgaatattaacaatcagaattattgtgtaatagtcgtgtgactaatatcacttaaatctcgagtgataaccaagagtgttgtgtgttgcctagtggcaaataagtacccattgagctattaatcaaccgcgataatgtagctaatacgagttcaattgaatcgtcagactctccagcgaacttaagataagctcatgggattacttatgtttcttcccgagattacttgtagtcaagtgctgggttattaagaataggatgtttatagggctcagagtttccgacctgtcccaagtgacgtgcgttctaaacttagcaggatttttatcgcaaaccgcaaatttcgggggattttttttgcacgcatggcgcacttagagatcttacccgcgatgctgggaatttctgttctggaaattccatgttacacatccgacttatatccaaagaacgggtttcgatatggctatggctatggccatgggcgtagccaggtgaatggggaattgggtagcatactaattgagcaaaaaaagtaccgtctcaaacggctgctcagcccacctgttgaacctcatcgacgcgtgccagtccccgcgatagcatcgtcaatctggagatgccggagaatcagagacttgaaggggcagagaaatggcgacttggagcgagcggc

SEQ ID NO: 12506 - DNA, 1209 bp, DROSOPHILA
cgtctgtttgcccagaaatccacgtcacacgcacactacaggttccgagcagtccagatcagcgattccagcgagatgatgatagccagcagcctcgccgtcttatatggcattgccatcgtgtcgtcgatgggcgtgcaatctgcccgagcagactacgccgacgactgcaccacaccggatggcgatcagggtcagtgcatgcccttctcctcctgccgcaccatcgaggagcgcctgacggaagcccagaaggccggacagaaggtgccagccgactacgccagttacctgcagaaggcactctgcggcgagttcaatggagtgcgccacttctgctgcccctcagccaacattcagcacaactccaaggtgatgagcctgttcaaggacgaaaactttgactgcggcaacttcctcagccaaagagtgtccaatggctacgaggtgaagctctcctccagaccctggatggccctgctccgttatcagcagtttggagagtccagattcctttgcggcggagctatgatatccgagcgctacatcctgactgctgctcactgtgtccacggtcttcagaacgatctttatgagatccggctcggcgagcaccgcatctctacggaggaggattgccggcagcagggacgcaagaagaaatgtgccccgccagttgtgaatgtgggcattgagaagcatctgattcatgagaagtacgacgcccgccacatcatgcatgacatagctctcctgaagctcaacaggagcgtccccttccagaagcacatcaagcccatttgcctgcccatcacggatgagctgaaggagaaggcagagcagataagcacctacttcgtgaccggctggggcaccacggagaacggctcgtcgtcggatgtgttgctccaggcgaacgtgccgctgcagccgcgatccgcctgttcccaggcctaccgcagggcagtgccgctcagtcaactttgcgtgggtggtggcgacctgcaggactcctgcaagggcgactccggcggccccctccaagcacctgcccagtacttgggcgagtatgcgccgaaaatggtcgagttcgggatcgtcagccagggtgtggtcacctgcgggcagattagcctgcccggtctgtacacaaatgtgggcgagtacgtgcagtggatcacggacaccatggccagcaatggcctgtga

SEQ ID NO: 12507 - protein, 377 aa, DROSOPHILA
MMIASSLAVLYGIAIVSSMGVQSARADYADDCTTPDGDQGQCMPFSSCRTIEERLTEAQKAGQKVPADYASYLQKALCGEFNGVRHFCCPSANIQHNSKVMSLFKDENFDCGNFLSQRVSNGYEVKLSSRPWMALLRYQQFGESRFLCGGAMISERYILTAAHCVHGLQNDLYEIRLGEHRISTEEDCRQQGRKKKCAPPVVNVGIEKHLIHEKYDARHIMHDIALLKLNRSVPFQKHIKPICLPITDELKEKAEQISTYFVTGWGTTENGSSSDVLLQANVPLQPRSACSQAYRRAVPLSQLCVGGGDLQDSCKGDSGGPLQAPAQYLGEYAPKMVEFGIVSQGVVTCGQISLPGLYTNVGEYVQWITDTMASNGL

SEQ ID NO: 12508 - DNA, 2771 bp, DROSOPHILA
tcctttgcactttcagtgaggaagcacaggagtacattaatgtcggcgcaatcaactcgttgttcgttctgggccgcagcataggatttattggccattacatggatcagaaacgtctcaaacagggcctgtaccgtcatccgtgggacgacatctcatacgtcattcccgagcagtacaactaaggcgtgctgatgaagccgcgacgatgttatatatatatatttacgtatatacaagcatatatattattcggaagttgttgtagttaagcacagatgtatgatgttaggcaaagaggtcacccgctccgctggctggaaggatccattgaggtctatccgcgcatgtgactctccccagatccctttccctctcacttatcctgcatttaaagttcttaagttaccatcattaccctcgttgtttttgtaagcgctgcgtgtccccggagcccttaggggttttggaatctagacctagttaaatctagtgctccgagccgcacaacacaccagtacccggcataacattatttgatacttttatactttagtttggatgctcacaattgtctagacaacaagagaataaattgttgcaaaagcttaattttatttttgtcacccttcctttactatttgttctttaaatcccacgcttcctttgccagcatctcgaagagaaacggacactgcactagttcctgctgcactgaagcacatttatttataaacaattacacgaatatttacaatgcacaaaaaatgggaggcagccttgaggaaatgcaatttccctcgcaaagtttgcgtctttaaaaattcaccgcaattaaatcgcacaaatgctttgactaactaaaacaatgaattgtctttgtctcgagcagtttaatttgctgaacaattaacaaattggaaacgcacacacaactaagcgtagaatctcattaaaaccaggaaccccttaaccaccaggtcaactcggaaagtggcttctatctcatgcgacgcattctgcgatccatctttttttgctttttctcgtccacctggggattatcgtcctgggcgttgcgttgcgacagccacggctggatgacggagccccagagcatccatccagctcgtatgggcgccaaaagcagcaccaaccagaagtagtttgagatgagggccagcagcagggtgccggaagtaaggatgatcaaatccttaacgtttctagagggagaatcatgtgtaggcagagtacttcaaagcttctgtgggtgcacttactccgcgatgccgccttccatatttaagtcgttgccggagtccaaaagagcaccgctctcagagtatttggcctgcgacatgaacgccataaactggtaggagctccccaggatcagcaacgaaagaatgtgcataaactaataaagaacgagaggctgatgattgagttcattgagggggattttcggcggcctaccactgaggttttggtgacttcgaagaccaggaaactgaggagcagagcgggtgcagcacatccaatggccatgttccggtagaaagtcagtgtagtcttgttttcctccacgatttgcttggcgcccttcgtgccttgtttacccttttgctggggctgaaagtggacaagcggttttatgtaatccttgagagcgttatccctgtgctagttacacttacagccatggtgggattgcaagttgtgtgtcagctatttcaaaatctaaaatcggaccactatttacgtggcgacgtcttcaactgaacaaaacggtgttgaaacgacagtgctgtgaaacgtgcgcattacttatgttaagcatggccgtagagggaaagtgatattaagggtaaatatagcatttaaaactgtaatggaaaggtacttaagcaatttacttattttaatttgctcttaatatattatttacaaattgttgcacccacaatatattcaatctacgcccacggtgctggtttattaaaaaaaaaacttgccattcacagtgaagcggcagaacagctgctgggccctcagcctaataatcgaactttggattttggatttggcataattttgattttagctgtccaacgagctgtgcggtcacaacataaatatggatcaactggtgcagttgaacaatcaggctggcggacgggacaaaatcgcccgacttattcagtatgcctcgcgtgcaatgtgggactcgctggagtccgccaattccaatccagcgcttgtggacaacttcaagacggttgaatacatcctgagcacattccgaaaatgtaggtattctaaggtattccacgagcacgtagctaatctcatttcaactcagtactccgctttggtaagtgcgttgatgtattctacggcgctctgaagaccattcaccatccggatcttaacatccgtgtgacgctcaccttaagcaagctgtcacaatcgctgttcctcttcgccgatcacttcctctggctggccaggacgggactgacggcggtgaacgccaagcgctggtccaacatcgccaataagtactggctcttctcgatcataatgaacttgtgccgggacttctacgagatcctgagagtactggacctgcatcgatccggtagcaagagcggcatttcgcgctgccgcatccccgcgagcatcaactcgccggaggactttaagcgccttgccctgcagtcctacgtgctgatgcagggacacaaagacatagttgtggacacggt

SEQ ID NO: 12509 - DNA, 590 bp, DROSOPHILA
cgccacgtaaatagtggtccgattttagattttgaaatagctgacacacaacttgcaatcccaccatggctccccagcaaaagggtaaacaaggcacgaagggcgccaagcaaatcgtggaggaaaacaagactacactgactttctaccggaacatggccattggatgtgctgcacccgctctgctcctcagtttcctggtcttcgaagtcaccaaaacctcagtgtttatgcacattctttcgttgctgatcctggggagctcctaccagtttatggcgttcatgtcgcaggccaaatactctgagagcggtgctcttttggactccggcaacgacttaaatatggaaggcggcatcgcggaaaacgttaaggatttgatcatccttacttccggcaccctgctgctggccctcatctcaaactacttctggttggtgctgcttttggcgcccatacgagctggatggatgctctggggctccgtcatccagccgtggctgtcgcaacgcaacgcccaggacgataatccccaggtggacgagaaaaagcaaaaaaagatggatcgcagaatgcgtcgcatgagatag

SEQ ID NO: 12510 - protein, 174 aa, DROSOPHILA
MAPQQKGKQGTKGAKQIVEENKTTLTFYRNMAIGCAAPALLLSFLVFEVTKTSVFMHILSLLILGSSYQFMAFMSQAKYSESGALLDSGNDLNMEGGIAENVKDLIILTSGTLLLALISNYFWLVLLLAPIRAGWMLWGSVIQPWLSQRNAQDDNPQVDEKKQKKMDRRMRRMR

SEQ ID NO: 12511 - DNA, 3342 bp, DROSOPHILA
gatgccaagcgggatacggtctttaagccctgtggccatgtcagttgctgcgagacctgcgctccgagggtgaagaaatgcctcatctgtcgggagaccgtctcctcgcgcgaaaagatcgacgagtgtctggtgtgctcggatcgcagggcagccgtcttcttccgcccctgtggccatatggtcgcatgtgagcactgcagtgctttgatgaaaaagtgcgtcctgtgtcgcacgcaaatcgatgagatattatcgttcagcctttgctgcggaggtagtggacgaccggagaaggtgtccgtggcagctggagcgatggcaacagtgggcttgccactgcccgacgatcgtttcatggaagctgcagcagcggcagcttgtgccaatgcctccggccatagcgtggccatgaacaacaccgtggttactccagtggcgggcagcagcaatcagttgaatagccagaataatctcctggccgctgcagcagcctcttcgaatgtctcgaatctgtcagcagctggaaacgcgatggtggctccttccaatgtcaacaacttccagatggatgatgtccaaaagttgaagcagcagttgcaggacatcaaggaacaggtgagctcaaataagattgaaaatatgttcagtgactgatcctcaaatttatcttatagactatgtgtcctgtctgctttgaccgcataaagaacatggtcttcctatgtggccacggcacgtgccagatgtgtggcgaccagattgaggggtgtcccatttgccgcaagaccgtggaaaaacgcatcctgctcttctgaagcccgttcccggttcacacattccgcgcacagtctgcacagccttcgaagtattaggatatttaaaggactcacattcttatacacacatatatacacacacaatatcatatatataactatatatcggattggtcttataaagcaaaaatatatttttaacaaatattcaaacaaaaacattaagcagaaatacttttgcttggctccttgctaatcagatccctcagaatgtccttcttggcctggaaatagtcacggaaccagaaaatgtgatccttcttctcctgggcagtcaagtagggattcttggacaagccgacgcagacgagctccatgaaatggcgaataggccccttgctaggacaccaatcctcgagatgttgttccagaaaaatgtgttccgagaagtccacgttatgctcgtcctcccaatcctgctcattgttgatgggaaagcgccacaccttcttttgatccgtccacaggaccatttgctcgaagtagtttgccgggggatgggaagcttgtaaactaagctcccgctcactcagctgtgaccaggttgaaaggatgtcgttggaaatcggcagctgggtatccttgaagatacccaacggttccccgccgtacaaattgacactgcccgtaaaggattcagcctctcgtttggtttgcctctgtgaccgctgataagccccatctcgattctgtggcttgaatctggaagccagcgagcggcgaacgtactcgccgcgggtctgctccacctgctgcggctgctgacgacgatcgatcttcatgcccacgataatatcactgttgtgtaaggaaaataaattttattagattatccattaatgcgagaaaatcatttttacacacctcagattgagttccttatcaccagaaggagatcccgaaacatccgccgtctgattttctccggtcgctgctgaagaggactcgcttccatggccaaggagtttggccaatagctcagactctgtctgcttcttgtcgctctcactggtgcccagcatgctagcaatgttcttggccgcagttagaacattcttggcggctgcctcctgtttctgggcctccctccgcttcctgttggcatcaccaggacgtggaaagtccgatgccgagagctgatccgtggcctgcatggtgcccaacaggcggttcagccgctgggccgccgtttccacaggttcctccttcttcttcgtgggcttttcgtcgtccgaagaggagtatccatcgtcgtttttggactgcgaagaggagtagttgaccaatcccacgtttttgaaggcagacggtagcagggaactgaaaaataaatagtcgagtgacggatttcttttggttatttcaaattagacgggtggcctaccgtaggcccaatctctgggaacttcgtacggccaacattttataatatttctttgataattttaactagaaataagaccaaagaaatcgctcgcgtaacaacaattcggcggagagttgccagaccagatgaactgtttgcactgccgtttaagctagtttatagttaaatttggctttattttatgtttggcttcccttgtcctatttcttatagtgttttgattgaaaatatccttaactaacctaatcatttcatggacatttgttttttatctgatttgatataatttgaaataaaatgttcttaaaattgcattttgaatcaagaattttatagattaacttgaccacagttggcagcccaaattgcaccagatagtatgacctttgattatcgaatttggaaatctatgaaaataattatgtagttcaaaacaagctccttttatagaattctacattctccttgtaagtaattaacttataatcaagcctttcttcaacctgtgattctaaggtaaacacgaaatgttaccactttttctttgcacttggtaataagtctcgcatccaccgcggtcacactaatcacacgttttgttttttgcgctattcctgttactttttttcgacgtacacacgcgttttgttattttgcgcgattaattaatggcaaaaaataaaaaaaataaataaataacgagacgaaataacgaaaacaccagcggccgagctagtgtgcgtgcgagagtgtgtgtgagtgctgtgtctgtgtgggcgtttataaataaaacgctgcgaagctgtgtgcgaaaagcagacgcggataaagaagtaaaagaatgagcgcaaccaaaaacaagagcgaaggaaagaaagaaagtgttttttattgaaattcgttgaaaagttttaaatttactaaaacagagaggcgaaagtgcaacagagcgaaagagagagcgataaatagcgaggtgaatatcaaagggaaacccatttgcatcgagaaataaaacgaagcgaacggacggccaaagcgtaattgtaaaattccactgtctggggcaggctatcaattggtgcatgtgtgtgtgtgtgagctatatatacgtgg

SEQ ID NO: 12512 - DNA, 1212 bp, DROSOPHILA
caactctccgccgaattgttgttacgcgagcgatttctttggtcttatttctagttaaaattatcaaagaaatattataaaatgttggccgtacgaagttcccagagattgggcctacgttccctgctaccgtctgccttcaaaaacgtgggattggtcaactactcctcttcgcagtccaaaaacgacgatggatactcctcttcggacgacgaaaagcccacgaagaagaaggaggaacctgtggaaacggcggcccagcggctgaaccgcctgttgggcaccatgcaggccacggatcagctctcggcatcggactttccacgtcctggtgatgccaacaggaagcggagggaggcccagaaacaggaggcagccgccaagaatgttctaactgcggccaagaacattgctagcatgctgggcaccagtgagagcgacaagaagcagacagagtctgagctattggccaaactccttggccatggaagcgagtcctcttcagcagcgaccggagaaaatcagacggcggatgtttcgggatctccttctggtgataaggaactcaatctgagtgatattatcgtgggcatgaagatcgatcgtcgtcagcagccgcagcaggtggagcagacccgcggcgagtacgttcgccgctcgctggcttccagattcaagccacagaatcgagatggggcttatcagcggtcacagaggcaaaccaaacgagaggctgaatcctttacgggcagtgtcaatttgtacggcggggaaccgttgggtatcttcaaggatacccagctgccgatttccaacgacatcctttcaacctggtcacagctgagtgagcgggagcttagtttacaagcttcccatcccccggcaaactacttcgagcaaatggtcctgtggacggatcaaaagaaggtgtggcgctttcccatcaacaatgagcaggattgggaggacgagcataacgtggacttctcggaacacatttttctggaacaacatctcgaggattggtgtcctagcaaggggcctattcgccatttcatggagctcgtctgcgtcggcttgtccaagaatccctacttgactgcccaggagaagaaggatcacattttctggttccgtgactatttccaggccaagaaggacattctgagggatctgattagcaaggagccaagcaaaagtatttctgcttaa

SEQ ID NO: 12513 - protein, 376 aa, DROSOPHILA
MLAVRSSQRLGLRSLLPSAFKNVGLVNYSSSQSKNDDGYSSSDDEKPTKKKEEPVETAAQRLNRLLGTMQATDQLSASDFPRPGDANRKRREAQKQEAAAKNVLTAAKNIASMLGTSESDKKQTESELLAKLLGHGSESSSAATGENQTADVSGSPSGDKELNLSDIIVGMKIDRRQQPQQVEQTRGEYVRRSLASRFKPQNRDGAYQRSQRQTKREAESFTGSVNLYGGEPLGIFKDTQLPISNDILSTWSQLSERELSLQASHPPANYFEQMVLWTDQKKVWRFPINNEQDWEDEHNVDFSEHIFLEQHLEDWCPSKGPIRHFMELVCVGLSKNPYLTAQEKKDHIFWFRDYFQAKKDILRDLISKEPSKSISA

SEQ ID NO: 12514 - DNA, 3578 bp, DROSOPHILA
caaactgtaacaaaaatcaatagaagtggttaaaagagtttattaacttaatttcgcatgcacaactgaatatttggttttacataaaaatataaaatattacgtatacgtaatcaaacattcagaattgccacagaaagcaaaaaaaaaatagatgagaattttttttttgtatcatcttacctgagtggttcccatttcaatgtaaaatccggaggtgttaattttttccgtgtcgccgtggataatgttctgaccggcggaaatggcacaggatgggaatctctcggtcatggaatcgcaccagacaataaagcccagggtaatgaaaatagccgacaaaatggacatagccagcatccaaatgcccagaacgacgtcaatgaacagagctataaacgaggcctcctccttcatgcgggcgtatctatttggcaaagaaattcactttctagatgtcaaaaaccccgaataatacccacaagatacatacctataaatctgcaccaccgaaataattagcaggaagaacccggtaatcaggggaaagttgcagaagccattggaagcccactggacatcgaacatgccgtcctcctcccgccatttgccagttgtaaagagcaggcagtggccactgtgggaaaatagaataaagaaactcaataatttacaggggaccaaagaggaactgcgcacttaccagaattggtcgaggtttataaacaatggcacgacgatgcacagcgacaggataaacaggatgacatggccagctatctggcttagctgcagcacgttggccaaagccattttgcttttgatttcaacaaaaacaaatgaaactccacaatattcagacaaacacggcaatgcacttttggtgttatcgataagcagtgttggacagcaccctgcagctgcctgcattggtatgcgcaattatcgatatatacaccctggggccatcattctcgttaagccatctctagttcgccactgaactcgtaaaaaagtgtaaaatttgtttacattgaaaaaaggtaaaatattgttcttgagggctacctacggtgctccctggctcctagatgggtcagccaagacaaagggccgtgtgcatgtgtggcgcgtagccctttataagtgcggggggtggggggaacagccagggcgaacaaagagcaattaatgcaataggaggaggggggctttctcctccgattttccccacttccccgaattttccaatagaggctgttgtgaaacctaaggtgaagatcgctcgggcgaattaacatggaaatccatttaagagcaccctcctctattgtctatctcgcacacgaccttttgcagacgcatcagcggatcagcggacgcaattcaatgaggtgcttatgagctaactagcagcaggacggcagccaaggaacacggggacgaggtctggatcagttagcagggagccaggaatcacaggctagaggtcagcgcaaactggagggcagcaggtgacctagtttacgcagtagcaggtaagccaaggccttggaattcgagaccagcattaaacaccaccaccgattttcagaagacgattagaggactggcggcagcgtttctgtggcaactcctactggggctgttctgttgtgttaattgaacttagagcatcaacgtgcactgccattagttgtaacctcaatatacctacctaacgtaattagtgaaccagttctgacacagaacagcatgtccaactcccactacaacaactaccagcagcagcagccgcactccagcaacggagatccggaataccagcaccagcagatggtgcaccagccgcaacggttctccaacggccatggcatgaagaccgtcgctgtgccagacatgtgcctgttctgcttcgaggtgcttgactgtgagctgaacaacgtcgatggtccatcggtgccggtgtttagcaacgacgcctacccactctttgtcacctggaagattgggcgtgacaagaggctgcgtggctgcattggtacttttagtgcaatggaactgcaccatggtcttcgggagtacgccttgaccagcgcctttaaggactctagatttgcacctatctctagagatgagttgccacggctaactgtctcggtctcgattctgcagaacttcgaggaggctcagggccacctggactggcaactgggcgtccatggcatccgcatcgagttcctcacagaacgcggctgcaagcgcacagccacctatttgccgcaggtggccaccgaacagggctgggaccagctgcagaccattgactcactcctacggaagggcggctatcgggctgccataactccggagacgaggaagtccataaagctaacgcgctaccgttcgcaggagatccagatgcactacaaggagtaccgcgagtaccaggagcgtcgcgcccagttcggcaaggtgcagtgctaacaattggacaggacggcggcgaggcgatgatcctggcttagggcaggcctgatggccgtcgtcctcctgctgctgctagcttttgagtttggcccagcttggcggccgctcgcttaattcaagttatgagttattatatctccagcatcaattttaagccctcaaaaattctccaaaaacgcgcgtgagatgagcgtcttttactaaatataccatttaatgcttcaaatacttaagcggcagatccgtaagcaatttcgaatgagaaacataatgaaaacagaaaagattgtaagcgctatgttgaaacccattgcattcggatacaccgatctatgttgtagccgcagccttgctggtttctttttaaatcaaacacacacaaactaaaactaaacaagcgtatatatggggatatatattaccgaatcaatacaatacaaaatgcagatatataattcacgtaaaatgttcagcaattatattatagatttaacaactaaaccaattacattactaattctaattctatgcgcattaaataaaggtcgaccccttctgagtcgcacaagacaatgcaaaattatcgtccgtctttcctcttggggatcgtggaagcgaaatggagtttacacctcaatgttttggcattacacgtgttcaatgtatactgtttattgttccattatgttgtgcgttgttacatggttttgtacttctaaatctagtcgataatatcgatatatgtttgggctttacgtacggagtagtctcaacaagttgctaagaaaagtctgcctcttggataaatggctacaaaaaactgcgttacgcagcaaggctaatcaaacaatctaacaactaagctagtaacagggcaagttagtctatggctaaagcggcgagctagcgctcaattagtataattactggcatacggtataaatgtatatattcaatatatatagtcaatagatcgcattgattgcaataaagtatgagtccgtcgcgctggcttctcaataagcagtgcaattataatagatggattgtttatacaccgcagcaaaatcgcattccatcggtttgca

SEQ ID NO: 12515 - DNA, 1437 bp, DROSOPHILA
tgaactcgtaaaaaagtgtaaaatttgtttacattgaaaaaaggtaaaatattgttcttgagggctacctacggtgctccctggctcctagatgggtcagccaagacaaagggccgtgtgcatgtgtggcgcgtagccctttataagtgcggggggtggggggaacagccagggcgaacaaagagcaattaatgcaataggaggaggggggctttctcctccgattttccccacttccccgaattttccaatagaggctgttgtgaaacctaagacgcatcagcggatcagcggacgcaattcaatgaggtgcttatgagctaactagcagcaggacggcagccaaggaacacggggacgaggtctggatcagttagcagggagccaggaatcacaggctagaggtcagcgcaaactggagggcagcaggtgacctagtttacgcagtagcagaagacgattagaggactggcggcagcgtttctgtggcaactcctactggggctgttctgttgtgttaattgaacttagagcatcaacgtgcactgccattagttgtaacctcaatatacctacctaacgtaattagtgaaccagttctgacacagaacagcatgtccaactcccactacaacaactaccagcagcagcagccgcactccagcaacggagatccggaataccagcaccagcagatggtgcaccagccgcaacggttctccaacggccatggcatgaagaccgtcgctgtgccagacatgtgcctgttctgcttcgaggtgcttgactgtgagctgaacaacgtcgatggtccatcggtgccggtgtttagcaacgacgcctacccactctttgtcacctggaagattgggcgtgacaagaggctgcgtggctgcattggtacttttagtgcaatggaactgcaccatggtcttcgggagtacgccttgaccagcgcctttaaggactctagatttgcacctatctctagagatgagttgccacggctaactgtctcggtctcgattctgcagaacttcgaggaggctcagggccacctggactggcaactgggcgtccatggcatccgcatcgagttcctcacagaacgcggctgcaagcgcacagccacctatttgccgcaggtggccaccgaacagggctgggaccagctgcagaccattgactcactcctacggaagggcggctatcgggctgccataactccggagacgaggaagtccataaagctaacgcgctaccgttcgcaggagatccagatgcactacaaggagtaccgcgagtaccaggagcgtcgcgcccagttcggcaaggtgcagtgctaacaattggacaggacggcggcgaggcgatgatcctggcttagggcaggcctgatggccgtcgtcctcctgctgctgctagcttttgagtttg

SEQ ID NO: 12516 - protein, 243 aa, DROSOPHILA
MSNSHYNNYQQQQPHSSNGDPEYQHQQMVHQPQRFSNGHGMKTVAVPDMCLFCFEVLDCELNNVDGPSVPVFSNDAYPLFVTWKIGRDKRLRGCIGTFSAMELHHGLREYALTSAFKDSRFAPISRDELPRLTVSVSILQNFEEAQGHLDWQLGVHGIRIEFLTERGCKRTATYLPQVATEQGWDQLQTIDSLLRKGGYRAAITPETRKSIKLTRYRSQEIQMHYKEYREYQERRAQFGKVQC

SEQ ID NO: 12517 - DNA, 4705 bp, DROSOPHILA
caccacaaaaaggcagaatgaaggaagcgagtgccgtcattgttgttgctgctcccgctggttgtttgacatattctgtaattgaatttcaaacaaggcgcattacaacaggccaggacgaccgaggataggacagaacggagattacaacaccacgacggacggacggacggacggccacatctacacctacatacatacacgtgtatgtacaggtccaggtccaccagttccagtttgccagtgtaccagtgtaccagtgtggcaatggcatcctttagcctgttgcgctccattccctgggacaaggaaattgagtttttgctccatttgtttgagtcactagcggccaggcgctaaattcagttaacatgcctggttggtggccaaccgaaggaacagaaaggtgtggggggggtgtcagcacgggaatcaggagcacaggatgtgcctgttgattgactgctgacccagttgccaagtttccacgtcctgccaacaggtgaggtgatcccaacacttaacacgtttactgcagagaaaagcaataattttcaccattttctcaaagtgaattatctgagattttgaatagtttgccaagtatgattgagtgctcgccacgaagaaacagccaatatcaaattcgccagattgtcatgtgtaatgtactaataattcatgtttcgaataggcgtaattcccattcacacctacctatgcgtagattacatctaattctggggcttttaaaattccaccataaaaacgggaagtttcgccatgaaaaccacaatcaaacagcagcacatagctttcgatagaatggtagtaaatcgtgggacaatggaatttaaactgataagtaaaaaaaatacaaacttctgtctgtcgaagtgaattagatctctatttcggcatagcccaactacatagtatctggtatcttcgatgtggctgaaccttagttatacatatgtatatattgtatttcacgaccttaacccttacctggctccaggcgatacagatggcaacgctgatggacgctggcgaagtagatggccagtgccccgatggccgcgcccagaacggtaaaggcgatggccaggacgagcaggcggcgccgctgctgcgactccttgagcagccagtcgctgtggctgccggtgcccgttaccatgccgggattgccctgcgctggatttcctcgctggattcccacgcctccgctgccgtcgggcgccaggaaaacgacagtgggcagcttgttctgctgctgctgctgctgttgctgctgcatctgatgtggcgcctggtgctgcacctgttgctgtcccaggagtggcgacaccaccgtggcactcagctcctccagcggcgcattcgcctgcaggtagccgttatttagcggcttctccgcggccgccgctgttgcctcatgttgctgcgacatcttctactatggggcgcctgatttgtggaccgctcagcgatcggcggacaggtgaagcggtgcagcggtgcggcgtatcagcggttcagcggacggcgtaccgttcgcagttagagagacagcgccggcgacgctggcaacatcagcctcgatgccactggaagaaattatcaaggtgagcaatatttctaaatattattattatcagctatcaaaggatagttttgatttctatgcttattcatattatctcttatcaacgcgtttctcgcatgtttgctttcactgtaggcgggcttttcgtaaatttatcagatagatgactgggtgaattttgagaccagaccggccaacaccggattcaaccagatctcttccacgatcgaagcgtggccgattcgtgcatcgagtcctcactgtggttttgcgttgcccaacaaaaaaaaaacgggggaggatcgttggggaaagaaccgcagaagttacaagtaccggcttttgaagttttgacaagtaatgatcttctgatatcatctccttcgcattgttgttgttcttggatcgtttttttttgtttcgtgatatgaccaagttgtggttgttgttgttgctgactttagtaggcagttgttgtttttgttgttgtgacatgcgatcagggccaacgtgttttacgcgcaatcgcagccggcaactcagcaactcagcaggggatgcaaagccaaacagtttgttgtgccgccgattaaagtaatcattggctaagaaggcccttgaaaatgtaatcttaaaccattcttatttgaaccataaatccattatttaaagctttggttggattgtaaccacaagcccagctcaaccagtctcttcacatggcaacagatggtagagattgcttttttatttggaagagatattcccctagaagcactgatttggggtcaccttttcgaacagaagagtattataagcttcatttctcgagtgtaacattaaatgagctgccgagtaaaattagtgttagtttatgagactagtaaacctgtcaaataaatgctaaaaggtcttacgtaaattctaatgagtattttaacaagaagtggtagagaatacgcgtctcattatctgaatatgatacatacaggcagcagttggttatgtcttttgttcacaaagtgatatgtgtatatattcggcacatgcggcgaccttactttctaaccgatattcactgtgactggaagctcggattaatgcgcggcaaattttgcaaaactcgaaactagttaacccagctgcgaatgggcagcgacgtcgacgaaggcagcagactatatcgtctatatactgtctccaagccgattcgatttgatttgatttgatctgatctgatccgatccgatggcagatgacagatctcgaatgcccatcggaaatccagagcccaatatcgtgacgctgttgaatacttaatattcacaatattctcggctcgcgatcgttttgaaaattgggcgcttctgatgagccacgtgaaattcgatacagtcgctgtattatttcgtatttattctttttttttcacatggggaagaaactcgaacggtgcgacacaaactaaaataaattaatgcgactgtcgttaaattcgcatcgtattaccgcagctggttcacaaactaaacaaaaactttgaaatttataatcgcacaggcaaaaaaaaaattggtaattctggctggcatttaggaagaggcttatctgcctgaaaattacctaagatcgtagtttcagaatcataatgtgagttctttaaaaatatatcttttgatttcgaatatcgaatatcgcaaatattcactgcacagaaaaaaatgtctcagtcccgaaattggtcaatatttcagaactgatatcgaaaacatgttaagtccacaaaaaacttgaatccacatttcaccgcttagtgttgggaatgcctatcttatttttttctgtgcactttccgtttttttgttataattttgtataatattttagtgcattactttttgttgtgctgctttattgttattgttgtaccgttcttgcttattttgttttcactatattttttttattttattattattacttatgtcttttacgactttcactgcctttgatttgattgtttgtttgttgttttgaatttgcgtttcgcctgcgagtgcgaatgggcgggcgctagtgttgcgctctctcttcctctcactcgctgtttttagttaatataattcttctacttttattttttttttgccgccaaacgcgcgaggcgacttttcgatgccaactgagcgttctcaacgcgtgtccttagcttttaagcagtcgctgtcgcggtcgccgttgctgccggcgtcgcagtcgacgtagtcgccagcagcactaacaacaaattcaaccaagtattgccaatggaagtgacaccccagaggtgtatattaaattaatgccaacttggttacagagccccaaaacgaataaaataatatggggccagatgtcgctcccagttctctgggcgaattatggatggtcaagcattaaagttcagcaacatcgcagcggagacttcctcgggagatttggagcagatagttgagttgggccaatgccatatgaagtggtcacaatctcaagaacacacaggcgagacaggagaatgaacgatttcaattcccttaacagtatccttgaatttttattgttctactgaagttgtagaaaattgcattgctagtttagtttttcagttagtttttccaaattatttttagtggaaaatgtagtacttcccgtttccaaggatatctgtaagttagccaccaatggacggtgcagaatggacagactatttacctggcaggtgggttcgatcttctgttaccttaactccaagtcattactatggcggtactacaggtgccgctaatttggcacgttccacacacgaagcggtctaatcgcggttctgtttttttttttcggctgtctgccccagccagtgtgacgctgcaagccaatcatgaatggccaaagcacccagcccctcaatcccagaggaacccagaatcaagaaaaccggataaccaagccagcaagcgatccagtggccattggcgttgacattggcattatcagtgcgtgatcatcgtgtcattgtcaatgggcttcggacagaaatattaattaccacccagt

SEQ ID NO: 12518 - DNA, 811 bp, DROSOPHILA
aagagagagcgcaacactagcgcccgcccattcgcactcgcaggcgaaacgcaaattcaaaacaacaaacaaacaatcaaatcaaaggcagtgaaagtcgtaaaagacataagtaataataataaaataaaaaaaatatagtgaaaacaaaataagcaagaacggtacaacaataacaataaagcagcacaacaaaaatggcatcgaggctgatgttgccagcgtcgccggcgctgtctctctaactgcgaacggtacgccgtccgctgaaccgctgatacgccgcaccgctgcaccgcttcacctgtccgccgatcgctgagcggtccacaaatcaggcgccccatagtagaagatgtcgcagcaacatgaggcaacagcggcggccgcggagaagccgctaaataacggctacctgcaggcgaatgcgccgctggaggagctgagtgccacggtggtgtcgccactcctgggacagcaacaggtgcagcaccaggcgccacatcagatgcagcagcaacagcagcagcagcagcagaacaagctgcccactgtcgttttcctggcgcccgacggcagcggaggcgtgggaatccagcgaggaaatccagcgcagggcaatcccggcatggtaacgggcaccggcagccacagcgactggctgctcaaggagtcgcagcagcggcgccgcctgctcgtcctggccatcgcctttaccgttctgggcgcggccatcggggcactggccatctacttcgccagcgtccatcagcgttgccatctgtatcgcctggagccaggtaagggttaa

SEQ ID NO: 12519 - protein, 151 aa, DROSOPHILA
MSQQHEATAAAAEKPLNNGYLQANAPLEELSATVVSPLLGQQQVQHQAPHQMQQQQQQQQQNKLPTVVFLAPDGSGGVGIQRGNPAQGNPGMVTGTGSHSDWLLKESQQRRRLLVLAIAFTVLGAAIGALAIYFASVHQRCHLYRLEPGKG

SEQ ID NO: 12520 - DNA, 6472 bp, DROSOPHILA
tatgcgcaactcgacaaacatcttcctaaccaacctgagcattgcggacctgctggtgctgctcgtctgcacgcccaccgtcctcgtggaggtcaacactcgcccggagacctgggtacttggccacgagatgtgtgagtggcttcagctccagtgctcctggtctatttgttctccccaacctaattaactgctgttctatcccaggcaaggctgtgccgttcgtggagctcacggtggcccacgccagtgtgctgaccatcttggccatctcgttcgagcgctattacgcaatctgcgagccattaaaggccggctacgtctgcaccaaggggcgggccatcctcatctgcgtcctggcctggggcattgctgcgctctttacgaggtaagcgattaggctcgtacttgattttcttaaatttatttgtaaactagcattatactttaaatatcttaattagtttggtcgcttttcatcgcatgctttttggtgtttgtagtcctacatttcgtatgtacatatggtattatcctgtttagatctacttcgtttgtggcctatatccgtttattcatttcgcccagtcaagcattaagttcctcgctcattaattataagtgtcaatcgccgtcattttaatgatttgtgttttgttattgggttttgcacatttttccccgttttgtttattttccattatgacgtggaatttctggtcttggtgtttggccttttgtgcgccatctacgctggcggcgtgtccatttgtccatttacatgctaaactgcgactgtcgcctatctattccatttccactcctgtcctaccacttctcctgcttcactcgcttcatcgttgccattgccatttccattcccaatcccattcccattgacatccgtcgcctcaagttgcggacggcttttgtccaagttccggaagcttgccgttatcagcgccctgtcatctttaataagcaccgatgtccgctatcatggatttcatttcattgacactttattatggtgcgctccgtccaaggacgagcggcgaccctttttaattttgcaaatcttgccgcgtccataacaatgaaataaacagcacattgtcgagctggccaccgacccctcagcactccgggagtcatggggtcatctatggttggcagctgggtccgcaggacacccgcctacgggccgagacccattaattacgccacacaagaagcccgaggccaaaaaaaaaaaaaaaaaaacgggcaaacatttttaaacacattcaaacagacgcgccacacgacgcccatgggcgcaaaaggaggcgtgtcaaatagctgacgcacgtaccaaaacgcccggatcatctttagtgggaaaaaaaacacggccatcgcctgttgactgtcatggcatttcgttttcgaggtctagccagggaggatttgggctggggctgtgtttaatcagcggctcggataactcaaaataatcaaatatttaaacttgtctgtttgctggatatatttacaaagtcaacagagtatatcccaccataagttcgccatctactcacttatccccttgtaagtgaaatgtaatcacatcaatgaaatttggaatattttgagctttagttaaatgtattttaagatgtatcgatataactcatacagatacttttttaaaatgagtggtttcatttttattaaatttctgttattataataattttaaatgcaatgttgatattatatttcaaattggcttaacgcctacagattagaatacactaaagatacacggtatacattttttttctagacagaaatatactttaattcaactaaattaatatatatatgtacctctcccatcttttagctattaaatagtcgaggaactcgactatagtattatatccggttttggtttaaaaaccaatcattgtttttttttaacgacacagtactatttaatatgggcttcaacatatattttaaatgatgaacccaagaaatgaaaaaaccataaaaacaagcggtcatgaaaatcgcgtcctggccagactggtacattggaaacttgaacttcatcccagactgggttaaccttttgcccatcgccattctctcatcatcacaaacagcttctcttcctgcctgctgaaacctcttctttttcccgccactcttggccttttcctccaaaatccaaccgtatccattatccattatccacgcccccggtaaccccgccacctgattacgtttcttgtttgctttctctccccaatctgcaatatcccccgagcagccccattctgtgggtggccgagtacaagctggccgagtacattgatggatcgtcggtggccgtgtgcctgacccaggccatcagcgactggacgctggccttcttcctgatgaccatctcggtgttcttcgtggtgccgttcgtgaccctggtggtgctgtacggcatcatcgcccggaatctggtctccaacagggcggccatgctgcgcgcccgtcccacgaagccggagcttagtctgaaggcccgcaagcaggtggtcctaatgctcggcgccgttgtgctgtccttcttcgtctgcctgctgcccttccgcgtcctcaccctgtggatcatcctcagcacggaccaaacactgcacgatctgggattggtgcgctactacagcttgctgtacttctgtaggatcatgttgtacctcaactcggccatgaatccgattctttacaacctgatgtcgaccaagtttcgaaggggtttcaagcggctttgtcaggacgcagggcgattactgctggaattggtgacattgggaagaaggaaggaagactcttctcgcgggcgcagaggtaccttgtcactgggcatgggcaccaatacgaacacgaataccaactcctcaaatgccacaggagccacgagctccagcattctctcgagaagctccaatcgcaggtgcagcgaggatatcagtcgcacccgccttaagatcgagatgcagatgccatgtggcagcgacctggaggccatggccatgctgcagcattccaccttgggcaagggaattgccaggcgagtgagtgatagccgtctcatgcctctgagaaatcatcaaccacgacgccacaagccgcaaataagtttcgacgaggagtcactggaggagaataagcgtagtgaagcgaaaatcccaacaaaatgtcgagaaaagcttcctggaatagcaagagaaatagtaaatctgaccgaaaataccctctaagcgagatgggcgtgaaaaatcgcctttaacccgtttacacactcgcttcacttggctggaatgtgccgatgacgctgatcccgatcccgattcctattcccgctcctggtaaacacaaatcgcttcctgaacgcttttggcagccataatcgatttcagtcacccgctgacagctgccgagaatcccgaatcgtagttgggctgccgccttggacatttccgtaccaaaaacaatcaatttttcgggctattaaactcgaatgaatgtgccaaagataaataacagcaacgacagccgaacagcactaaaactaccactactggtcagggttaggagtccagatatcgactggcagtaaggggtaagccattaggtggccttcgaggagcggagctggcaaatggaaatggcttaatatgcgtttgggcgaaccatcaggtcggcggataaacatgatttaggtgtattgaaatagtttccgtacgccggaccgtacaaaatggccgccattacacgggcggccatcaccggaagtcgaaaaaactgttgcctacttgccggcagctcaaataaaaagcttagctcaatatgcacacaatgtccacatgtaaacacagctgtacatacacatacatacccccacacgcacacatagccaaatattaatatttatatttgtacgaacatatttatatacacatatttacatatatatagtctgcttataaatatgtacaaggaaccacacgcacacactcacacacacacgagagtttgtaagtaaataaattttttatgacaactcatggcgggacttttccacattaccccatccaatcggaatctgtaatttatataattctaaggaaatcggacaaatgttcgtcctctgtaaatatacgtattcgtaccatgcgcgtagctttttaatttgttttcgtagccctatgacgtagactcccacttttgtagagtaaaaagtaataagtagcttgaacccacaccatcctgcgagtatgatgagtatgagcagacgctgccgtttccgtttccgctgtgtgattaagttgagtgcttcgcccccgaaacttttccagtagttagccgttgagtagcttttaaatatttgtttgtttcctgcccgcagcgcgataaaactttgcagacagcgctagtcactctagtccccgctaaaactgataatatgattcttgcagtcccatcatcgccatatccacctacagcgtggaaccctacggggacggaaccgatgctcccgtttgcaccaccgccgccgatggtttctggtcgatcttctacttcgtgggctgcatcacggtgtttttcttcctgcccttcggcatcctggttcttctatacgcggccatcgcttacaagctgctccgtcccaacaacgccttccaccgaccaacctccccgcagccacagcagccgtccggcggagccaccagtggctcctcacaggtgcccagcaccaagggtaacagccatcaacaaagcaacgggatgaggaagcatcgcaagcaggtaatcttcatgctggtggccgtggtgtctagcttttttgtttgccttctacccttccgggccttcaccctctgggtgatcctggccagcgccgaggatgtcgagggtctgggcattgccggctactacaacctgctgtacttctcgcgcttcatgctctacctaaactcagccatgaacccgatcctctacaacctgatgtcctccaaatttcgcagcggcttctggcggctgctgctcacttgtctgggccaacggccacatcaccaccatcgccaccactaccatcagaggcagcatccaacggcaggcggaagtgggcgcaatgcgtccacgcgacaggaacaggatgccgaggaaggagctgcgctggcgggaacgaccagcgcccgacatccacgtcgcacactccgccgcgaggccaccttcttgatcaactccatatccacctcctcgggtacggatcgcaccacatcatcatcggcgtggcgcagcaacagtctgtccatttccggtctgagcgaacgggagcgcggcatactgggagccgctatcatcggcacaacggctgccaccgttacaaccgcctgtctgcaggagcgacgcgccagcaagatctgaatcccatcctaaatatgcatccttcgagtccctgtccactgccagcaaccgttaaagtatttagttgaattccaacagcaaatagtcatagttttagaaaaattttgttgtaaagactgaagtacctcagaagaagtcaataaacgcaagagaagatgtttttgaaaatcgaaactaattttcttcgggcttcgaaaaattgaagtttgcaagattcgaaatagctttaacttgatttttagaacagaaacgagtatgaacttttcatacgatcatttttatcgcacctattgtgatttaatgggagataggaggagaccaattgggatatgcaaaaataacgcaactattattatctttgtatgtacgattaattttaatctctaaagagtcaaagtacttcaataattttacaaatctgtcggagggaatgtaagcttgcccaaatcaaatggaagctacaatcgttgtcagatggagatattttatgttagaaggaatatctcggatacgaaatatttaatttaaaattccttttcatattattctttttaaaaaataataagtcctgtatgtatacaatgcaatacataaaggtagagtatgtcctaaaaagaaaaatatctttccgaatatatgtatataatttataaaataagtggatacatacatttttcgtaagtatcctagaagatttgccaacgtatcaggtttacaaaaattgattacctatgtgcagttaacttaacggcagtgcactaactaatctgatttgtgaaataatgcagatataaaacatttttaaatagaaatatatttatacatctgattcttcaacatctaagcactcgtatagagtgctttgaatatattctaaatacattggcatgatccaagttttaaatcagccaaaaacttgctccaaaaacaggaagattctacacaaatcgcctcgcccttaaagtttctgccaagtatttgggtgcgtgcggatcagttc

SEQ ID NO: 12521 - DNA, 2196 bp, DROSOPHILA
atgcgcaactcgacaaacatcttcctaaccaacctgagcattgcggacctgctggtgctgctcgtctgcacgcccaccgtcctcgtggaggtcaacactcgcccggagacctgggtacttggccacgagatgtgcaaggctgtgccgttcgtggagctcacggtggcccacgccagtgtgctgaccatcttggccatctcgttcgagcgctattacgcaatctgcgagccattaaaggccggctacgtctgcaccaaggggcgggccatcctcatctgcgtcctggcctggggcattgctgcgctctttacgagccccattctgtgggtggccgagtacaagctggccgagtacattgatggatcgtcggtggccgtgtgcctgacccaggccatcagcgactggacgctggccttcttcctgatgaccatctcggtgttcttcgtggtgccgttcgtgaccctggtggtgctgtacggcatcatcgcccggaatctggtctccaacagggcggccatgctgcgcgcccgtcccacgaagccggagcttagtctgaaggcccgcaagcaggtggtcctaatgctcggcgccgttgtgctgtccttcttcgtctgcctgctgcccttccgcgtcctcaccctgtggatcatcctcagcacggaccaaacactgcacgatctgggattggtgcgctactacagcttgctgtacttctgtaggatcatgttgtacctcaactcggccatgaatccgattctttacaacctgatgtcgaccaagtttcgaaggggtttcaagcggctttgtcaggacgcagggcgattactgctggaattggtgacattgggaagaaggaaggaagactcttctcgcgggcgcagaggtaccttgtcactgggcatgggcaccaatacgaacacgaataccaactcctcaaatgccacaggagccacgagctccagcattctctcgagaagctccaatcgcaggtgcagcgaggatatcagtcgcacccgccttaagatcgagatgcagatgccatgtggcagcgacctggaggccatggccatgctgcagcattccaccttgggcaagggaattgccaggcgagtgagtgatagccgtctcatgcctctgagaaatcatcaaccacgacgccacaagccgcaaataagtttcgacgaggagtcactggaggagaataagcgtaggttaggagtccagatatcgactggcagtaagggtcccatcatcgccatatccacctacagcgtggaaccctacggggacggaaccgatgctcccgtttgcaccaccgccgccgatggtttctggtcgatcttctacttcgtgggctgcatcacggtgtttttcttcctgcccttcggcatcctggttcttctatacgcggccatcgcttacaagctgctccgtcccaacaacgccttccaccgaccaacctccccgcagccacagcagccgtccggcggagccaccagtggctcctcacaggtgcccagcaccaagggtaacagccatcaacaaagcaacgggatgaggaagcatcgcaagcaggtaatcttcatgctggtggccgtggtgtctagcttttttgtttgccttctacccttccgggccttcaccctctgggtgatcctggccagcgccgaggatgtcgagggtctgggcattgccggctactacaacctgctgtacttctcgcgcttcatgctctacctaaactcagccatgaacccgatcctctacaacctgatgtcctccaaatttcgcagcggcttctggcggctgctgctcacttgtctgggccaacggccacatcaccaccatcgccaccactaccatcagaggcagcatccaacggcaggcggaagtgggcgcaatgcgtccacgcgacaggaacaggatgccgaggaaggagctgcgctggcgggaacgaccagcgcccgacatccacgtcgcacactccgccgcgaggccaccttcttgatcaactccatatccacctcctcgggtacggatcgcaccacatcatcatcggcgtggcgcagcaacagtctgtccatttccggtctgagcgaacgggagcgcggcatactgggagccgctatcatcggcacaacggctgccaccgttacaaccgcctgtctgcaggagcgacgcgccagcaagatctga

SEQ ID NO: 12522 - protein, 731 aa, DROSOPHILA
MRNSTNIFLTNLSIADLLVLLVCTPTVLVEVNTRPETWVLGHEMCKAVPFVELTVAHASVLTILAISFERYYAICEPLKAGYVCTKGRAILICVLAWGIAALFTSPILWVAEYKLAEYIDGSSVAVCLTQAISDWTLAFFLMTISVFFVVPFVTLVVLYGIIARNLVSNRAAMLRARPTKPELSLKARKQVVLMLGAVVLSFFVCLLPFRVLTLWIILSTDQTLHDLGLVRYYSLLYFCRIMLYLNSAMNPILYNLMSTKFRRGFKRLCQDAGRLLLELVTLGRRKEDSSRGRRGTLSLGMGTNTNTNTNSSNATGATSSSILSRSSNRRCSEDISRTRLKIEMQMPCGSDLEAMAMLQHSTLGKGIARRVSDSRLMPLRNHQPRRHKPQISFDEESLEENKRRLGVQISTGSKGPIIAISTYSVEPYGDGTDAPVCTTAADGFWSIFYFVGCITVFFFLPFGILVLLYAAIAYKLLRPNNAFHRPTSPQPQQPSGGATSGSSQVPSTKGNSHQQSNGMRKHRKQVIFMLVAVVSSFFVCLLPFRAFTLWVILASAEDVEGLGIAGYYNLLYFSRFMLYLNSAMNPILYNLMSSKFRSGFWRLLLTCLGQRPHHHHRHHYHQRQHPTAGGSGRNASTRQEQDAEEGAALAGTTSARHPRRTLRREATFLINSISTSSGTDRTTSSSAWRSNSLSISGLSERERGILGAAIIGTTAATVTTACLQERRASKI

SEQ ID NO: 12523 - DNA, 6895 bp, DROSOPHILA
caccacaaaaaggcagaatgaaggaagcgagtgccgtcattgttgttgctgctcccgctggttgtttgacatattctgtaattgaatttcaaacaaggcgcattacaacaggccaggacgaccgaggataggacagaacggagattacaacaccacgacggacggacggacggacggccacatctacacctacatacatacacgtgtatgtacaggtccaggtccaccagttccagtttgccagtgtaccagtgtaccagtgtggcaatggcatcctttagcctgttgcgctccattccctgggacaaggaaattgagtttttgctccatttgtttgagtcactagcggccaggcgctaaattcagttaacatgcctggttggtggccaaccgaaggaacagaaaggtgtggggggggtgtcagcacgggaatcaggagcacaggatgtgcctgttgattgactgctgacccagttgccaagtttccacgtcctgccaacaggtgaggtgatcccaacacttaacacgtttactgcagagaaaagcaataattttcaccattttctcaaagtgaattatctgagattttgaatagtttgccaagtatgattgagtgctcgccacgaagaaacagccaatatcaaattcgccagattgtcatgtgtaatgtactaataattcatgtttcgaataggcgtaattcccattcacacctacctatgcgtagattacatctaattctggggcttttaaaattccaccataaaaacgggaagtttcgccatgaaaaccacaatcaaacagcagcacatagctttcgatagaatggtagtaaatcgtgggacaatggaatttaaactgataagtaaaaaaaatacaaacttctgtctgtcgaagtgaattagatctctatttcggcatagcccaactacatagtatctggtatcttcgatgtggctgaaccttagttatacatatgtatatattgtatttcacgaccttaacccttacctggctccaggcgatacagatggcaacgctgatggacgctggcgaagtagatggccagtgccccgatggccgcgcccagaacggtaaaggcgatggccaggacgagcaggcggcgccgctgctgcgactccttgagcagccagtcgctgtggctgccggtgcccgttaccatgccgggattgccctgcgctggatttcctcgctggattcccacgcctccgctgccgtcgggcgccaggaaaacgacagtgggcagcttgttctgctgctgctgctgctgttgctgctgcatctgatgtggcgcctggtgctgcacctgttgctgtcccaggagtggcgacaccaccgtggcactcagctcctccagcggcgcattcgcctgcaggtagccgttatttagcggcttctccgcggccgccgctgttgcctcatgttgctgcgacatcttctactatggggcgcctgatttgtggaccgctcagcgatcggcggacaggtgaagcggtgcagcggtgcggcgtatcagcggttcagcggacggcgtaccgttcgcagttagagagacagcgccggcgacgctggcaacatcagcctcgatgccactggaagaaattatcaaggtgagcaatatttctaaatattattattatcagctatcaaaggatagttttgatttctatgcttattcatattatctcttatcaacgcgtttctcgcatgtttgctttcactgtaggcgggcttttcgtaaatttatcagatagatgactgggtgaattttgagaccagaccggccaacaccggattcaaccagatctcttccacgatcgaagcgtggccgattcgtgcatcgagtcctcactgtggttttgcgttgcccaacaaaaaaaaaacgggggaggatcgttggggaaagaaccgcagaagttacaagtaccggcttttgaagttttgacaagtaatgatcttctgatatcatctccttcgcattgttgttgttcttggatcgtttttttttgtttcgtgatatgaccaagttgtggttgttgttgttgctgactttagtaggcagttgttgtttttgttgttgtgacatgcgatcagggccaacgtgttttacgcgcaatcgcagccggcaactcagcaactcagcaggggatgcaaagccaaacagtttgttgtgccgccgattaaagtaatcattggctaagaaggcccttgaaaatgtaatcttaaaccattcttatttgaaccataaatccattatttaaagctttggttggattgtaaccacaagcccagctcaaccagtctcttcacatggcaacagatggtagagattgcttttttatttggaagagatattcccctagaagcactgatttggggtcaccttttcgaacagaagagtattataagcttcatttctcgagtgtaacattaaatgagctgccgagtaaaattagtgttagtttatgagactagtaaacctgtcaaataaatgctaaaaggtcttacgtaaattctaatgagtattttaacaagaagtggtagagaatacgcgtctcattatctgaatatgatacatacaggcagcagttggttatgtcttttgttcacaaagtgatatgtgtatatattcggcacatgcggcgaccttactttctaaccgatattcactgtgactggaagctcggattaatgcgcggcaaattttgcaaaactcgaaactagttaacccagctgcgaatgggcagcgacgtcgacgaaggcagcagactatatcgtctatatactgtctccaagccgattcgatttgatttgatttgatctgatctgatccgatccgatggcagatgacagatctcgaatgcccatcggaaatccagagcccaatatcgtgacgctgttgaatacttaatattcacaatattctcggctcgcgatcgttttgaaaattgggcgcttctgatgagccacgtgaaattcgatacagtcgctgtattatttcgtatttattctttttttttcacatggggaagaaactcgaacggtgcgacacaaactaaaataaattaatgcgactgtcgttaaattcgcatcgtattaccgcagctggttcacaaactaaacaaaaactttgaaatttataatcgcacaggcaaaaaaaaaattggtaattctggctggcatttaggaagaggcttatctgcctgaaaattacctaagatcgtagtttcagaatcataatgtgagttctttaaaaatatatcttttgatttcgaatatcgaatatcgcaaatattcactgcacagaaaaaaatgtctcagtcccgaaattggtcaatatttcagaactgatatcgaaaacatgttaagtccacaaaaaacttgaatccacatttcaccgcttagtgttgggaatgcctatcttatttttttctgtgcactttccgtttttttgttataattttgtataatattttagtgcattactttttgttgtgctgctttattgttattgttgtaccgttcttgcttattttgttttcactatattttttttattttattattattacttatgtcttttacgactttcactgcctttgatttgattgtttgtttgttgttttgaatttgcgtttcgcctgcgagtgcgaatgggcgggcgctagtgttgcgctctctcttcctctcactcgctgtttttagttaatataattcttctacttttattttttttttgccgccaaacgcgcgaggcgacttttcgatgccaactgagcgttctcaacgcgtgtccttagcttttaagcagtcgctgtcgcggtcgccgttgctgccggcgtcgcagtcgacgtagtcgccagcagcactaacaacaaattcaaccaagtattgccaatggaagtgacaccccagaggtgtatattaaattaatgccaacttggttacagagccccaaaacgaataaaataatatggggccagatgtcgctcccagttctctgggcgaattatggatggtcaagcattaaagttcagcaacatcgcagcggagacttcctcgggagatttggagcagatagttgagttgggccaatgccatatgaagtggtcacaatctcaagaacacacaggcgagacaggagaatgaacgatttcaattcccttaacagtatccttgaatttttattgttctactgaagttgtagaaaattgcattgctagtttagtttttcagttagtttttccaaattatttttagtggaaaatgtagtacttcccgtttccaaggatatctgtaagttagccaccaatggacggtgcagaatggacagactatttacctggcaggtgggttcgatcttctgttaccttaactccaagtcattactatggcggtactacaggtgccgctaatttggcacgttccacacacgaagcggtctaatcgcggttctgtttttttttttcggctgtctgccccagccagtgtgacgctgcaagccaatcatgaatggccaaagcacccagcccctcaatcccagaggaacccagaatcaagaaaaccggataaccaagccagcaagcgatccagtggccattggcgttgacattggcattatcagtgcgtgatcatcgtgtcattgtcaatgggcttcggacagaaatattaattaccacccagtccgataagttgggagattataaagcactacccccgtcaaaaaccccatccacaggcacagcccccatccaaaacaaaagaaaaacacccacatttgtgtaattactttgtgacacttttttttttggccactcgatgcggcaggtaatcgcggaaattgcgttgcccattcgatttcgctgattgataggatacctgtccactgtccacaaattctcaaccgatcatatatgggcggcttggtggaatctcgcccgaaattcggtggggagtgtgtggattcccccgccctttaacgtaaccaagccaccctcaccctacgaacaaagaaaagccatcatttgatcgattttcgttagctgattgccatcctagctcacaaaaatagattgaaagtttccaaacacgcgctttaagctccaaaaaaagaaatgggcgcccaacaggtggcgtgaatacacggcgagaaaagtggcgtgctttcaagttatcaactaatttaattggcccaataaataaatagctaaacatgtttacataaagataatttttatgagctcagggcatctgtcgtaaatgcttaaattaccatgcacatgcttactagcattttattattttcccaggccaagtcaataagttaagttgatagtagcagtaagcagtgataagaggttttcagttaaaaagtgcaaatgcactaaaagtctaaaaatgaaaggtggcttatagaaaatttaattacttttcaggcgcttgattttttccagtgcagtagcgtgtgttcctaccacaaatcaaagttaggcacttccaatgttccggctcctgctcccatacataaattcccaaatggacaactactcccagctaccggttacctggaactttagttttggcgcaaaacttttggcatgtgcgtttcagctattccttttttcactattgacatttgcggattgtggctccttgggcgccatatggcagccaaaaagcaacgaggagaacctcgataagcacaaattttaaccgaaactcttaggaacaaaaactgagtgaccacacgaaacgaattcaggggtgttaattatttattgcaattttaagttgtgtgtaagtttctcgttttattcttggacaggatattcaaaatgcttcccttgccaacgcttattccttttgcgtgtttggcgtgcgactaaaccattttttaatcgcttagtttgccgggccggttaaaacagagctttttgaggcagaaagctcgattgggcgaagtgaacacttgttgagtggcaatgcgctgatttaggcacctgcaaatctaactaaatttattataaaatagtgttaataaagcttcctgaaatgagtaatcaaccaagcacttacaactgatgccatcgaagatgctatttaaaaataccgccaactggcggtggaaacgggttttttttggctgccccatgtgttagggctgccagctgagctgatagccttgccaccttgcgcgactagcacacttgtcaatttgtttttctttcgtgtttattatttcctagatttcttttgagctggcatttcgttctgtttttcacgttttaaccccgtttttcggtaaacctcgtttctaatctcgtgacaagtttttccaccgcccggaaagatgctaagccaattttactgcttgtttttgttgctcctccacttcttcgtgggcgtgacgttgtctgaagagggggagtgccgccgccttaatcgcgcagatatcgagggcagactgtccacaaagacgccctacagagcgatcgcaaattatgacgaaacgccaccgaaatacgccggtttgtatttttgttgttttctgtgtaacgcacccacagtaggcacccgcttagaaatacaaacatgtgttgtgccatgtgacagttaacagcgctcgcttaatacagtgaattcataatcatgaaagcatatggattctttattgatcataaaacagagaatcgctttagatttgttattatactattactagtttattattaccgatgcctactgctagcaaatggcaatggaacagctgatttttctcttttaaccgtttcacccgacaaggctgccatccgacgcgaatttggaccatcatccgacacggaactagaaatcctagcgaatccgttatccttca

SEQ ID NO: 12524 - DNA, 923 bp, DROSOPHILA
ccaaacacgcaaaaggaataagcgttggcaagggaagcattttgaatatcctgtccaagaataaaacgagaaacttacacacaacttaaaattgcaataaataattaacacccctgaattcgtttcgtgtggtcactcagtttttgttcctaagagtttcggttaaaatttgtgcttatcgaggttctcctcgttgctttttggctgccatatggcgcccaaggagccacaatccgcaaatgtcaatagtgaaaaaaggaatagctgaaacgcacatgccaaaagttttgcgccaaaactaaagttccagtggcatcgaggctgatgttgccagcgtcgccggcgctgtctctctaactgcgaacggtacgccgtccgctgaaccgctgatacgccgcaccgctgcaccgcttcacctgtccgccgatcgctgagcggtccacaaatcaggcgccccatagtagaagatgtcgcagcaacatgaggcaacagcggcggccgcggagaagccgctaaataacggctacctgcaggcgaatgcgccgctggaggagctgagtgccacggtggtgtcgccactcctgggacagcaacaggtgcagcaccaggcgccacatcagatgcagcagcaacagcagcagcagcagcagaacaagctgcccactgtcgttttcctggcgcccgacggcagcggaggcgtgggaatccagcgaggaaatccagcgcagggcaatcccggcatggtaacgggcaccggcagccacagcgactggctgctcaaggagtcgcagcagcggcgccgcctgctcgtcctggccatcgcctttaccgttctgggcgcggccatcggggcactggccatctacttcgccagcgtccatcagcgttgccatctgtatcgcctggagccaggtaagggttaa

SEQ ID NO: 12525 - protein, 151 aa, DROSOPHILA; identical to SEQ ID NO: 12519

SEQ ID NO: 12526 - DNA, 6667 bp, DROSOPHILA
tacttcatacgagagttcattcaaattggctttaatgtctccaatcatgcagataactagcgagtagaacaaaggtcaagcgaaatattagttactaactaataggcattactaataactctgtaaaccatagcgaaaagactagcaagaagacagtttgagattcgaatttcaatcatacatcatccactcgaaatctgttccgggcagtacgttctgtaaatacttaagttatgtgtaataataacaaaccaccatgcaacaaataatagttagtaagctcgccttcatacacatttaatcgagatccgtttccgtttcacacgctcatttccgtccttcgattttttcgttttgtcacccaatgtttcccacacatcttcacaaccataatgatgttttgccaaaatgcatgtgttcgttgcaaacaataaatcaattaataatgctagacgacaactgttgcactgcgtgtgtttcacaaaattaagtttcaagaattttaattatttactattaacgcagctaaaaataaataaatactgtatgcatatggaaacgatagttacatattaattttaagtaaatgcaatttcgaaacgtatagaaacaataaaaatgtgagatttaaaacaacattgcctataagcgttttttacaaaaattggaagcatgtacgctttttgtaatgtagtaggtagatcttttttgaaaccttacatttaaatgttggcgccaaaatattcctaagtttcccaccattttgcttaccaaagtttacaaccttgcggtaatcgggttttctgtggcgagcggtcacaacttagcgggtaaattcatgttagcgagtacacacctccatttagcggggttacgttccagaaagaacatcgatacaacaaatatcgatagatatatactatgcatatcgattttcgtccggctctaattttcacggtcgaggttttttcgttttaaatcgcaaaaaacacaaacaaatcagtgataaataatattgcaaccagacggtagctcaagcggaactggcaaccaatgattacgaattaacaacaaacaagtgtatgtgcacttcagttattgactaactcgccacttccttttgctcgcaacaacaaaacaacgcaaaagaatattttgagcggatgtgcgtgtgtttgtgtgtgtgtgcgtgtgagcgagatatcatgcactttgtgtagaaaaataaaagcataaaaaagatgccgagcatttagataatacttaaaccgcaaagtgagttatttacatgtgtcgagtggcaaattcaatagtatttttgattatattataagcgtgttccacgcgcatattgcgatgtgacgtaggcgtggaaattcctgtgggaaatttttcaccaccgcgccgctgtgtgggtgtgtgtgtctgccctcgcatttgtgtgagtgggtgtgtgtgggctacgccgcaagtttgttttcgtttacttttaattgccgagaaaaaggattaattgtggcactgaaaatgcgtgttacttaatgtaatgtgcaaacatgcgtaaatattcattacataaatgcaaaattcttcagtgtacattgttatgaacaaaaatatgtgcttaagtctgggcgcttatcattatatacattgcatacccgtgttttaagaaaatataccattttgcgccatcaataagtcaggctgttaaataactcaataaacaggcttgtaaaatcaatattgtgtttaaatagcaagcaaagctaactttttattgttttgttttggtcagcacttaattcttatcaagttttctagaattaaagttgccaaaattcccccaactcgttgaaaaccttaatcctgtgagtcagagaatagaaatagatcgttgcacatcggcccaatatataatacatataacaactaaactataaatgcttttgtattcttcaaagcgatcagcaatgatcgctgtttttgcgaagtaactcgactaaaccgcgatcgcattgtttgtctaacatttcagcgcttttgaaacggactccagctgggtaactcgtgtggcaaactgaaccggaaccggcagaggcagcggcagcaggagcaggaggaggacctggaccagcggaactggcaaccacctggccaaatgggtggcaatagcacaggagcgaatacgagcgccttcagcgctggcggttacattgggcccacgtcggccagcagtcatcacagcctgggaacttcatcggcggcagcggcagcagcagcaggaagtgacctgatacccgcaccaattggcacgggcaacgccatgggagtgtcttcgtatgcatacggtggaaccagttgggaggagttctgcgaacgacacgccagagtggctgcctcggatttcgccaaggcgtgcatcacgtacattaatggcaatctgccgccggaggaggcgaggaacatccagcatcgcagctttgctcagaaatttgtggaatccttttcggcgcactacgacacggagttcttcaagcggaggagcactcttaaatcaggtgcgggctcgctggacttcgaggaggagcacgaggtgccaaaactgctctcaaagtctctattaagacgactatcattcaaaggactgcgcaagggcaaggtgagttgatgctcttctcaaatcctctcgaaatcattgaatagattgatttttgattatttcgaggccacacttgatgcttatactttttttttagacatgattgttgttttctgtccgataatacccattaagaaggtcacgaatcacgaactaaaagtatgcagataaaagcattcactttagcattctttgcattctgtccataagtccgattagacctcactgaagtggtattattatcttctatttgatttgttgaatacgtcatgattatcagaacatgctgtcaattatgcaagtctttctttcaattttgcagatcatgaagtatttcacattgattaaaaagcttttcagtgccaggatgttttatagtcggaaactccggctatattgtcaccacttgttttaactgtcaaagatctctttgctgcaggccttcttccacaagaactcggatgacttggatggcagcggtggcagcggcaagcagagcaagacgaagctggccaagatcgttgtggagtgccggaaggagggcacagtgaacaacctgacgccggaaagtctggatcaaccgacgggctcccaaaagtgggagaagtgtcgacttgtactggtcaaggccgtgggtggctacatgctagagttttacacgccgcacaaggcgactaagccgcgcagtggagtcttttgtttcctcatctcggaggctcgcgaaacaacggcacttgagatgccggacaggctgaacacattcgtcctcaaggcagacaacaacatggagtatgtgattgaggcggagagcgcggaggagatgcggagttggctagccacaatacggtactgcatgcgaacgccacccactcagcagccaacgatcgagtcggatggtgttatggcgtccgccatgcaaacatcgccgacacttccgagtcccaatcccattggtgggattcagaatccgcagtaccagcagcagcgcggctcgaatggcaatctggtgggaggtggagctccgctcacctcatcgctgtctgcagacagtgctttgggccagggaggagccacttctgccagcgaactaaatgtcatcaacgaattgggcacctcaccgacctccgggccacctgacatacctgtaagaccccatcgaggtgaacagcgcctgtccgcctcaagcaacttcgatggcatcgagggcacggaaaatgatgcagatgtggcggatctgacggctgagatgagcgtgtttccctggttccacggcacactgacgcgatcagaagctgccagaatggtactccattcggatgcagccggacatggatactttttggtgcgacagagcgaaacgcgccgcggcgagttcgttctgacctttaacttccaaggacgagccaagcatttgcggctcaccatttcggagaagggtcagtgtcgggtgcagcacctgtggtttccctcgatccaggaaatgctcgaacacttccgccacaacccgataccactggaatcgggcggcacttcggatgtgactcttaccgaatgggtgcactcacacagcagactgaatgacccgacgacggcagcaaatcatgactcaggacaactcaacgatctttcgacaaatgggaatggcaatgggaacggcaatggctacgataatggtcagggttcatcgacggcatcgaatgcggcgggaggaactgcatcgggagctgctggcggtggccatccgtcgccgagacatgtgagatagccaaaattttggagtcaattcagtgtcagtgatggttttttattttactttgatttcaattaagttgttatcatttcatatcaactgggatggggcttgaactgtgaactgatgaatctagagcttagtaactaacttacattttgttttaaaaatccaaagattgattccaatagtaactttaatcaatcaatgaagctaaaattctaaattataacttgcatatttcaaaaccggataaatgaattttggaaccctttgtttcaagtaaatatgttgtattttagttagttcgtgtttagtttgatttgattgtcgcatgcttcatgtttcaccacacaccccagaccgccccgaaaaagtctccagactaactaaactttattttaaatactcttccaacagtgcaacgaagtgattaccatgaatttgagtgttcgcctaaagacaaatgaaatcgaactgccacaggagccaacacacgtctattttccggagcaagtctatttccatttggatcccacaacgctaacagtgcacggatcaccgccaccggcccagaatttcctggaccagccacatctgcgggcttcgaacgcctcccttcaggcagctgcccaccatcaggcgggttcctccggcaaccggcatcccagcgatggcggcagcaacagcggcggagcaggaggcggatcgggatccagtggaggagccgagtgcaccggacgggccgtcgataatcagtacagcttcacctaagtccgcgcgatcgatcatcaactgcatttcgcggcttaaccagcggaactttacttttgtgccattttaatcattgtcctaaaggagaggaaaattgtgttttttttcgcatcaatgtgcgttctttgctttcttgattcacttgtttctattttagttagtacctcttttggaagacatgaagtaactgaacattattatgtatacattatatagctaaatgtgtgtgttcattttaagtacatcaatgttgtatgtatagaaaagaagaacctaaaaaaaaaaaaacgcaaaagaaaattgtacgatttttgtgggcaccaaaggtgcgactcatgcgaatcctaaaacttcctgctttacaaaacaaaaatacatacatatataccatacttataaatataaattatatatacataaatatatattgaaattggtaaactacaataaatgaagttatgtaaaagtaaaccaacgtcggtcttctttcatttgggctttgggttttaaagtggttattttaattacttttaccaagtctttatattatatataaattcgtttgaaataaggtaacgaaaaatgtttttcaaaatatttgcatggtatgtgcccgtgctaacctcgcagcgctattttgacaagttggcaggttggctttggaaaagtttttgatatttccgacccacaaagcaatggtcacattgccacgccggtgagaggcaaaaagttgacaattcgaggaaaagctgaaactctcgaaggatatggaagatctggaactgtatttggtggattccctgaaggcgctgtccttccaagggcactgccaaaagcaggaaaatctgagtcgtgccctggacgcgggtattgaaagtccagacatgcaagaggtggttctttggctcgcccacgaattgcacattttgcggaaaaccgatgagcgggtgaatcagggcaaagcccttaacaaagacttttccttcgagctgtctctgctactcacggaacttggctgcccgtaccgcgagctggtgcagggacccatagagcagcgattcaagagccgtatggcactggtgcagctgctggagtacctcacatccgaactgatgaccaccaaaatggttctgaaggcccagcccgtgggtccaccctgcaaacgatcgaaggtggacacgaatgtccaacaggttgtcgaaaacttagccaaggatcttcagctgggcgaagtgcctaagaacatcaataccaagatgcttttcgagaagataactccccgcttggagcaggccattaaaaaaaccaatccccaagtgctcagcgaaccgctgttgaagcttaagaagcccttgactgatgcacaatggcaattgttggagaccctgcaccgagaactggaggcggagtacaatttgcgcaggcagatgatgtccacgcgtctggaggccactgtacaaagctttcagtggtcggagtct

SEQ ID NO: 12527 - DNA, 3051 bp, DROSOPHILA
cagtgataaataatattgcaaccagacggtagctcaagcggaactggcaaccaatgattacgaattaacaacaaacaagtgtatgtgcacttcagttattgactaactcgccacttccttttgctcgcaacaacaaaacaacgcaaaagaatattttgagcggatgtgcgtgtgtttgtgtgtgtgtgcgtgtgagcgagatatcatgcactttgtgtagaaaaataaaagcataaaaaagatgccgagcatttagataatacttaaaccgcaaacgcttttgaaacggactccagctgggtaactcgtgtggcaaactgaaccggaaccggcagaggcagcggcagcaggagcaggaggaggacctggaccagcggaactggcaaccacctggccaaatgggtggcaatagcacaggagcgaatacgagcgccttcagcgctggcggttacattgggcccacgtcggccagcagtcatcacagcctgggaacttcatcggcggcagcggcagcagcagcaggaagtgacctgatacccgcaccaattggcacgggcaacgccatgggagtgtcttcgtatgcatacggtggaaccagttgggaggagttctgcgaacgacacgccagagtggctgcctcggatttcgccaaggcgtgcatcacgtacattaatggcaatctgccgccggaggaggcgaggaacatccagcatcgcagctttgctcagaaatttgtggaatccttttcggcgcactacgacacggagttcttcaagcggaggagcactcttaaatcaggtgcgggctcgctggacttcgaggaggagcacgaggtgccaaaactgctctcaaagtctctattaagacgactatcattcaaaggactgcgcaagggcaaggccttcttccacaagaactcggatgacttggatggcagcggtggcagcggcaagcagagcaagacgaagctggccaagatcgttgtggagtgccggaaggagggcacagtgaacaacctgacgccggaaagtctggatcaaccgacgggctcccaaaagtgggagaagtgtcgacttgtactggtcaaggccgtgggtggctacatgctagagttttacacgccgcacaaggcgactaagccgcgcagtggagtcttttgtttcctcatctcggaggctcgcgaaacaacggcacttgagatgccggacaggctgaacacattcgtcctcaaggcagacaacaacatggagtatgtgattgaggcggagagcgcggaggagatgcggagttggctagccacaatacggtactgcatgcgaacgccacccactcagcagccaacgatcgagtcggatggtgttatggcgtccgccatgcaaacatcgccgacacttccgagtcccaatcccattggtgggattcagaatccgcagtaccagcagcagcgcggctcgaatggcaatctggtgggaggtggagctccgctcacctcatcgctgtctgcagacagtgctttgggccagggaggagccacttctgccagcgaactaaatgtcatcaacgaattgggcacctcaccgacctccgggccacctgacatacctgtaagaccccatcgaggtgaacagcgcctgtccgcctcaagcaacttcgatggcatcgagggcacggaaaatgatgcagatgtggcggatctgacggctgagatgagcgtgtttccctggttccacggcacactgacgcgatcagaagctgccagaatggtactccattcggatgcagccggacatggatactttttggtgcgacagagcgaaacgcgccgcggcgagttcgttctgacctttaacttccaaggacgagccaagcatttgcggctcaccatttcggagaagggtcagtgtcgggtgcagcacctgtggtttccctcgatccaggaaatgctcgaacacttccgccacaacccgataccactggaatcgggcggcacttcggatgtgactcttaccgaatgggtgcactcacacagcagactgaatgacccgacgacggcagcaaatcatgactcaggacaactcaacgatctttcgacaaatgggaatggcaatgggaacggcaatggctacgataatggtcagggttcatcgacggcatcgaatgcggcgggaggaactgcatcgggagctgctggcggtggccatccgtcgccgagacattgcaacgaagtgattaccatgaatttgagtgttcgcctaaagacaaatgaaatcgaactgccacaggagccaacacacgtctattttccggagcaagtctatttccatttggatcccacaacgctaacagtgcacggatcaccgccaccggcccagaatttcctggaccagccacatctgcgggcttcgaacgcctcccttcaggcagctgcccaccatcaggcgggttcctccggcaaccggcatcccagcgatggcggcagcaacagcggcggagcaggaggcggatcgggatccagtggaggagccgagtgcaccggacgggccgtcgataatcagtacagcttcacctaagtccgcgcgatcgatcatcaactgcatttcgcggcttaaccagcggaactttacttttgtgccattttaatcattgtcctaaaggagaggaaaattgtgttttttttcgcatcaatgtgcgttctttgctttcttgattcacttgtttctattttagttagtacctcttttggaagacatgaagtaactgaacattattatgtatacattatatagctaaatgtgtgtgttcattttaagtacatcaatgttgtatgtatagaaaagaagaacctaaaaaaaaaaaaacgcaaaagaaaattgtacgatttttgtgggcaccaaaggtgcgactcatgcgaatcctaaaacttcctgctttacaaaacaaaaatacatacatatataccatacttataaatataaattatatatacataaatatatattgaaattggtaaactacaataaatgaagttatgtaaaagtaaaccaacgtcgg

SEQ ID NO: 12528 - protein, 723 aa, DROSOPHILA
MGGNSTGANTSAFSAGGYIGPTSASSHHSLGTSSAAAAAAAGSDLIPAPIGTGNAMGVSSYAYGGTSWEEFCERHARVAASDFAKACITYINGNLPPEEARNIQHRSFAQKFVESFSAHYDTEFFKRRSTLKSGAGSLDFEEEHEVPKLLSKSLLRRLSFKGLRKGKAFFHKNSDDLDGSGGSGKQSKTKLAKIVVECRKEGTVNNLTPESLDQPTGSQKWEKCRLVLVKAVGGYMLEFYTPHKATKPRSGVFCFLISEARETTALEMPDRLNTFVLKADNNMEYVIEAESAEEMRSWLATIRYCMRTPPTQQPTIESDGVMASAMQTSPTLPSPNPIGGIQNPQYQQQRGSNGNLVGGGAPLTSSLSADSALGQGGATSASELNVINELGTSPTSGPPDIPVRPHRGEQRLSASSNFDGIEGTENDADVADLTAEMSVFPWFHGTLTRSEAARMVLHSDAAGHGYFLVRQSETRRGEFVLTFNFQGRAKHLRLTISEKGQCRVQHLWFPSIQEMLEHFRHNPIPLESGGTSDVTLTEWVHSHSRLNDPTTAANHDSGQLNDLSTNGNGNGNGNGYDNGQGSSTASNAAGGTASGAAGGGHPSPRHCNEVITMNLSVRLKTNEIELPQEPTHVYFPEQVYFHLDPTTLTVHGSPPPAQNFLDQPHLRASNASLQAAAHHQAGSSGNRHPSDGGSNSGGAGGGSGSSGGAECTGRAVDNQYSFT

SEQ ID NO: 12529 - DNA, 7139 bp, DROSOPHILA
aagagagagttacatgttaagaaagtcttctatttactcttttagtaacgtatttaaaagaatataaagaagttggtcaaataacctaatattatgtcgcgagactttatttcgaaaactgagttaggcgccaaactatcgataggcaactcaacagttgttttagccgtacaatcccaatcctcaagaaacggcatttactgcgccactgtctacacccacctcgctcagctgtttcacttgtctctctcgcacacataatcgtgaacgtgtcaagcgaaggcttttgttttcgttccgcattttccttacttttggctattttccggacgagatggtggacgacagcactcgaaaaacgttgagcaacattccgctgctgcagattcgcgctggtccgcgcgaaaaggatgtgtgggtgcagcggctcaaggaggagtaccaggcactaattaaggtacatacatacatccatagtatgttccatggaactattaacgtttccttgcttgcagtatgtggagaacaacaaacagtccggcagcgactggttccgtctggaatccaacaaggagggcaccaagtggttcggaaagtgttggtacatgcacaacctgttaaagtacgagttcgacgtggagttcgacattccagtgacgtacccaaccaccgcgcccgagattgccctgccagaacttgacggcaagacagcgaagatgtaccgtggtggcaagatctgtctgacggatcactttaagccactgtgggcacgcaatgttcccaagtttgggatcgcccacgctatggctctgggtgtaagtactctaaatataccaccgccttcgttggatctgcttcatcaatcctttgttacagcttgctccctggctggccgtggagattccggatctcatcgagaagggaatcattacgtacaaggaaaagtagctaactcaactagataaaattactggcaacaaaacaatgaacaaagtttgatacgaaagtcaattatctttgcgtttattagtcaaaagtcaaattggaaaagatcattcagcgttcctccatcgtcgcgtatcctaggtgtctaagtggtaagaatttcatttggttgattcggtttgatcagtgagcttgctcctcgtcattcccttagttcatgtggttatggttgttgcgctgtgatgactgacgccacgtatccgaccagattgagcttggcgaggtaaaaggatcgtattgcgtgggtaggctttcgccgtgtagtgcagctccagttccagatgccggtcccgctgagacctgttcttgtgcaaggttgtgcgtctgacgtgcgctctgctccagacctggaggaggacgcatgacaccgatgccagctgtggcattgggccaggtggagtatcctagtggtgaccagtttgtggcccagttgctcggatccatattcgccagcagcgaaatcttctcctgctgccttagctgaaactctagtttctggggctgctgaagaagtagctgctgtcgcatgaccaagtcgctccgctgttcccactgcggcttttcccgctccctttgttcgtagatagctgttcgagtagaaatacattagggaattgtgagcttataatcattatagcgacttaccatctggcgttatgaaatccacctcggtgttggcgaacagcgaattactggccgtagctgaaagtggctcccacagcgatgtcaccatcggtggcgtggcgttctttcggttatctccgatcggtccgagatcactcgaagacgtcgcatggttccaatcgaaaccattatctgtgggcgccatttgaggagtccgaagcacatcccggaaggagacgcgactgctcgtctcccaaggattgctgatgcatttaagcgcatctggtgactctggcggcgacgtgctattcgtggtctgcccaaaattcaacttctggcgctgttttcgctctggctttctgaatcccactccagcccccgtgccattggtcaacttttgatccttcgaacggcgttccctttcccgttctctgcctggtgtttttcccattttcttggccgatccgttctgttccttaagcacacgctgttctggtggcttgttgggcttgggcgatatgttctcctgctgtggtggactcgatttggccaacgacttttcgtgttgatccgcaacgggggtcgatacttcctgcttgggtttggttgtcccaaggaccactgccggtgtaggttttactttcttctgtggccgtacctgaactgatataggaacaccttgaggcgatggcgtcgaagatttcttaacgggctttgcctctggcaaggggacaggagcagcagcaggagcactagcagcaggaggggtaactggagtgcttaccactgtctttggtttggctttttgtagatgcttgcttagcgcattcatgtccatgctccatggtgaccatgaggacttcgactttgactttgaattcgtggaatttactactgttcgctttcgcaactccttcagttggccatttttgaccttctgctgttgctgcacagactctgctttagctgctgcctcctccgcctgcagttttactatattccgtaaattaaacgtaggctgcaaaggacccttgtttcgggccgcatcgtaggcattctgttgaaccattatggcttttgcatcaaagaccgccgccaccaaaaccagtccaaagctggccagtaacactacaagagcggcgttttttagggaggattcccatccaggtcgaaccaaaagcgaagcacatagttccacactttccgctggcatttgtgctagaagtttatagcttatatcgtaggtgaggttcgttagcagcgtaagggatcgttttaccgccgaggtagtaaagtctgcgctaaacgcaatctccacttttctagcttcattctcgcccagatcgaatcccgcgcaatccatcaccttaaagccgaaatcctcacacggcagcgagccaatgaggaagccctcgatcctgattgggatgacacccgagttgcgtgccgtaaaactgcgagttactaccactgcttcattgccagactgacagccctgaaattggttggtggccatctcaaagagcaacggcgatgcggctcccgggcgccgatttccaaaacggaactgcgactgcacggcgcgagcctgtagccacacagcctcatacagcgtaagattgcttctcacatgcagcagggtacagtacttctccggcagctgggcgctgaaagtgatggggatggttaagctggcgccaccaggcaacagaatgggatccccggcttcaggcagggaaaaaacctctttatctgtcagatagcaacttgttgagctcacgtcaatcacttcgtggggtaacgatagctgcgtacgtcgcgcaaaagccggatccgatagaaagtaatcgagcaggagcggactctgcgaaggattcgtcagcgttatccactggcgctgcacctggccaacctcaatagccggagtgggtggaataggctgaaactgcaccagtttcggccactcaatcgttatggaaaagtccaactccaacggcggtagctcttcgctgtgtagcgttaaggacatagatgatagttggcgtcgcaactgtctaaagagttccgtgcgctgtctcaactccactccgtcatagaggagattattgttgataacgccactgttgccattccctccacctggaacgctagggaagatagcaagatcgttggtggactctcgtatatagcaattatttcgacacacggacgcagggtcaaagtaaatgcgtccaaccttggtaagcgtttgtggagcaatcgtagtgcccttcgcattaaagtccttaaagcgcagtcccaccggaagtgcaaaggatatacccttcacgtgcaccgggtgtgtgaagcttgaccggatgctcagcacggcagtgcacattttgccaggaaagcagttcttaaagctgagctgctcctgatcaatctctaagtggcccacagaggcctcgaacttaactcggacgcgaatcacctcgtatggcgtccagaccttaagggttccgaacgttgcatccgcttcgtacgtctgaatggcaactttaaatacggcgctctcaccggcacggatctctgtgcataaatgccatccctttgtatcgttctcgacacttaccggatgtccgatggccgtggcgcggcaacccaggaaggtgctttgtgagtagacagtttttggatgcttgaagaaccagttggtgattctaacgggcactggattgtcgttcctcaggatcacgaatccgtcacgcgacatctcggcgaatggcactgtacccagatctagctccaggttatatgccgctttctccagcgattcctgtcgaaagttaagcacaattggctgcgtggaaacgtgtaaacgtccactgcatgataccaatggaagtttaaagaccgtcacgttcgtctcaatcctcagaaaggatttgaacggcacctggtcgtttagcagatttagacgcaggagctcaacagattcgtccggctgaattagtatccttggatcgcctacgagggttacttccaatatggattcatcaatgggctctgtgagacttacgttaaagagcattaggggtattgcgaacttgttccgcaccaccagcgatcgttttctttccagcggttcaccctcgacgccttctggcgaggtggtcacaaatctggtggcatttctgtcgaaggtgagccctccatggaagatttccgctcgcaccagcactgtaaacggctgatccgcaccaggactggtactggactggttactgttgatcaccagcagatcattaatgatctcatcgccttcgaataggctggcatccaacactatacttgtgttgtttgcgtcaaacgagagacccggaatctggcgaaggtaactgccgaagagttggcgactctcgtcgttccgaacgtccagcttgaactgtagtgcatccggagcatttaaagtggccacacggccaaagtccgccagtggattgcgggcgtacacagaatgtcgtggcagaatctcaaattcgacaggaataaaaatatccagttcctgctctgcgaccttgatgcgtatgtaggcgctgtgattgccagctgtgcggccgtgaaatgatatcctaatgaccggctttaaagtgtgtggaggaattttccacagattttgtgggccctccgagccaccgctgggcaactctaactgaaactcgccgccgctgctgtatatctaaaagacatggttatgggtaatatacctacagagtgttgattaaaacctacctcaagtatctgcagcggccgctcgtgcgggttgtacatgtgaatctctggcgtgagtgtcgcattcatgggcgccttaatgcccaccaacggctttaggcggtacgggcactcactgccctcgccctgtaccgccaactcggcctggccgaaggaggtgtgaatgagaaggtcggcggcaatggcgcctagttggcgcggtaggaacaccacgttgaaagttgtattgccttgcggcggcacctctctcgtgcccaggaagctgctgtagaacgccggacttggtccggccaccgcgttcagctggagcgttcgattggagtgttgattgaatagtgtcaccgtctgagaacgcgcctggccgacggaccacgttccaaagtctagacgggacggcacaagccgaaggtcccccaaatcgtggattggtgcctcctgcagccccaggaaagtctcctgcaggaccttttcacctttggcgcccaaagtgaaaaggaagattaggatgagcaggatgggttctgcgaatattcgcaaaagcggcctcatctggacttgtgtgggcatggcgtgcgttcccttgatcctgggatgctgtgtgtgtgtgtgttcgtgtgggcggcgatggcgcagctcctggtaaccgactttctgtccagctgctaatctaaattggagtttccttggcgttgcgctttatttatattatccaatatcgctggccaaaaattattatcgcttttcggtgtgaccgccgtggaatacataaaacataccatccggcacagggaaatactaatcatatgatcattttaaaaatataccattaaagcacagaatccttttttaaggcgcatcaggtggctacataaattgcttgatatatgggcttatgtttagttgatttcttgctggtagtataatttaagcgttcaatggcatgcgattaaatttaacattgtattgtagcagattattaaaataatgaaatatttatatattattaaatatatataaaaaaatatatatttaatttgtttactataaatgctattaatattatagagcctagcgcatacagttaatactgtatataatattacatactgttgcgcagtattttaaaacgcgccaaaaagtatgctcgaaaaaaattaataacaaaatgtatcgccatgtattcgagggaaaacagtgaaagagctatcgaaacttggccatcgctagctaaagaaacgacaaccgaaagaaagttgcagtttagtttacgtgttaaaattaatcgcaggtcgtgaagctgatttaactaaagtgagtgctctcgtcgcccgttaatatacccgcgtatatacacccacaatttcattgaatagtgacgagtacaaaggaaaacatgaccaaatgaaatttcgcacagatcgttcggcttgctccacgcacttacactcacacacacacacacacacacacacacacacacacactataatcacatattcgctgaatattgcagaaatattaatgcgaaaatcagcaagcattttgcaataattactgaaggcgaagattaacagctatttgacccacgaacggtgatgcaacagccctattgattttgcccactttcaccgcttacaacatttttagtttgggcttcggtttcggtttcgcatttagttttttttagtttcaccagcagggcagccaatttgcatacgcatcggctaggcgtgaac

SEQ ID NO: 12530 - DNA, 4947 bp, DROSOPHILA
ataataatttttggccagcgatattggataatataaataaagcgcaacgccaaggaaactccaatttagattagcagctggacagaaagtcggttaccaggagctgcgccatcgccgcccacacgaacacacacacacacagcatcccaggatcaagggaacgcacgccatgcccacacaagtccagatgaggccgcttttgcgaatattcgcagaacccatcctgctcatcctaatcttccttttcactttgggcgccaaaggtgaaaaggtcctgcaggagactttcctggggctgcaggaggcaccaatccacgatttgggggaccttcggcttgtgccgtcccgtctagactttggaacgtggtccgtcggccaggcgcgttctcagacggtgacactattcaatcaacactccaatcgaacgctccagctgaacgcggtggccggaccaagtccggcgttctacagcagcttcctgggcacgagagaggtgccgccgcaaggcaatacaactttcaacgtggtgttcctaccgcgccaactaggcgccattgccgccgaccttctcattcacacctccttcggccaggccgagttggcggtacagggcgagggcagtgagtgcccgtaccgcctaaagccgttggtgggcattaaggcgcccatgaatgcgacactcacgccagagattcacatgtacaacccgcacgagcggccgctgcagatacttgagatatacagcagcggcggcgagtttcagttagagttgcccagcggtggctcggagggcccacaaaatctgtggaaaattcctccacacactttaaagccggtcattaggatatcatttcacggccgcacagctggcaatcacagcgcctacatacgcatcaaggtcgcagagcaggaactggatatttttattcctgtcgaatttgagattctgccacgacattctgtgtacgcccgcaatccactggcggactttggccgtgtggccactttaaatgctccggatgcactacagttcaagctggacgttcggaacgacgagagtcgccaactcttcggcagttaccttcgccagattccgggtctctcgtttgacgcaaacaacacaagtatagtgttggatgccagcctattcgaaggcgatgagatcattaatgatctgctggtgatcaacagtaaccagtccagtaccagtcctggtgcggatcagccgtttacagtgctggtgcgagcggaaatcttccatggagggctcaccttcgacagaaatgccaccagatttgtgaccacctcgccagaaggcgtcgagggtgaaccgctggaaagaaaacgatcgctggtggtgcggaacaagttcgcaatacccctaatgctctttaacgtaagtctcacagagcccattgatgaatccatattggaagtaaccctcgtaggcgatccaaggatactaattcagccggacgaatctgttgagctcctgcgtctaaatctgctaaacgaccaggtgccgttcaaatcctttctgaggattgagacgaacgtgacggtctttaaacttccattggtatcatgcagtggacgtttacacgtttccacgcagccaattgtgcttaactttcgacaggaatcgctggagaaagcggcatataacctggagctagatctgggtacagtgccattcgccgagatgtcgcgtgacggattcgtgatcctgaggaacgacaatccagtgcccgttagaatcaccaactgtgtcgagaacgatacaaagggatggcatttatgcacagagatccgtgccggtgagagcgccgtatttaaagttgccattcagacgtacgaagcggatgcaacgttcggaacccttaaggtctggacgccatacgaggtgattcgcgtccgagttaagttcgaggcctctgtgggccacttagagattgatcaggagcagctcagctttaagaactgctttcctggcaaaatgtgcactgccgtgctgagcatccggtcaagcttcacacacccggtgcacgtgaagggtatatcctttgcacttccggtgggactgcgctttaaggactttaatgcgaagggcactacgattgctccacaaacgcttaccaaggttggacgcatttactttgaccctgcgtccgtgtgtcgaaataattgctatatacgagagtccaccaacgatcttgctatcttccctagcgttccaggtggagggaatggcaacagtggcgttatcaacaataatctcctctatgacggagtggagttgagacagcgcacggaactctttagacagttgcgacgccaactatcatctatgtccttaacgctacacagcgaagagctaccgccgttggagttggacttttccataacgattgagtggccgaaactggtgcagtttcagcctattccacccactccggctattgaggttggccaggtgcagcgccagtggataacgctgacgaatccttcgcagagtccgctcctgctcgattactttctatcggatccggcttttgcgcgacgtacgcagctatcgttaccccacgaagtgattgacgtgagctcaacaagttgctatctgacagataaagaggttttttccctgcctgaagccggggatcccattctgttgcctggtggcgccagcttaaccatccccatcactttcagcgcccagctgccggagaagtactgtaccctgctgcatgtgagaagcaatcttacgctgtatgaggctgtgtggctacaggctcgcgccgtgcagtcgcagttccgttttggaaatcggcgcccgggagccgcatcgccgttgctctttgagatggccaccaaccaatttcagggctgtcagtctggcaatgaagcagtggtagtaactcgcagttttacggcacgcaactcgggtgtcatcccaatcaggatcgagggcttcctcattggctcgctgccgtgtgaggatttcggctttaaggtgatggattgcgcgggattcgatctgggcgagaatgaagctagaaaagtggagattgcgtttagcgcagactttactacctcggcggtaaaacgatcccttacgctgctaacgaacctcacctacgatataagctataaacttctagcacaaatgccagcggaaagtgtggaactatgtgcttcgcttttggttcgacctggatgggaatcctccctaaaaaacgccgctcttgtagtgttactggccagctttggactggttttggtggcggcggtctttgatgcaaaagccataatggttcaacagaatgcctacgatgcggcccgaaacaagggtcctttgcagcctacgtttaatttacggaatatagtaaaactgcaggcggaggaggcagcagctaaagcagagtctgtgcagcaacagcagaaggtcaaaaatggccaactgaaggagttgcgaaagcgaacagtagtaaattccacgaattcaaagtcaaagtcgaagtcctcatggtcaccatggagcatggacatgaatgcgctaagcaagcatctacaaaaagccaaaccaaagacagtggtaagcactccagttacccctcctgctgctagtgctcctgctgctgctcctgtccccttgccagaggcaaagcccgttaagaaatcttcgacgccatcgcctcaaggtgttcctatatcagttcaggtacggccacagaagaaagtaaaacctacaccggcagtggtccttgggacaaccaaacccaagcaggaagtatcgacccccgttgcggatcaacacgaaaagtcgttggccaaatcgagtccaccacagcaggagaacatatcgcccaagcccaacaagccaccagaacagcgtgtgcttaaggaacagaacggatcggccaagaaaatgggaaaaacaccaggcagagaacgggaaagggaacgccgttcgaaggatcaaaagttgaccaatggcacgggggctggagtgggattcagaaagccagagcgaaaacagcgccagaagttgaattttgggcagaccacgaatagcacgtcgccgccagagtcaccagatgcgcttaaatgcatcagcaatccttgggagacgagcagtcgcgtctccttccgggatgtgcttcggactcctcaaatggcgcccacagataatggtttcgattggaaccatgcgacgtcttcgagtgatctcggaccgatcggagataaccgaaagaacgccacgccaccgatggtgacatcgctgtgggagccactttcagctacggccagtaattcgctgttcgccaacaccgaggtggatttcataacgccagatgctatctacgaacaaagggagcgggaaaagccgcagtgggaacagcggagcgacttggtcatgcgacagcagctacttcttcagcagccccagaaactagagtttcagctaaggcagcaggagaagatttcgctgctggcgaatatggatccgagcaactgggccacaaactggtcaccactaggatactccacctggcccaatgccacagctggcatcggtgtcatgcgtcctcctccaggtctggagcagagcgcacgtcagacgcacaaccttgcacaagaacaggtctcagcgggaccggcatctggaactggagctgcactacacggcgaaagcctacccacgcaatacgatccttttacctcgccaagctcaatctggtcggatacgtggcgtcagtcatcacagcgcaacaaccataaccacatgaactaagggaatgacgaggagcaagctcactgatcaaaccgaatcaaccaaatgaaattcttaccacttagacacctaggatacgcgacgatggaggaacgctgaatgatcttttccaatttgacttttgactaataaacgcaaagataattgactttcgt

SEQ ID NO: 12531 - protein, 1540 aa, DROSOPHILA
MPTQVQMRPLLRIFAEPILLILIFLFTLGAKGEKVLQETFLGLQEAPIHDLGDLRLVPSRLDFGTWSVGQARSQTVTLFNQHSNRTLQLNAVAGPSPAFYSSFLGTREVPPQGNTTFNVVFLPRQLGAIAADLLIHTSFGQAELAVQGEGSECPYRLKPLVGIKAPMNATLTPEIHMYNPHERPLQILEIYSSGGEFQLELPSGGSEGPQNLWKIPPHTLKPVIRISFHGRTAGNHSAYIRIKVAEQELDIFIPVEFEILPRHSVYARNPLADFGRVATLNAPDALQFKLDVRNDESRQLFGSYLRQIPGLSFDANNTSIVLDASLFEGDEIINDLLVINSNQSSTSPGADQPFTVLVRAEIFHGGLTFDRNATRFVTTSPEGVEGEPLERKRSLVVRNKFAIPLMLFNVSLTEPIDESILEVTLVGDPRILIQPDESVELLRLNLLNDQVPFKSFLRIETNVTVFKLPLVSCSGRLHVSTQPIVLNFRQESLEKAAYNLELDLGTVPFAEMSRDGFVILRNDNPVPVRITNCVENDTKGWHLCTEIRAGESAVFKVAIQTYEADATFGTLKVWTPYEVIRVRVKFEASVGHLEIDQEQLSFKNCFPGKMCTAVLSIRSSFTHPVHVKGISFALPVGLRFKDFNAKGTTIAPQTLTKVGRIYFDPASVCRNNCYIRESTNDLAIFPSVPGGGNGNSGVINNNLLYDGVELRQRTELFRQLRRQLSSMSLTLHSEELPPLELDFSITIEWPKLVQFQPIPPTPAIEVGQVQRQWITLTNPSQSPLLLDYFLSDPAFARRTQLSLPHEVIDVSSTSCYLTDKEVFSLPEAGDPILLPGGASLTIPITFSAQLPEKYCTLLHVRSNLTLYEAVWLQARAVQSQFRFGNRRPGAASPLLFEMATNQFQGCQSGNEAVVVTRSFTARNSGVIPIRIEGFLIGSLPCEDFGFKVMDCAGFDLGENEARKVEIAFSADFTTSAVKRSLTLLTNLTYDISYKLLAQMPAESVELCASLLVRPGWESSLKNAALVVLLASFGLVLVAAVFDAKAIMVQQNAYDAARNKGPLQPTFNLRNIVKLQAEEAAAKAESVQQQQKVKNGQLKELRKRTVVNSTNSKSKSKSSWSPWSMDMNALSKHLQKAKPKTVVSTPVTPPAASAPAAAPVPLPEAKPVKKSSTPSPQGVPISVQVRPQKKVKPTPAVVLGTTKPKQEVSTPVADQHEKSLAKSSPPQQENISPKPNKPPEQRVLKEQNGSAKKMGKTPGRERERERRSKDQKLTNGTGAGVGFRKPERKQRQKLNFGQTTNSTSPPESPDALKCISNPWETSSRVSFRDVLRTPQMAPTDNGFDWNHATSSSDLGPIGDNRKNATPPMVTSLWEPLSATASNSLFANTEVDFITPDAIYEQREREKPQWEQRSDLVMRQQLLLQQPQKLEFQLRQQEKISLLANMDPSNWATNWSPLGYSTWPNATAGIGVMRPPPGLEQSARQTHNLAQEQVSAGPASGTGAALHGESLPTQYDPFTSPSSIWSDTWRQSSQRNNHNHMN

SEQ ID NO: 12532 - DNA, 2642 bp, DROSOPHILA
aggcgcgttggtggaacacggttttatggcggatttcgacggaatataaaaataaaattggattttagcgtagatcgtagaaggccgtaaatatttttcaattcactggcccacaaaagcgtgtcatggggggaacgaagggttggcacatatgatttccccaaggggcgcaaaggggttgcatttggattctgcggttgggaatcgcgtgcaaatgatttggcagtattaactcaccgacacccgggatggcaaaaaattgcccgccggaggcgtcaagaccccaaaacactcaaacccctaaagtagggaggatgctggtgatgcggcggagcaacatgtgggctggggattatcgagcggagagaaggcctcatttgaatgccgagcaaagcgattccttttttttttttttgttgtgtgtcttcggtgcgtgtgggcgggcaacccttttgggtcctttcaacggcggttggcggtcctctgctcaggcgttagatacaagttggagcccgctttggctacctcaacaaatcctgcgaaaactcatttcgtgttgctggcgccaaattgatttcattgcctgtttgtgttttgttttcgcagctaaatgccaaattccctttatccttttcgaatccttttgttttgtagagaataatttctagtggcggtttcgccattatctttaacaaatatataagggcattcctgcggcattttgattaaaactttgattggaatttcgagggtggttgcagaattcttgctaacgtggcgtgaaactcgtttcaaatatctttgataagcattaagatataaaacattagaaataaataaaggataatgtatttattaaaatgaaaacatttataagaccaattaaatatctattatgatttataggatctagttatcagctgctttgattccacccagtatgaaatttataagccgaaacacacttctaaatagttattcgagtttcttagagaaatgtgtcaagatgattagaatagggggaggcaccaccaggaacaggggatcctagatggctctacgagtgctatggaggcgaatgacgaatgccatggaccggtttcatcagatagccttcagcccaaagtatctcctatttaccaacatcgggatctctgtgggcctgagcatggtgggcgataccatggagcagtcctatgagcgcctcataggagagcttccggattggaaccgaacgcgtaccattaggatgggcatatccgggttgacggtgggcctggtgtgccactattggtaccaacatctggactacttgtttccgaagcgcacctataaggtggttgtagtcaagattttgctggaccagttcatctgctcacccttttacatcgccgtattctttctcacaatggccattctggaggacaatacgtgggaggagctggagcaggagattagggagaaggccttagtactgtacgctgctgagtggaccgtgtggccattggcacagttcatcaactttctgctgatcaagccgcaatacagggtattctatgacaacaccatcagtttgggctacgatatctatacgtctcaagttaagtatcgtaagaagccggagccaaaagataattcgtaaatggagaaaaatatttggaatatagctcaaatctaatggtcttaatatggttgtctactgttctggactgccactgcaaatcatacaatagcaggtcctgaaaaatgtcattccaatgccttagatcctggaactaaaattttgggtgtccttaaataaaattcttctttgaagaaaatcagcaaagtagaaaaattcaaaatctttattccttaaagttgccggctgtgttagcaaatatttttaaagcaaatttccatgtagaacggattactcctacagttaaaaacattcttaaaaaataaaaatagttgctttttattgaaaatattcatgctccttcaatacatttttccagttattgctcaattaccaggtcgttggcgttaagatctgaaagtaatttattgtaattgtccagatattataaaatgttattctaattgtgacgacggctcaacctgacgccatgtctccggatgtcaagctggtcgtcctcctgtttcccgaggatgaaaggtgaccgcccgattcggggaaggatgactccttgtcaaatgcagaacgtgggcggaactttttttgcggggtgactgcgaaggagcagattctgggcggaattctgggtgaatggcatcaaggaccagggagacactcgagccgtaagtcctcgacgtagaattgtgtcaagcatacaaaataaataaaaacccaggacgggcgggcacgaataaaaaaaatgccgaaaagaaagggaaatcaagtgacaaaattgatgtcaagatgagcgagtgccgaccgtgccaggatatccacatccagggggcgcagaagcgggcttcacggccaccgccagttgacaccaccaaggatagagactaacatccactcacacacacatgtcgactaatccaatttaaatctcttaacatgatttgccgctttcttttcattttgttggattttatgccattatcccttttggtctcctcgtgtcctt

SEQ ID NO: 12533 - DNA, 642 bp, DROSOPHILA
gtcaagatgattagaatagggggaggcaccaccaggaacaggggatcctagatggctctacgagtgctatggaggcgaatgacgaatgccatggaccggtttcatcagatagccttcagcccaaagtatctcctatttaccaacatcgggatctctgtgggcctgagcatggtgggcgataccatggagcagtcctatgagcgcctcataggagagcttccggattggaaccgaacgcgtaccattaggatgggcatatccgggttgacggtgggcctggtgtgccactattggtaccaacatctggactacttgtttccgaagcgcacctataaggtggttgtagtcaagattttgctggaccagttcatctgctcacccttttacatcgccgtattctttctcacaatggccattctggaggacaatacgtgggaggagctggagcaggagattagggagaaggccttagtactgtacgctgctgagtggaccgtgtggccattggcacagttcatcaactttctgctgatcaagccgcaatacagggtattctatgacaacaccatcagtttgggctacgatatctatacgtctcaagttaagtatcgtaagaagccggagccaaaagataattcgtaa

SEQ ID NO: 12534 - protein, 196 aa, DROSOPHILA
MALRVLWRRMTNAMDRFHQIAFSPKYLLFTNIGISVGLSMVGDTMEQSYERLIGELPDWNRTRTIRMGISGLTVGLVCHYWYQHLDYLFPKRTYKVVVVKILLDQFICSPFYIAVFFLTMAILEDNTWEELEQEIREKALVLYAAEWTVWPLAQFINFLLIKPQYRVFYDNTISLGYDIYTSQVKYRKKPEPKDNS

SEQ ID NO: 12535 - DNA, 3445 bp, DROSOPHILA
tttttatcgcaaaccgcaaatttcgggggattttttttgcacgcatggcgcacttagagatcttacccgcgatgctgggaatttctgttctggaaattccatgttacacatccgacttatatccaaagaacgggtttcgatatggctatggctatggccatgggcgtagccaggtgaatggggaattgggtagcatactaattgagcaaaaaaagtaccgtctcaaacggctgctcagcccacctgttgaacctcatcgacgcgtgccagtccccgcgatagcatcgtcaatctggagatgccggagaatcagagacttgaaggggcagagaaatggcgacttggagcgagcggctgcgattgggagagccatctaatcgccagggggtttcctggaatttaatcgcttttcccacgctccacgatcgcttttcctctcataggtaagtgatgattttcaattgttgttatgaattcataaggactaagtattttaaaaaaacataacttatatgagaaataaatgttatattaatatatggtatcaggcattaactaagtacttaatagcgagcgtaacgttatagtattgcattacagatccacgacaccgactcaatgagatagctagtagcagaaactagtagttctccgccttgcgcttgatcttgtggaagtgcggcaaaaacctgtatccgtcaatctgggattgcgctcagctattgatcataaatgctgtctggattgggttggatccgattggcgcttcccacagcacgcgaatccgagctacaaaagctcggcacacgacgatctaaggttcattacaagttgatctgttgatctgttcagcgcgcacgttggagaactcaatcgtgatcgggaacgagatctcggagagcagaagcatcatcatccgcatttgagacgggtttttaaaaacagcaggaaggccccccacgttgagattacggattattgaccatagcaatcagtcaggatggtgtctgcggcgattcgacttggactgctcttgtgcatcttgccccagctggtcatcagccgtaagttatcataggatctatcctaggaattggattaatattccattggctttcagagagcagctgcgtcacgccggcccaagcagccggtcagtgcatccgataccaggagtgccccttcgtgcagaagattctcgggatctacggtcggaatataccacggaaaatccacaaccaaattagtgagatgcagtgcaggagcactacgaatacgagggtaagttttgatgatttcaaaaaacaagcattgataagttcatttaaaatattgaagagcattaaatctgtttcgggtttctaagaatattctctaaaaaatcgacttgaatttatgtttttaggacttccatctttgttgccccaacgaggcacctcctcaatccaatcaggagtcgcagaggaaggtcgtgcgatcggagggcggaaatctgaaccggtatgatcgccagggtctgcagctgctgaactcggtgaccaactgcggcaacaagggcaatcccaaggtgagcggtggaaagacggccaggccaggcgactttccctgggtggccctgctcaagtacaagatcaacgatccgcgtccattccgctgcggcggcagcctcatcagcgaacgccacatcctgaccgccgcccactgcatcatcgatcagcccgaagtgtaagttcctcatgctaaaggcatgcaatttcatcgcatcataatgcaatccatattgatcatttcgtctaattggttccacatctagtacggatgactaatggtattctgctttttagaatcgcggtgcgcctgggcgagcatgacctggaatcggaggaggactgccactatttgggcggtacgaaccgcgtatgcattccgccctacgaggagtacggcatagagcagatacgagtacatcccaactacgtgcatggcaagatcagccatgacgttgccatcatcaagctggatcgcgtggtcaaggaaaaatcgcatattaagcccgtttgcctgccaatcgaccagaagtcacaggaactggacttcgatcagagcttcttcgtcgccggctggggcggcaccgagaaggagactgtggccaccaagctccaacaggcgctgatcaccaggaagagcctgaacgagtgtcgccagtactacaacaagggtgaggtgagcgacaaccacatctgcgccacaggaactgggatcaagcacacttgccagggagattccggcggaccggtgttcttcaagcatcgcttcaagaacacctaccgagtggtccagtacggtgtggtctccttcggcggacggctatgcggacagaaccagccaggagtcttcgccagtgtcatcgacatgctgccctggatcacgcagaaccttcagtagtgccaaccgatactctctttcctcaagacaccaacttatttatattctttatattctagtcttaagaattcttgccgcaggattatctagatttgtaaattattttaataaatactattagcagcaatatttaaaatgcaattctttaactcggtggggcattatagtaccaatgcaaaaataacaatcataaatctttcgaagagtgatcattctataaaaacgtgatttcttagaaattctatatcatatagctaacagctttgacttttgatcgaaaactgagtcatcaataatggtcatgtgattggtatgctataatttgcggttagccgctgcagttaatgtccatgtaagacctaagatcttgtttgggaatacgtttggatatattatatgatatatgacaagttaatagtgattaatactgaccaacgacctttaaagtccaatatgacttatgcttttaaggatttccatttaaataatcgccagacgcgtctgttttatgtggactccaacattgaactaaatccaagccaataaaactgggtagttattttaatgtaggccaaagcggaaacaatggatagatggatatcatgcggcccattgttaccaaaagctcgcagccgaaaagaaaatttgggcaaacagtttccttttctccgccgaatagttaacaatgcgcagtagccgcttccacgcatttttgctaaagatgtaatctactatatgtaatccatatagttcgaatacaaatcttgtttctattgcaggattctctacttggtgaccttttaccacacgctgcccttctttgcgaatgtctccctgtcgctgctcaatagctacctctcctcatcggtttcatttaatctcgatactatatagtaagttcaaatagttcaaaagtatctaagctaactcaaattttctagcttgaattggaactctacttttccggccattaccgtgtgcgagatttataacgccgaga

SEQ ID NO: 12536 - DNA, 1146 bp, DROSOPHILA
atggtgtctgcggcgattcgacttggactgctcttgtgcatcttgccccagctggtcatcagccagagcagctgcgtcacgccggcccaagcagccggtcagtgcatccgataccaggagtgccccttcgtgcagaagattctcgggatctacggtcggaatataccacggaaaatccacaaccaaattagtgagatgcagtgcaggagcactacgaatacgagggacttccatctttgttgccccaacgaggcacctcctcaatccaatcaggagtcgcagaggaaggtcgtgcgatcggagggcggaaatctgaaccggtatgatcgccagggtctgcagctgctgaactcggtgaccaactgcggcaacaagggcaatcccaaggtgagcggtggaaagacggccaggccaggcgactttccctgggtggccctgctcaagtacaagatcaacgatccgcgtccattccgctgcggcggcagcctcatcagcgaacgccacatcctgaccgccgcccactgcatcatcgatcagcccgaagtaatcgcggtgcgcctgggcgagcatgacctggaatcggaggaggactgccactatttgggcggtacgaaccgcgtatgcattccgccctacgaggagtacggcatagagcagatacgagtacatcccaactacgtgcatggcaagatcagccatgacgttgccatcatcaagctggatcgcgtggtcaaggaaaaatcgcatattaagcccgtttgcctgccaatcgaccagaagtcacaggaactggacttcgatcagagcttcttcgtcgccggctggggcggcaccgagaaggagactgtggccaccaagctccaacaggcgctgatcaccaggaagagcctgaacgagtgtcgccagtactacaacaagggtgaggtgagcgacaaccacatctgcgccacaggaactgggatcaagcacacttgccagggagattccggcggaccggtgttcttcaagcatcgcttcaagaacacctaccgagtggtccagtacggtgtggtctccttcggcggacggctatgcggacagaaccagccaggagtcttcgccagtgtcatcgacatgctgccctggatcacgcagaaccttcagtag

SEQ ID NO: 12537 - protein, 381 aa, DROSOPHILA
MVSAAIRLGLLLCILPQLVISQSSCVTPAQAAGQCIRYQECPFVQKILGIYGRNIPRKIHNQISEMQCRSTTNTRDFHLCCPNEAPPQSNQESQRKVVRSEGGNLNRYDRQGLQLLNSVTNCGNKGNPKVSGGKTARPGDFPWVALLKYKINDPRPFRCGGSLISERHILTAAHCIIDQPEVIAVRLGEHDLESEEDCHYLGGTNRVCIPPYEEYGIEQIRVHPNYVHGKISHDVAIIKLDRVVKEKSHIKPVCLPIDQKSQELDFDQSFFVAGWGGTEKETVATKLQQALITRKSLNECRQYYNKGEVSDNHICATGTGIKHTCQGDSGGPVFFKHRFKNTYRVVQYGVVSFGGRLCGQNQPGVFASVIDMLPWITQNLQ

SEQ ID NO: 12538 - DNA, 4519 bp, DROSOPHILA
caacagaaggataattcgtacttgagttggacacctccttcacgtactgcagggccagtcgtttcagatagttggcatcctcctcggccacgaaaaaacccatgaagttttgactcatgtagggctccagtttaagggggcgatccaacaaggcgcccgtcatgtccaccacctgtttgagcgccttggacagctgcagcgagcactcatcgggggcctgtaatttcgattaggtgaataaataaagtctggataatccaacttaagctcactttaaaaaacgaaaccagggttatgtgaggcacgtagttgtgtgctccattccaaccgcacatttggcgcgacttggcccagaactcctccagctgctgcagaaacggacccgtgggacaagcatatataatatattccctgggggcgcactcgtccagggtgccatcgttgacatgtgccagcaaccaatccgaggcaatctggacaccacgattaccagttgaagccaaagctttctccctgtgtaggggtaagcaaaaaaatcaatactctgattctatgaaacaaatcaacatagtgggtcactcgcacgcatagccactatatcttggatggaacctagagcagctggtgactgccaatacgctatgcatagaaaactcacgctctatgcctgggaaaccccatttggagcaatgtttggagcggcgtcagatgctgcttagagatgcagatcctcgtaggggtctgactcttacgcggcggaagcgtggccatttcgattatagcctcctatgtaagcccaggtgaccaccgtttagcagcttttggtttttcctggctgttcaatatttttcagtgataatttcaacaaaaataggatacaattcgttaattggccacaaaaaagtgttggctaacgacagcctaaagatagtcaacttctaccgatagctgtaacacgactgcactatcgataaccagtactgaccagtagagatgagagcgattctcctagcgagacaacaacaaaattcactgcgtaattaattgaatattttttagtaaaaccgaagcgccccacaaagaaacagctcttggagtgttcaccagtgttcaaagtgagtgccactacaaaaggaattaggcgaatagcaaaagcaaagcgttaaaaagagtgttacgcagcaggcgaaaagtgcatggaaaatgccagtggagccccacatcaaacatacacacgcacactcgaaaaacgtacacaacaaagacccacgcacaccgacgcaattagtggcgtagttgtaatggtggagcacaaaaacaagttgttcatggtctaaaaaaggggggcggggagtttatctccctttggagagtccactttcgcactattttcgattgcaccatagtgactccccctgccatcgaggactttgaggaaatgggcgttttcccaggcacttttcctggtattccagacccgctttattagctcgacctcgtctttgtctgtactcagcgcactttctccgctgcgccaatagtgatcacgctttatcgcctcgatgcgggcacctccctcccctactgaccgcctgttcacacagtccagcgatcacacactgcggattgctcagagtgactcacccgatttgtttatcacccagcacggcgtagcacaactgctcgtcattacaaacattttacagctgcgaatggcttgcacttcgagcacttaggcagtcaggtcctggcagagattacggctttcattggcatgtagtttagactctagaggtttgcgcagttcactttcatttatcttaggaaagaaaccatcacacccctacacttcctaatcgaattagaggaaaccgcaatggtatttttaacacacaatcaataatattctgtggttttcagcaccaaataccaaaagaaataaccccgagtaagccaacgccacaaactgcatcgaaatgtccggacgtaagaaatccctactgaaagtcatcattctgggcgacagcagtgtgggcaagacctctctgatgaatcagtatgtaaacaaacgcttctccaaccaatacaaagccacgatcggagctgatttctgcacgaaagaggtggtggtcaacgaccgagtggtcacaatgcaggtaagcactatgaacttccagtaatcctatttcagtgacataactcgcaaaatttcaataacagatctgggacactgctggtcaggaacgcttccagtcgcttggagtggcgttttaccgcggagccgactgctgcgtgcttgtctacgatgtgacggcgcccaactcgttcaagaatctcgactcctggcgcgacgagttcctcatacaggccagtccacgggatcccgatcacttccccttcgttgtgttgggcaataaggtggatttggacaaccgccaggtgtccacgcgtcgagcgcagcaatggtgccaatctaagaacgatataccctactacgaaacgtccgccaaggagggcatcaacgtggagatggcgtttcaagttatagccaagaatgcgttagagttggaggcggaggtaagaaatcctatttaaatattgttttccatactaaatcgaactttgtactttcacacaggctgaagttatcaacgatttccccgatcagattaccttgggctcgcaaaacaatcgtcctggcaatcctgacaactgtcagtgctaatgtaacaacaacgcaaaatggataattacacaatctatattattaaataatatttccaacataataatgaacatgagaagcaagcaacacaaaggacgatagaggaaggtgttatatgattaagtaaaacaatttcagcaaaacagcatagtaattaattaactgataggatgcaaagttcagattcagatcaacatcagctgagtcttaacgagcctctggcaaaggcttaaccagtatacccactttcctacgacctaagtaaccgttcaatgaataagtatgctctgtgtactcgtatttaataattcatgtttctgaccgaccgcccgcctatctccctagtactatttttgccattgtattagtcaaattttgcacgcaaccgctgctggcttttgcaacagaacagcaacattgagaatacaacatcagagtatcttctaaacaaacaaaaaatcttgtgattgtaaatttaataaaagaataactttttaaatgtaatttacagacataatttcctgcaccatcgaattggctactctattgtaattggctgagctccacaaaacttctttatgcataacattcgagcgtgaatttggtttagttataacgttactcgatatatcctataactatgaatagtattccatgtaaaattgctccttgtttttggtaatacatatatgtaaattgtgtatatttcgaatttatttttttccaaagattcattttatgaattctcatgctctttggtttaatttaaagaataaacttgaacaatttacaataaaagtcaaataagcttattttgatatttttatgtgggcttaatttactttgtgcccactgtagaacagatgcaaccaggtgaacacagaatatcgcttatcgataactcagccctgttaatatttgtctgcgaaaacagctgtggctattgtctgttaactcgcttagtctatttatttaactaaataccatgtcgaatatttcaagtgtggcaccacctcctcccccaccacccatgatagtcactcctagcacacctgctaccacaaaggaacgtccagttggggacaatataaccaccgatgagtgcacttgggcatgtgagtatcctgaggtgcagaaaggatgctatttaagtcgcgtctgccaatatacaccaccgaaacactgtcaatactactccgtaaacagcatagtgcaggtgagttagaaaacaataaagatttctcagtttgttattcgataacatatgtatgtgcaccgaaggtgggacctacttgtggcttagtggccctcagcatgttgcttggtggcagtcccacggcagatgatctcctcaaggatgcaatcgaccaggagtatacccttaatggtgaactatttagtgctcagtatttgtttgaactgacccggaagcatatgccaggacctgctgcgtgtcagttgcatgtaggtcctttggactgcaaaaaagtcaaggaacttttaaaggccggaggctgcctactagtgccgtatcctttttcaaaaatattgccatttaaacccgggttgagtttggtattcccctgcatttaaagccgttggcgcctaacagcacttgtaaacggtgaacagcacactgttgtctggcagtgttgtaaaactcgcggtagttcagtggtgcaacttataaacagcgttttgtgtttcgcaaaataatatacaattttcagtcagtaagtaaacgagaagtgcaaatacttttattaaatggccgacgaaacagagcaggtatgt

SEQ ID NO: 12539 - DNA, 1589 bp, DROSOPHILA
cgattctcctagcgagacaacaacaaaattcactgcgtaattaattgaatattttttagtaaaaccgaagcgccccacaaagaaacagctcttggagtgttcaccagtgttcaaacaccaaataccaaaagaaataaccccgagtaagccaacgccacaaactgcatcgaaatgtccggacgtaagaaatccctactgaaagtcatcattctgggcgacagcagtgtgggcaagacctctctgatgaatcagtatgtaaacaaacgcttctccaaccaatacaaagccacgatcggagctgatttctgcacgaaagaggtggtggtcaacgaccgagtggtcacaatgcagatctgggacactgctggtcaggaacgcttccagtcgcttggagtggcgttttaccgcggagccgactgctgcgtgcttgtctacgatgtgacggcgcccaactcgttcaagaatctcgactcctggcgcgacgagttcctcatacaggccagtccacgggatcccgatcacttccccttcgttgtgttgggcaataaggtggatttggacaaccgccaggtgtccacgcgtcgagcgcagcaatggtgccaatctaagaacgatataccctactacgaaacgtccgccaaggagggcatcaacgtggagatggcgtttcaagttatagccaagaatgcgttagagttggaggcggaggctgaagttatcaacgatttccccgatcagattaccttgggctcgcaaaacaatcgtcctggcaatcctgacaactgtcagtgctaatgtaacaacaacgcaaaatggataattacacaatctatattattaaataatatttccaacataataatgaacatgagaagcaagcaacacaaaggacgatagaggaaggtgttatatgattaagtaaaacaatttcagcaaaacagcatagtaattaattaactgataggatgcaaagttcagattcagatcaacatcagctgagtcttaacgagcctctggcaaaggcttaaccagtatacccactttcctacgacctaagtaaccgttcaatgaataagtatgctctgtgtactcgtatttaataattcatgtttctgaccgaccgcccgcctatctccctagtactatttttgccattgtattagtcaaattttgcacgcaaccgctgctggcttttgcaacagaacagcaacattgagaatacaacatcagagtatcttctaaacaaacaaaaaatcttgtgattgtaaatttaataaaagaataactttttaaatgtaatttacagacataatttcctgcaccatcgaattggctactctattgtaattggctgagctccacaaaacttctttatgcataacattcgagcgtgaatttggtttagttataacgttactcgatatatcctataactatgaatagtattccatgtaaaattgctccttgtttttggtaatacatatatgtaaattgtgtatatttcgaatttatttttttccaaagattcattttatgaattctcatgctctttggtttaatttaaagaataaacttgaacaatttacaat

SEQ ID NO: 12540 - protein, 207 aa, DROSOPHILA
MSGRKKSLLKVIILGDSSVGKTSLMNQYVNKRFSNQYKATIGADFCTKEVVVNDRVVTMQIWDTAGQERFQSLGVAFYRGADCCVLVYDVTAPNSFKNLDSWRDEFLIQASPRDPDHFPFVVLGNKVDLDNRQVSTRRAQQWCQSKNDIPYYETSAKEGINVEMAFQVIAKNALELEAEAEVINDFPDQITLGSQNNRPGNPDNCQC

SEQ ID NO: 12541 - DNA, 3420 bp, DROSOPHILA
gagccaacacacgtctattttccggagcaagtctatttccatttggatcccacaacgctaacagtgcacggatcaccgccaccggcccagaatttcctggaccagccacatctgcgggcttcgaacgcctcccttcaggcagctgcccaccatcaggcgggttcctccggcaaccggcatcccagcgatggcggcagcaacagcggcggagcaggaggcggatcgggatccagtggaggagccgagtgcaccggacgggccgtcgataatcagtacagcttcacctaagtccgcgcgatcgatcatcaactgcatttcgcggcttaaccagcggaactttacttttgtgccattttaatcattgtcctaaaggagaggaaaattgtgttttttttcgcatcaatgtgcgttctttgctttcttgattcacttgtttctattttagttagtacctcttttggaagacatgaagtaactgaacattattatgtatacattatatagctaaatgtgtgtgttcattttaagtacatcaatgttgtatgtatagaaaagaagaacctaaaaaaaaaaaaacgcaaaagaaaattgtacgatttttgtgggcaccaaaggtgcgactcatgcgaatcctaaaacttcctgctttacaaaacaaaaatacatacatatataccatacttataaatataaattatatatacataaatatatattgaaattggtaaactacaataaatgaagttatgtaaaagtaaaccaacgtcggtcttctttcatttgggctttgggttttaaagtggttattttaattacttttaccaagtctttatattatatataaattcgtttgaaataaggtaacgaaaaatgtttttcaaaatatttgcatggtatgtgcccgtgctaacctcgcagcgctattttgacaagttggcaggttggctttggaaaagtttttgatatttccgacccacaaagcaatggtcacattgccacgccggtgagaggcaaaaagttgacaattcgaggaaaagctgaaactctcgaaggatatggaagatctggaactgtatttggtggattccctgaaggcgctgtccttccaagggcactgccaaaagcaggaaaatctgagtcgtgccctggacgcgggtattgaaagtccagacatgcaagaggtggttctttggctcgcccacgaattgcacattttgcggaaaaccgatgagcgggtgaatcagggcaaagcccttaacaaagacttttccttcgagctgtctctgctactcacggaacttggctgcccgtaccgcgagctggtgcagggacccatagagcagcgattcaagagccgtatggcactggtgcagctgctggagtacctcacatccgaactgatgaccaccaaaatggttctgaaggcccagcccgtgggtccaccctgcaaacgatcgaaggtggacacgaatgtccaacaggttgtcgaaaacttagccaaggatcttcagctgggcgaagtgcctaagaacatcaataccaagatgcttttcgagaagataactccccgcttggagcaggccattaaaaaaaccaatccccaagtgctcagcgaaccgctgttgaagcttaagaagcccttgactgatgcacaatggcaattgttggagaccctgcaccgagaactggaggcggagtacaatttgcgcaggcagatgatgtccacgcgtctggaggccactgtacaaagctttcagtggtcggagtctatgcgtcagcgctccaatgagatcatggatcgattcaatcgcaagatgagggagctggatcagtttaaagtgggcggaaagcaaaccgacttggtcgccctgttggcagctcgctcagatctggccatcattgagaagacaagctcagcgaatgtgagaaagaatacggcttccaaaatccaaaagcatgtgattggtcgggtacccgatcgcggaggcagggccaatgagcatgctcctccgccaccagagatgccctcgtggcagcagcaaagggctagtggtcctccaggtggcggacgcggtggaggaggtaatttcagaggaggcaggggcggcggcggcggtggcggcttcggtggaggaagaggaggtggaggaggaggtggaggtggcaactggcagcagcctcagcagcagcagcagcaacatcaaaaccaaagttacgaacaacgtgaccgcagcgatagaaatgatcagcaatggatcagcgggagtggccgtgtgcagggtacaggctggaatccacaaggcggccgtgatggtggaggacgtgatggaggaggacgtgatggaggaggacgtgatggaggaggacgaggcagaggaggtggaggcggtcgcggaggataccgtggcggctaccgatgatccctaattcccaaaaatgtagaccataaacgactgatcctcttgtaaactactaacattacatgtctttaatcgcacgcataccccagtttaatttattgcgaaatttaacgaatttgttaattattgcaaatgggcaggtatttataaaataaactaaatatgccatctatttgccagcaaatctcgcgtgtcgatttcgctttttgggaatctgggttaggtgtttcactttcaatgtgttcgtgattagccattttaggttcacattatagtcaaattaatcagatagataatgagggcaacggactaagtctaatgaattattattacagcattatattatatagtttgtgacgtatatttggtattaccatttgtttaatttaaaaattaaatattcaatagagtacattactgtcaacgctttgttacaaaatattgcatactagatatacactttaacgatgatctagttaaactttagttatagaccgtcaacgcatatatactatattataaattcatcagtactttgttccaatttgtggtaatataattataatagcttacctatgcttcgatattattgaactgtcaaccgcttctgaacgtctcaataatgggattgtgatcttgccctcaatccccgcaagaagtacgcccatgtggcaggtaaccaggcatcagacccagacacacgcgacactcgattgccattagcttccaatctagtcatcaaatgtgccggctatatatctgtctatatatcgccaccactgcgatccgcaggccggtgacaattaacgtggtcaatcggcgtgaaaaccatgtcgaagtcatcatggatgagccgagtcgggcgcttggatcagttcaaccgaagccccagaacggtgaggtcgcaagtttctcacattcgagtcctaacttaaccagtttagaatgctcattaaactgatattggcgttggtaattggttatggcggcatttttgcgc

SEQ ID NO: 12542 - DNA, 1420 bp, DROSOPHILA
ccggtgagaggcaaaaagttgacaattcgaggaaaagctgaaactctcgaaggatatggaagatctggaactgtatttggtggattccctgaaggcgctgtccttccaagggcactgccaaaagcaggaaaatctgagtcgtgccctggacgcgggtattgaaagtccagacatgcaagaggtggttctttggctcgcccacgaattgcacattttgcggaaaaccgatgagcgggtgaatcagggcaaagcccttaacaaagacttttccttcgagctgtctctgctactcacggaacttggctgcccgtaccgcgagctggtgcagggacccatagagcagcgattcaagagccgtatggcactggtgcagctgctggagtacctcacatccgaactgatgaccaccaaaatggttctgaaggcccagcccgtgggtccaccctgcaaacgatcgaaggtggacacgaatgtccaacaggttgtcgaaaacttagccaaggatcttcagctgggcgaagtgcctaagaacatcaataccaagatgcttttcgagaagataactccccgcttggagcaggccattaaaaaaaccaatccccaagtgctcagcgaaccgctgttgaagcttaagaagcccttgactgatgcacaatggcaattgttggagaccctgcaccgagaactggaggcggagtacaatttgcgcaggcagatgatgtccacgcgtctggaggccactgtacaaagctttcagtggtcggagtctatgcgtcagcgctccaatgagatcatggatcgattcaatcgcaagatgagggagctggatcagtttaaagtgggcggaaagcaaaccgacttggtcgccctgttggcagctcgctcagatctggccatcattgagaagacaagctcagcgaatgtgagaaagaatacggcttccaaaatccaaaagcatgtgattggtcgggtacccgatcgcggaggcagggccaatgagcatgctcctccgccaccagagatgccctcgtggcagcagcaaagggctagtggtcctccaggtggcggacgcggtggaggaggtaatttcagaggaggcaggggcggcggcggcggtggcggcttcggtggaggaagaggaggtggaggaggaggtggaggtggcaactggcagcagcctcagcagcagcagcagcaacatcaaaaccaaagttacgaacaacgtgaccgcagcgatagaaatgatcagcaatggatcagcgggagtggccgtgtgcagggtacaggctggaatccacaaggcggccgtgatggtggaggacgtgatggaggaggacgtgatggaggaggacgtgatggaggaggacgaggcagaggaggtggaggcggtcgcggaggataccgtggcggctaccgatga

SEQ ID NO: 12543 - protein, 454 aa, DROSOPHILA
MEDLELYLVDSLKALSFQGHCQKQENLSRALDAGIESPDMQEVVLWLAHELHILRKTDERVNQGKALNKDFSFELSLLLTELGCPYRELVQGPIEQRFKSRMALVQLLEYLTSELMTTKMVLKAQPVGPPCKRSKVDTNVQQVVENLAKDLQLGEVPKNINTKMLFEKITPRLEQAIKKTNPQVLSEPLLKLKKPLTDAQWQLLETLHRELEAEYNLRRQMMSTRLEATVQSFQWSESMRQRSNEIMDRFNRKMRELDQFKVGGKQTDLVALLAARSDLAIIEKTSSANVRKNTASKIQKHVIGRVPDRGGRANEHAPPPPEMPSWQQQRASGPPGGGRGGGGNFRGGRGGGGGGGFGGGRGGGGGGGGGNWQQPQQQQQQHQNQSYEQRDRSDRNDQQWISGSGRVQGTGWNPQGGRDGGGRDGGGRDGGGRDGGGRGRGGGGGRGGYRGGYR

SEQ ID NO: 12544 - DNA, 3215 bp, DROSOPHILA
acgaggcagaggaggtggaggcggtcgcggaggataccgtggcggctaccgatgatccctaattcccaaaaatgtagaccataaacgactgatcctcttgtaaactactaacattacatgtctttaatcgcacgcataccccagtttaatttattgcgaaatttaacgaatttgttaattattgcaaatgggcaggtatttataaaataaactaaatatgccatctatttgccagcaaatctcgcgtgtcgatttcgctttttgggaatctgggttaggtgtttcactttcaatgtgttcgtgattagccattttaggttcacattatagtcaaattaatcagatagataatgagggcaacggactaagtctaatgaattattattacagcattatattatatagtttgtgacgtatatttggtattaccatttgtttaatttaaaaattaaatattcaatagagtacattactgtcaacgctttgttacaaaatattgcatactagatatacactttaacgatgatctagttaaactttagttatagaccgtcaacgcatatatactatattataaattcatcagtactttgttccaatttgtggtaatataattataatagcttacctatgcttcgatattattgaactgtcaaccgcttctgaacgtctcaataatgggattgtgatcttgccctcaatccccgcaagaagtacgcccatgtggcaggtaaccaggcatcagacccagacacacgcgacactcgattgccattagcttccaatctagtcatcaaatgtgccggctatatatctgtctatatatcgccaccactgcgatccgcaggccggtgacaattaacgtggtcaatcggcgtgaaaaccatgtcgaagtcatcatggatgagccgagtcgggcgcttggatcagttcaaccgaagccccagaacggtgaggtcgcaagtttctcacattcgagtcctaacttaaccagtttagaatgctcattaaactgatattggcgttggtaattggttatggcggcatttttgcgcctggcagtgcacaaaatctgttggatcgactgcgtccggtgaatatgacccgcttcgatgatggcattaaagtcgtttccggcaccaaagtgaagcgctatgagcgcctgacggttccgctgggtggtcctgtcggcattccaggagccgctggccttttgggacctctgctgcctcctcagccgtcgtatttgggatacacctatgtgagtatttatggttttcaaattaaactttatgaccccgtcataatttgtaaattacacagtcatttaactaagcgtttagatttcttttgtgctccagccatagaattacattatattgtgcagattcaatttcaatgaaagaatgtgtatttcccccactcgcacattttttgcaactgccatttaattttataatgatgtgaaatgctaattgcatataactattctcttttttgcaagccatacactttttaccccaacatttgaattgtttaagcagtttgatcttgatttttatactataatatttattatatttgatttatattttccagcagttggtgcctcaatggcaggcgggtgcaaaactgatgggcgatggcgaaggagcgggcgtggccggaatgatatcctttgtgcagctgccctacaactcggacattagggtgacgatcaatgtgactggattgccacccggtaaacatgccctgcatattcacacctttggcgatctcagcgatggttgcaagtccaccggtggacagtttcccaataactttgtaagatccagtggaaatgattttaaattttatgtgatttaattaagcctttggagttgtacagctcggtaatgtggacaccaaggatgatggcagcatctcggcggtctttcagagcatttacctgcaattgtttggcatcaatgggatcgttgggcgttccatagtgatacacagcaaagcaatcgatctgaatactgccctaaatgcagaggtattttcctcctccctgcaagccatgccaaatcccctggcctatcagaacgaggagaattcactgggtcctgccatcgcctgtggggttataagtattatgagcacagccgccagttcatcaggtatggcaacagctgcaccagcaccacctgcaatggaaaatccagagatttaacttgtaattatatcattcctttaataaataatttgtagttactcaattgaggctttgatcagagtcagtgatcagtgtccaatcatcttgttttactatgttatgttcacttaaatctgtatgcttcattgcgagctcaaacatatatatagtgctttcaaatcatatttttcggcatagttgttatgaaaagcatcagtggcctatttttcatcaattcgaaatatatttatggtattataatatttatttaaattacagccagagtcttataagtggccaaactgttgggttatttcaacttgatcgctcaatattattttcgagcttatcgaattcagctcagctttaatggccattacgtgcggcgcatgcgcaaaggtctgggtcgcccaatgggccaaaactttcttcgtcggctgcccgcgaatcgagtggccagttgcccgtggcggttcgcgatgtccaaacgcgaaagtaaaagttttgccagcctggtgctgatagtactactgattttcgcttcaaacccgtctcaatgtgagtcctccaaggacgatttcccgcaggccaagttcgaatggccctcgtttgcctggatgcgaaataaaaccacaaagggtacacccgcgttggatctgaagaacgactacagccagatggagttggccaactttggggactttgatcgtcatccctgcagaagagtttgccagcagggccaatcgcagaactgctactaccaactggtggtgcacaattaccagcgactcggaccggagtgccagagatgccagttcgatgagagggcctgtgcttcggagcattgtatttatggcgatggagtggcaaatccagtgatggctgttaatcgcatggttcctggaccttccatagagctctgcgaaaacgatactgttgtcgtggatgtgttgaattatctaagtgagccaacaacgatgcactggcatggagtgcatatgcatagaactcccgaaat

SEQ ID NO: 12545 - DNA, 813 bp, DROSOPHILA
atgctcattaaactgatattggcgttggtaattggttatggcggcatttttgcgcctggcagtgcacaaaatctgttggatcgactgcgtccggtgaatatgacccgcttcgatgatggcattaaagtcgtttccggcaccaaagtgaagcgctatgagcgcctgacggttccgctgggtggtcctgtcggcattccaggagccgctggccttttgggacctctgctgcctcctcagccgtcgtatttgggatacacctatcagttggtgcctcaatggcaggcgggtgcaaaactgatgggcgatggcgaaggagcgggcgtggccggaatgatatcctttgtgcagctgccctacaactcggacattagggtgacgatcaatgtgactggattgccacccggtaaacatgccctgcatattcacacctttggcgatctcagcgatggttgcaagtccaccggtggacagtttcccaataactttctcggtaatgtggacaccaaggatgatggcagcatctcggcggtctttcagagcatttacctgcaattgtttggcatcaatgggatcgttgggcgttccatagtgatacacagcaaagcaatcgatctgaatactgccctaaatgcagaggtattttcctcctccctgcaagccatgccaaatcccctggcctatcagaacgaggagaattcactgggtcctgccatcgcctgtggggttataagtattatgagcacagccgccagttcatcaggtatggcaacagctgcaccagcaccacctgcaatggaaaatccagagatttaa

SEQ ID NO: 12546 - protein, 270 aa, DROSOPHILA
MLIKLILALVIGYGGIFAPGSAQNLLDRLRPVNMTRFDDGIKVVSGTKVKRYERLTVPLGGPVGIPGAAGLLGPLLPPQPSYLGYTYQLVPQWQAGAKLMGDGEGAGVAGMISFVQLPYNSDIRVTINVTGLPPGKHALHIHTFGDLSDGCKSTGGQFPNNFLGNVDTKDDGSISAVFQSIYLQLFGINGIVGRSIVIHSKAIDLNTALNAEVFSSSLQAMPNPLAYQNEENSLGPAIACGVISIMSTAASSSGMATAAPAPPAMENPEI

SEQ ID NO: 12547 - DNA, 3631 bp, DROSOPHILA
aatgacttctttgctgcactaccgttcgatatgcttgttaccaagaattgagatacctaactttaatattgttttactatttataccttccggattcatctgttctactcaaggtgttaacatagtttgtaccgaaataaagatacaattacctaaatataaaatatttagaaaatattcttatctatgtttgccagtttatgtagaatgtgtattttctagagtgaaaggttgcacttacactaaacaatcagtcatgagtcaatttacaagtcaagagcaattaaatagggcttgagtggcagattgaaaaagtggggctataatggtcacataaaaggtaataaattgaaattttttattggtttattggtagttaggaatcgaaccgaatggatggaaaactattggatcgaataatggaagtcacttagtaactatcctataagcaataacttaagacactaatggttttatgcaacccgattgaattgtacttaattgtataacttttcacagggcgttcaatggcatatacaagcttaaagcttctcagaatataatagatctaattttactttctagctatactatatattgtgaagttcatagtacaactaactttaaatatgactcacttaatgacgagacttctttaagctcaatttgccggccctacaatgtcaccattgaatagccaaaatcggtagaccattattaatatacgtactttgtaattaatataagaattaatgacgaatcattgttgccatttgctgtagtaccttcaatatatttttccatttaataatacgacattataaatcaggcagaccgagccggtttggcattcagtcaaagtctagctgtttgccggctaatgtttctgatttacaagtaaaatatactaagctagattctaacttgcattgtgtcgcagtgtgctaatttggagaataaaatagctcgacttgcagtctggaagcttcagttgtagtttaacgttctagcagtaggttgaaagtcgaattcgagtcccaaaaaggatatagtttagtagtagaatgtattgtactattggattgctcagcctgctggccttgggatgcagtgcagctcccacggataaaaactactttgctggtaggtatatcatatattcgtttttgttttctctttatataacattttcccacattgaagatttgccaaaatgctcgactgaagaggatcagctgggtgagtgcgtgaagcagctgtttaacacattgactccgcgcctcaaggacggtaatccagagttgagaatcgagccctacgaacctttgcacctcaaccgaaccagcttccaatactctagtggcactgtcaatggtcgcatcaccgttcgcaatgccaagatttatggcttctcctccaatcgggccaaagaggtgtccgtcaaactcaatggcgacaaggtgaaactccgtctggtcacccaaatgcccaagttgaacattgtgggcagctataaggccgacatgcaggtgaatcagctgcaactgaagcccaagggtgaattcaacgtaacgctctgtaagtaagttagtttgcctctttcggtgatcacttatcattccggttgcagtggatgtggaggccataacggtgaccgatggtgaggtctacgagaaggatggtcatcggtttttccgcctcaagaatatcgactcaaagccaaagatcaaggacttggttatcaaggcaaacggaatatttgcagatcctgaactgggtgagttcaaagctgttgtttaaggcaaactagtgaatttgttgcactatgaagaacgatgcctgctttttgaaaattatgttaaatatttttatttaaattatgcatttactcaaatacggtggttgcacattggttgttaaaaaattctaattttaaagtactttagaacatgttgaatagcactaaaaacgattgccttattgcttcctcgtgtttacataaatatttaattactttaaatacgtaatcactttgcattagttgtttgtattacgtcaatacaagtatcaattgattccgcagtaataaaattaccgttcatttaactataatatatattaaaagatttacgaagcaataattaaactgtaaaagttacataccaaacattttttgcaagttgccatgtttgatgtattatatttaaattagataacttcattttaacttaacttgacacatataaacaggtgcagtagagaaaattggtattaagtcaaatccattaaactaaaggcaaaccagtttatatgaagtgttttctgtgtacttaatgcacattctaacgcttgtgattatttttcgttacagataaaatcgctctgaatgtggctaatcagtattggcgcgatatttacggaataatgttgcctgagactcgacagttttggcaaccccttatgttgcgaatgttcaacgaggcattcgaactagttcccatcgaccagtttctcaaggagtagctcaatttgcggttggatttaatagaatgatgatggttaaatagaaaataaatttttccattaggtgctattaaatggtaatattttttttaattaaaaaacatttattctaggcgccagtttgaattgcccattttgagtcacaccaattaagccgtcaggttttatggaatttttcatgccctagttgagcgcagcgcaagttttacacttttttttaccgctgtgtgacccaatgataatcgcgttaataggttaagtgcgcaccccgacaattgaccttcgaccttgacttcaattacggagtgcaagtgcagttgagcaacacccgaaactatctttgaacttgaacttagtaggccatatgccctcatgcatagatttcgcagtgtatcatggtataccagaccacctagcaactataacacaaagctgggacttggattctgatcacttgcctcttatcattagcattgagacagacagtactcatgtcaatccaagtcccaggctagtcaccaaacacactgacctccttgcctttagccgacaattggagagccttatttcgctgaacaccacgcttaattctggtgaggaaattgaaatggctgttgacaacctaactgaaagcatacatagggctgcggctgtctctacttctcccgtccctcggataggcaccacatatgggatagtcttgacaagagaggctagagagcttctgacacagaaaagaagactccgaaggcgagcaatccgatctcaagacccctgggaccgacttttatggaaccgtgctgcatagcaattacgaaacgtcctcagagaacttcgaagcaacttttttgagcagaaactagctagtatggactacacagtggatgctggatactcgctatggaaatgcaccaagtcccttaaaagacagccgtttagacaggttcctataaggtgtccgggaggcgaacttgctaaaaatgaagaggagcaggctaattgttttgcaaatcatctggagacaaggttcacccacttccaattcgctacaacggagcagtatcaagagacgcttgatagcctagagacacctctgcaaatgtcacta

SEQ ID NO: 12548 - DNA, 925 bp, DROSOPHILA
aacgttctagcagtaggttgaaagtcgaattcgagtcccaaaaaggatatagtttagtagtagaatgtattgtactattggattgctcagcctgctggccttgggatgcagtgcagctcccacggataaaaactactttgctgatttgccaaaatgctcgactgaagaggatcagctgggtgagtgcgtgaagcagctgtttaacacattgactccgcgcctcaaggacggtaatccagagttgagaatcgagccctacgaacctttgcacctcaaccgaaccagcttccaatactctagtggcactgtcaatggtcgcatcaccgttcgcaatgccaagatttatggcttctcctccaatcgggccaaagaggtgtccgtcaaactcaatggcgacaaggtgaaactccgtctggtcacccaaatgcccaagttgaacattgtgggcagctataaggccgacatgcaggtgaatcagctgcaactgaagcccaagggtgaattcaacgtaacgctcttggatgtggaggccataacggtgaccgatggtgaggtctacgagaaggatggtcatcggtttttccgcctcaagaatatcgactcaaagccaaagatcaaggacttggttatcaaggcaaacggaatatttgcagatcctgaactggataaaatcgctctgaatgtggctaatcagtattggcgcgatatttacggaataatgttgcctgagactcgacagttttggcaaccccttatgttgcgaatgttcaacgaggcattcgaactagttcccatcgaccagtttctcaaggagtagctcaatttgcggttggatttaatagaatgatgatggttaaatagaaaataaatttttccattaggtgctattaaatggtaatattttttttaattaaaaaacatttat

SEQ ID NO: 12549 - protein, 250 aa, DROSOPHILA
MYCTIGLLSLLALGCSAAPTDKNYFADLPKCSTEEDQLGECVKQLFNTLTPRLKDGNPELRIEPYEPLHLNRTSFQYSSGTVNGRITVRNAKIYGFSSNRAKEVSVKLNGDKVKLRLVTQMPKLNIVGSYKADMQVNQLQLKPKGEFNVTLLDVEAITVTDGEVYEKDGHRFFRLKNIDSKPKIKDLVIKANGIFADPELDKIALNVANQYWRDIYGIMLPETRQFWQPLMLRMFNEAFELVPIDQFLKE

SEQ ID NO: 12550 - DNA, 5489 bp, DROSOPHILA
acgttgtatttaatttaatataattattttcgtgcacggatatccagcaaaaaagcggagcacagctcttcatcacgctcgttgctcatacgccgtgtggtgccgattttccagctaattagctacagtccgggcgaaaaacttcgtgaaaactctgtaaagcactatctttccacaaaaatacacgactggcaagcttttttttcgcacaataacctgcatctcattaataaaacaaaattgaatatagagtataattaagctttcagtataaatataagcacttcatttatgttgggctaaatattggtttatgtgaataattattattataattatatattttcaaagtatatgtaccctttacttagactacttatacatatgtatgcacgatcaaaactagtttgtaatgtttcaagtttgctttcaatctaatttcatacaatatcttggaattccctgacttgtgctcgacaatgtgctcctttagatttgatttgtactttgcacagtttgacataattcctcaggcagtcgcaatataaacaaatcattgcctgcccctggcaaactttctgtcacaactttcacacgacaaagtttctccattttgtcctttgtacgcccccatcgagggatggtgcgtgggtcgaagaagttagcttttcggacctggggacacacacatgtggcccaagtccatgaattatgactaaagcttaattatgtcgagccaagattagaccggcaggcatgatttcatcacactgaatataaagaagagtatagagaatctggttggatgggcaacgtagcaacgtggctgggccattacattgattctgatatggttattcggttcattaaaaagtttcgccgcacatcgtattgatatttcatgcaagttatgaatatagcaagacgctcgaagtttgcttcttctgctgcagttttaattagggcacaaaatcaacgaagaaactttgacgcacttttaatgaagcaacttttcgacgaacagttgtatcaccctgaagtcaacgccttaccacctcacttcatctcacttcaaaaaatacgtcattgtattttcagactatgagaccaggtaaagaaacgaatttaactgccaaacgagaaaggaattcataggtattaacttaagtgtatacatttggcaaataatatgtatatttgttttatttatatgtataaaaagtatatttgctttaaagcgtgcttagtttaacttaaagaaaacaaacccattgatccttcggcgctttttaaatattattttgtaccgcaatttcagacaactggtttcggtggattgcccgacgtcaccgagcactcgaacatccgccgcacactgtcccgccagaactcgatctcgaacagcgattccggcggcgagatagccagcatccagaagtcaaaggtgaactttggcaatcccctcgccggcggcgtggtcgtcggtggagatatagttggtctggacgccaagtcgcccacatcgctgggttccacgactggagctggcgccactggtaaagcgaagggaaaggcgtcaaggaaggcgaatgccggaccagatggcggacagaagggcaggagaggatcctggctggtggccatcaccctggtcagcgccatctgtctactggccatcgccgccactttggcctaccagcacttccttatggcgcccagccgcaattcccatgcccaaagactgagaatcgttcgtcgaatcctgcgtgaggtgccgctggtcgacgggcacaacaattatgcctggaatgttcgcaagtacgcccacagcagcctcgaactccatctcagccacgacgtggaccacaaatcactgtggtcgcgaccggcgtgggcgcaaacggacatggagcgactcaagcagggattagtcagcgtccaagtgtggtgagttccattatgaaagccaaattctcagtattattgcaaatatgtatatacttagaagaggtcataaagaagaattgacaaagctaagaaaattaatggttgttattagacttgaggtattatattattcatttatttttaaaaatttaatttaaaattagatggttatgttttgtcaggatgctcacttgtttatgggttttcagaatatattaataaaatcaagtattacctctccaatataatcattttacagccagtgacaggacaatccagcacaatcgagcctataactgatgcttaactataatattatcattcaacggggcgtatacgcaataatagtaaacccaccgggggccccagtcatgaaaattgaaaagtcacatagaaccgcaatcaggccgatgcgacacatctactcgggtcagaggtttgaccccccacacacaaaacatggcaactatagccagctgccacgcccaccgatggccatccaaacagccgcccactttgcatgaactccactatatacccaacacctcccgcgcgaggcaataaaaagctgccaacaatttgactgcaaaataaaatttggcaaccggctggatgccccagggtaagcagccaacctgtctgcagttcgcccttctcagactttgcatacacaaatacactgggagaaaattcgaaccaaatagatcttaagcgatgcattttcggattttgaggcatatgagactcttaaaatgtagctgattcaaaatcattttagagtataataaggtgaacactaaagtagttattaccctttagtacaaaaggctagccgaattgggaattctcaagaaaatcccgaagaattctcgaggaattcccaaagaattggaataggttttggtagtgaatggtattatttttacttctctgtgtatcttacacccacttaatgccctttttcgaatttgtttgatggaaaaagggaggaggaggaggagcacaatctgacaggcaccagacaggtggagtatgggaaaaacgctgatgggcaatcgacttgagttcatttttggtaggaaaaactaccaccatccacagtctacttttgcgcccgccagatggcgcaagcgtaacttttcgccaattttggcgattcaattcgctggatgaccttgctgaacttcgttttgggcaaaatcagcgggatttctggacttttgcggacctctgcgaagttttggctctcttattgccatatcaaatggcaactaaaatgcttactaaccactttagcactttcaatttgaattttacaataaaactgcagtcgtggatggcagggaatgttggtagctgtggtaatagggcaacaattaactttcaaatattactcaattagaaggtatataatataaatataaaatagtgtatattgtaaatataatgttaaatagatataaatatttagtgaataaatacatagaatacggaataaatacattatatttatatatgtgtgggtatcatttattgcgaggcgccttttatgtataaatgtacatatacgtatgtttcttgttttggcacggtgactcctggcaaaagtgcgctaactcttacactttccgtgtccttttgcaggtcagcatatgtgccgtgcgaggcgcaaggcttggacgcggtccagttggctctggagcagatcgacattgtgcggcgattgtcggacatgtacgcccgggaaacggtgctggccacatcctcgcaggacattgtcgatgcacatcgccggggactcctggcctcgctaattggcgtggaaggtggccacacgattggctcctccctgggagtcctgcgatccttttactcactgggcgcacgctatctcagcctgacccatcgctgtgacgtctcatgggcaggatcgagtgcatcgccggcggaacagggactcacgccctttggcaaggcgattgtgcgtgagatgaaccggctgggcatgatgatagatctgtcgcacagctcggatgccacggccagggatgtacttcaggtgacccgcgctccggtcatcttctctcattccgccgcccgccagctgtgcaattcgacgagaaatgtgccggatgacatcttacgcctggtggccgagaacgggggtcttatcatgctgagctttgactccgaggatgtggcatgtgggcggcaggcgcgcctccaggacgtgatcgagcacattaagtatgtgcgggccattgccggcatacagcacattggattgggagccggatacgatggcatcgagctgccgcccttgggactggaggatgtgtccaaatatcccgagctcttggccgccctgctggaggatcacaactggagcgaggaggatgtggccatgctcgcgggcaggaattttctgcgcatcatggaaacggtggaaacggtgcgggattactggaagcgagcggccatccagcccattgagcagacggagccgcagcccaagacgcagtgcacctacatgtcctcgtgaccgcaggcgcaggcggtgaggcagcgacgcgatgagccgcccatggagcgggccaatcgaaccactgccaccttgacgggggagcacttctggcaacgcggtccggagtcgagggactccgtctccaatcgcaccaatccggcggtcatcgcggccacgacaacgagttttacggtcagcgaactgtttcagtaaactggaattaacataagagattttggcttgcggttcggctcgccgagatttcgggaaaggagggcgtttactgaggtactgaaaacccgggaagggtctttaaaacagttcaatttcaagggaatactttttctttagatattcaatatttcattattttctttgggaatgagaaacacatattgataaagccaattggaaattcgttaaagaagccaatatgtacataaactagatcctttgtgctgccatcacttgccccctctggtcgaaaagtgaacgaagaactgtcgtggcgaacctcgtgaataaatagtgtgtactcgtaatttacttccataggttgcattgataggcgtatgaataaataataataataaatgtactagtatttagcccataattgtttgcagctatacttatttggtgttgtggcaatgcataatttatgcacaatgcggatacttattgatgttgctgtaccatggggcgtatgcgcgacgcagcgagcaccgaaccgcaaaccgaaatcgttcttggcttgcctgtgactgtattatatatgtagggcacacatcaatgattcacgcaaattatcgcaattaagcgcaatatatttaatcacaaacatcacacatacataaatacaaacgaatacttgtattaatcatcgaaacgaattaattgcagcagttggcatttatgccaggatcatagggtcaaacaacatacaaaactgtaagcaacgccagcaattcaattaaaatgagatttttcaccctggctgcatgtgaatccatctgaa

SEQ ID NO: 12551 - DNA, 1566 bp, DROSOPHILA
atgaagcaacttttcgacgaacagttgtatcaccctgaaacaactggtttcggtggattgcccgacgtcaccgagcactcgaacatccgccgcacactgtcccgccagaactcgatctcgaacagcgattccggcggcgagatagccagcatccagaagtcaaaggtgaactttggcaatcccctcgccggcggcgtggtcgtcggtggagatatagttggtctggacgccaagtcgcccacatcgctgggttccacgactggagctggcgccactggtaaagcgaagggaaaggcgtcaaggaaggcgaatgccggaccagatggcggacagaagggcaggagaggatcctggctggtggccatcaccctggtcagcgccatctgtctactggccatcgccgccactttggcctaccagcacttccttatggcgcccagccgcaattcccatgcccaaagactgagaatcgttcgtcgaatcctgcgtgaggtgccgctggtcgacgggcacaacaattatgcctggaatgttcgcaagtacgcccacagcagcctcgaactccatctcagccacgacgtggaccacaaatcactgtggtcgcgaccggcgtgggcgcaaacggacatggagcgactcaagcagggattagtcagcgtccaagtgtggtcagcatatgtgccgtgcgaggcgcaaggcttggacgcggtccagttggctctggagcagatcgacattgtgcggcgattgtcggacatgtacgcccgggaaacggtgctggccacatcctcgcaggacattgtcgatgcacatcgccggggactcctggcctcgctaattggcgtggaaggtggccacacgattggctcctccctgggagtcctgcgatccttttactcactgggcgcacgctatctcagcctgacccatcgctgtgacgtctcatgggcaggatcgagtgcatcgccggcggaacagggactcacgccctttggcaaggcgattgtgcgtgagatgaaccggctgggcatgatgatagatctgtcgcacagctcggatgccacggccagggatgtacttcaggtgacccgcgctccggtcatcttctctcattccgccgcccgccagctgtgcaattcgacgagaaatgtgccggatgacatcttacgcctggtggccgagaacgggggtcttatcatgctgagctttgactccgaggatgtggcatgtgggcggcaggcgcgcctccaggacgtgatcgagcacattaagtatgtgcgggccattgccggcatacagcacattggattgggagccggatacgatggcatcgagctgccgcccttgggactggaggatgtgtccaaatatcccgagctcttggccgccctgctggaggatcacaactggagcgaggaggatgtggccatgctcgcgggcaggaattttctgcgcatcatggaaacggtggaaacggtgcgggattactggaagcgagcggccatccagcccattgagcagacggagccgcagcccaagacgcagtgcacctacatgtcctcgtga

SEQ ID NO: 12552 - protein, 521 aa, DROSOPHILA
MKQLFDEQLYHPETTGFGGLPDVTEHSNIRRTLSRQNSISNSDSGGEIASIQKSKVNFGNPLAGGVVVGGDIVGLDAKSPTSLGSTTGAGATGKAKGKASRKANAGPDGGQKGRRGSWLVAITLVSAICLLAIAATLAYQHFLMAPSRNSHAQRLRIVRRILREVPLVDGHNNYAWNVRKYAHSSLELHLSHDVDHKSLWSRPAWAQTDMERLKQGLVSVQVWSAYVPCEAQGLDAVQLALEQIDIVRRLSDMYARETVLATSSQDIVDAHRRGLLASLIGVEGGHTIGSSLGVLRSFYSLGARYLSLTHRCDVSWAGSSASPAEQGLTPFGKAIVREMNRLGMMIDLSHSSDATARDVLQVTRAPVIFSHSAARQLCNSTRNVPDDILRLVAENGGLIMLSFDSEDVACGRQARLQDVIEHIKYVRAIAGIQHIGLGAGYDGIELPPLGLEDVSKYPELLAALLEDHNWSEEDVAMLAGRNFLRIMETVETVRDYWKRAAIQPIEQTEPQPKTQCTYMSS

SEQ ID NO: 12553 - DNA, 3245 bp, DROSOPHILA
cctatcgctgtcttcggtgatctagcccaaacagctgattttaccaaaatacttaccacacgtgtgccactttttaagttatattgtttacagtttttgggaattacagcttacaatggtatatataaatctttaatatttaattaaacccgacctaacatcttcagttcttttgcagggaaaacacaagaaaacgcagaaggttaagaaacaacgtaatgcacagcttaaacgcatcataaaacccacagacgcgcggcttaaggatcagattcgagtgaaaagaaagaaggccgaggatccgcaccagatcaaggtgcacgaggccacccagcagagctccgctctgttcttccagtacaacacccagctgggaccgccgtaccacatcgttctggacacgaacttcattaactttagcattaagaacaaactggatattgtgcaaggtatgatggactgtctgtatgccaagtgcataccctatatctccgactgcgtgcgtgccgagctggagaagctgggcaacaagtacaagctggccctgcgcatcatctccgatcccagattcgagcgactgccgtgcctgcacaagggcacctatgcggacgattgcctcgtggagcgggtgcgccagcacaaatgctacattgtggccaccaacgacaaggaccttaagaatcgcatccggaagattcccggcgtgcccatcatgtacgtggctgcgcataagtacgcgattgagcgtatgccagaagcgtatggagtcaaggcgtagaccttttttacttcttatcctaagtgtacatttttaaatatattcttacatgtaagcagcaagcaatgcgtttcgtatttcctgttgttttttagtagaatgcttttactgcattgtctggatcaacaaaggagacataagttctattaagttacaaatagtttaactacaacagaatctccaaatcgaccaatgtccacaacaataacaaacacgaagcgattacatttaaaagtttatgactttattcaaaaactctggattgattggcctcgaaagtgttcacttaggcatcggcgtgcagacgaggagtgggcttggacaggaagtccgagtatgcctggtaaggagtggagcccagaggcatctccttccacagatcgggggtcaagtacgcgtacgtcttggcgatggcggcatatgtagccttggcgaagttgccgagggttccagtggagccacgggccgaggtgtagcaatcctcaataccggccatggtcagcagcttcttgggcacgggggccgagacaatgccagtaccacggggagcggggatgaggcgcacggagacggaaccgcacttgccggtgaccttgcagggcacggtgtggggcttgccgatcttgttgccccagtagccacggcgcacgggcaccacggagagcttggccagaatgatggcaccacggatggcggtggccacttccttgctgcacttaacgcccagaccaatgtggccattgttgtcgccgatggcaacgaaggccttgaaacgggtacgctgaccagcacgggtctgcttctggacgggcatgatcttcagcacctcatccttcagcgaggatcccaggaagaagtcgatgatctcgaactctttgatgggaagcgagtacaggtagatctcctccaaagacttgatcttgccctcgcgcaccaggcgtcccagcttggtcactggcacccactccttggagtcctcctttccacgtccacgggcccagcgtccacggccacgaccgcgtccaccacgaccaccacgagagccaaatccgccacggaatccactacgggctggagcttcgtccgccattctgaaagagagttaaaaaaataggttaggttcacgttttttattgtaaatcctaagattttctgctcccaagccagatacctaatctttagccgcaagtctcatagtgactaccgcaaaataaagtaaaggtgttaaccctactacatatagtcgccattttggaacacgtggtgtcccccaaagggacaattgatttttacgaaagatacaacccatcacttggatttttacacttttagctagcttttagcatatatcaaaactctgactgtggtatggcgcatgctgattaaattaaacaccatttatttcccacataatccaaccgaaaatgcttacttgtaggtctatcaactttattggggtgaagacaaaaacgaaatggccgagccatccgcttagagctggggcaatcacttacgatagtgccgataccatcgataagcataatatcgtatgggaaatcgatatatatacaaatatttaaatgatgaatttcaaattatgtcaagttacttacaaaatactgtgtaaaaatttcagaatttaaacatgtttttttttttaatagttttaagagtttgacgaaatgaattagatatatgtgttcagggctttttacattaaagcgattttctttttaagcccaatttttggtcttgtttttgaagacgaagatccattttgctcttcttaaagataagttgaaaaatataataattaaatttataaattatttataattgtatattatataaatatatatttaatggcacatttataatatgtaagttcatacaattttaatggttttagtgtttaacgaccccaaaagaagtttgggaaaggattcggcaattgtggtagtggtggcaaatttggaagggaaatttctggtaaggatattgctgttaaatttacttccggcaaaggtggcaaaggtggtagggggggcagcggaggcaacgctgttggtaaaggaggcaaaggtagagggatttcaggaagtggcagtgggggccagggcaggggcaacgggagaggaggaagatcaggaagtggaagaattgatggaccgagatcagcgggtttgtgataatgaatatggtgatgatggtggtgaacatgttgctcttcggtggtggttgattccgtggtcgtattgctctgattcgatgaattggtagtagtttctacggatgttggttcctgatttgttgtactcatttcagctgtcgtcctttttgttgtttgatctgctgttgtcttaaccgatgtgcttgtctcccgagtggttggctctctggttgtctttgtggtagatgtcttgcgagtagttggttcttcggtaggctttaaagtagttgatttctt

SEQ ID NO: 12554 - DNA, 904 bp, DROSOPHILA
ttgtcttcaccccaataaagttgatagacctacaaaatggcggacgaagctccagcccgtagtggattccgtggcggatttggctctcgtggtggtcgtggtggacgcggtcgtggccgtggacgctgggcccgtggacgtggaaaggaggactccaaggagtgggtgccagtgaccaagctgggacgcctggtgcgcgagggcaagatcaagtctttggaggagatctacctgtactcgcttcccatcaaagagttcgagatcatcgacttcttcctgggatcctcgctgaaggatgaggtgctgaagatcatgcccgtccagaagcagacccgtgctggtcagcgtacccgtttcaaggccttcgttgccatcggcgacaacaatggccacattggtctgggcgttaagtgcagcaaggaagtggccaccgccatccgtggtgccatcattctggccaagctctccgtggtgcccgtgcgccgtggctactggggcaacaagatcggcaagccccacaccgtgccctgcaaggtcaccggcaagtgcggttccgtctccgtgcgcctcatccccgctccccgtggtactggcattgtctcggcccccgtgcccaagaagctgctgaccatggccggtattgaggattgctacacctcggcccgtggctccactggaaccctcggcaacttcgccaaggctacatatgccgccatcgccaagacgtacgcgtacttgacccccgatctgtggaaggagatgcctctgggctccactccttaccaggcatactcggacttcctgtccaagcccactcctcgtctgcacgccgatgcctaagtgaacactttcgaggccaatcaatccagagtttttgaataaagtcataaacttttaaatgtaa

SEQ ID NO: 12555 - protein, 267 aa, DROSOPHILA
MADEAPARSGFRGGFGSRGGRGGRGRGRGRWARGRGKEDSKEWVPVTKLGRLVREGKIKSLEEIYLYSLPIKEFEIIDFFLGSSLKDEVLKIMPVQKQTRAGQRTRFKAFVAIGDNNGHIGLGVKCSKEVATAIRGAIILAKLSVVPVRRGYWGNKIGKPHTVPCKVTGKCGSVSVRLIPAPRGTGIVSAPVPKKLLTMAGIEDCYTSARGSTGTLGNFAKATYAAIAKTYAYLTPDLWKEMPLGSTPYQAYSDFLSKPTPRLHADA

SEQ ID NO: 12556 - DNA, 2906 bp, DROSOPHILA
aaccagagaagaaaatatatggattatcgccaaatgacccctaacacaccccatataaaaacaaaaatacttaacttttgcatacaatctcttatggtacatcatttgtttctaaacacggcctttaacatttgagtgtttgcatagagaacacattaaagataataataataatacgcgtaatagtatatgaaagaagattcgataggcgggtgtagcgcctgggggaatgcatctggcagatccgatatacatatgtatgaattgggccgctactccagcgaatttagcgtgagcagctgcttgagcaccttcgtctgcgaggtctcccggatctcgcccgccaggaacatctcgtccaccacactgtacaccttgtagaagttgaagaccagatccagctcgcacacattatggaagtattcgttgagcacctccacgaagttgtgaatggcctccagatagcacaggttgttgtcgtttacgtccacgcagatgcagaagtacagacccgcatagcgtcggtagacgatcttgaagttgcggaactacaaaggcaaaagtgtgataaaagggtgattcaaaagaacatatggactcgatcccacctccacaaagttggtgtgcttggcatcgcgcactgtgaccacggcatgcacctcctcaatcagtttctgcttctcgtcgtcatcgaagttcatataccacttggccaggcgagtttttccagctcggttttgtataagtatgaatcgtatctgggcgaatggaaggtcaaataggggtctaagcttatagctggctagttgcttaccatttttcgggaaattggttaaaccgtttcctgcttatttacaactttttttgtttcgagaatgggggcgaaaaactgattatgagcaaattgtgtatcactgggaccagggctaccactactgttccggaacagctgttacctcgtcagtgttgcaaacagttcgcgcagaaagcaaacgagttggcagacccgcgcgctgtattacgaagtttcactttcatatttgttttggccaccactccaaactagtcatttaccaaaaatgttggcctctcgcttgaatctcctgttgccccgcgtatcctggctgcgcggttgctcaacgacagcggtgggccagaaacatcagcgccaggtgcccacggagttcgccgtacacgatcctctgcaggctcacgctctaaaggaacagtgcatcctggttgacgccaacgaccaagccattggggccgcctctaaggcagactgccaccgtgtgcatccagagacgaatgatgttaagctccatcgcgccttcagtgtttttctcttcaattctcagggagagatgctagtgcagaagcgatcgtctcacaaggtgaaattaaagggtaatccccttattacaaggtccataatcctctgtatccttagataaccttcccaaacacctacaccaacgcgtgctgcagccatccgctttacgaaatcgaacaggaacgtcaggagcgcaacgcacagggcatccgtgtggccgctcaacgacgtctcaactacgaactgggcattcccacagaggaactgcagccacaggactttcgctacctgacccgcatccactacgcagacacgggcgacggcgtgtggggcgagcacgagatagactacatcctgttcctgcaaaaagacgtgacgctgcgtccaaatagcaacgaggtcagtgaggtgcgctacttgcgccgcgataagatcgacgaggcggtggcgaagtttagtgccccgctgacaccctggttctctctgattctgcagcatcgattgaaactctggtgggacaatttgcaccagctggagcaatttgaggacttgagtaatattcagcgcttttaagtgtgctaaccaaccaaaaatacacgtaatgacgtctaaaaggggcttttgttcgtttgggtttcaaattcgctttattcaaatggaaaatagtgtgtgtctgtgtgcggacaatgggcacaaagcggattttatgcaacctccgcgggtcgatcagttcagtacaacgcttttgtatatgtaaatataacaatacatatatagtttgtataggcgcacgatattcaatatgtttcatagcctaactaatgtgtttgtatgttgaatatcaaataactaattagcttttaaaatgatcacattacgtttcccataatcatcatcatcatcgtcatcgtcgcaacaagaataaatatgtacaaaagtacgactacaggctaacagagacacaaactaaaagtattgattctagcctaaatacagaagaaacaaacaaaagacaagctgcagcacttaacattaacatatatcgcttcgggagcgagttcgaagcgcgcgcttcgaggcgtgaagtgcagaccccgggcgaatccggagtcgacgttcacgaggcaccaccttggcaccgtttctctgggtactcgagtaaataaagcaattgctcggaaattccaacaacttaaagctagaccctgcaaacttcgatcgatggtttgcacctttacggcagggggtgaatatatagttatatacgtatacgtacttttcgcatgcaatgggggtcgtatttgtggatgtgtgtatgtgtggggatcaggataagcgcttcatcctgaattcgattagtggttaaggcacataggtatgagtctatcgtgaatctcaggctcgttgaatctatagagttacgggtttaaagctgctgggtggcacactttgtcgttcagttccatgtggctcctttaccattttctaggacaagccaaacagtttcagggcattaaaggcagtggccaaagccacctcgtccgggcttttcttcatgaaggcggctatcatc

SEQ ID NO: 12557 - DNA, 850 bp, DROSOPHILA
gcagacccgcgcgctgtattacgaagtttcactttcatatttgttttggccaccactccaaactagtcatttaccaaaaatgttggcctctcgcttgaatctcctgttgccccgcgtatcctggctgcgcggttgctcaacgacagcggtgggccagaaacatcagcgccaggtgcccacggagttcgccgtacacgatcctctgcaggctcacgctctaaaggaacagtgcatcctggttgacgccaacgaccaagccattggggccgcctctaaggcagactgccaccgtgtgcatccagagacgaatgatgttaagctccatcgcgccttcagtgtttttctcttcaattctcagggagagatgctagtgcagaagcgatcgtctcacaagataaccttcccaaacacctacaccaacgcgtgctgcagccatccgctttacgaaatcgaacaggaacgtcaggagcgcaacgcacagggcatccgtgtggccgctcaacgacgtctcaactacgaactgggcattcccacagaggaactgcagccacaggactttcgctacctgacccgcatccactacgcagacacgggcgacggcgtgtggggcgagcacgagatagactacatcctgttcctgcaaaaagacgtgacgctgcgtccaaatagcaacgaggtcagtgaggtgcgctacttgcgccgcgataagatcgacgaggcggtggcgaagtttagtgccccgctgacaccctggttctctctgattctgcagcatcgattgaaactctggtgggacaatttgcaccagctggagcaatttgaggacttgagtaatattcagcgcttttaa

SEQ ID NO: 12558 - protein, 256 aa, DROSOPHILA
MLASRLNLLLPRVSWLRGCSTTAVGQKHQRQVPTEFAVHDPLQAHALKEQCILVDANDQAIGAASKADCHRVHPETNDVKLHRAFSVFLFNSQGEMLVQKRSSHKITFPNTYTNACCSHPLYEIEQERQERNAQGIRVAAQRRLNYELGIPTEELQPQDFRYLTRIHYADTGDGVWGEHEIDYILFLQKDVTLRPNSNEVSEVRYLRRDKIDEAVAKFSAPLTPWFSLILQHRLKLWWDNLHQLEQFEDLSNIQRF

SEQ ID NO: 12559 - DNA, 3866 bp, DROSOPHILA
tggagttcgatggcggagtggtcattggagccgattcgcgcaccagctcgggcgcctatgttgccaatcgggtcaccgacaagctgacccgcatcacggacaaagtgtactgctgccgcagtggctcggccgccgacacccaggccattgccgacattgtggcctactcgctgaactatcacgagaatcagaccaacaaggatgctctggtgttcgaggccgcctcagagttccgtaattactgctacagctaccgcgagtccctgcttgccggcatcattgtggctgggtgggatgagcagcgcggcggccaggtgtacagcatcccgttgggcggcatgctgacccgcgagtcctgcaccatcggcggatcgggatctagttttatctacggatttgttagggagcactaccgccccaatatggcgctggaggattgcgttacattcgtcaagaagggtaggtaatcccaaaaaaaccaaaacagtttcccttcaatcgaatcccatttaaacctcctccaacagctgtccagcacgctatctaccacgatggcagctccggtggtgtggtgcgcattggcatcatcaccaaggatggcatcgagcgacgcatcttctacaacacagaatcgggcgcatcggctgtttccagcactcccagcttcatttcctcggaataaatagtatacctacccaagtaagatcgatcagagaaagagttgcaaactcgtctcatgctaataaacctggtttttgtaatatgcatactttaatttgtattttggctcttatggcagtacaaaagttaggtctaggggctaaaatggtaataaataatcgaaaacctaaacctaagatgcatagtcatacagatagtgctgttcctgacactggtccttcctcacaactcagataactactgcggcgagagtggaatgttccctacggggaagtcatttcatcgcctatcacatgacagtcaataccgatatccttcgcttaaactcttatccagtcaggtagtgaccagagatttaggagttgagtttggccacttcagctgcgtctatagactgcgtctccatggacttgttggtggcacatcgctgcctgcggtggcggtacaatatctccggtgtccaaacaagaaccaccaccagcagaatgactccttgagcataaaggcagattaggtaggagtcggcgtagtctcgcacccatcccagcagctggcccactgtgataacaataacgcccttggacatcatgctcagacccagaccgccggccagtttttccgagcggcaatgcgccgatatggtgagattgttgttgattacagtggctgatttcatcatgcctgtcaacacagacatggtgatgatcacgggcagcgtttgattctcggcaagcacacagcgagcgacaaagagtccaacaatgccgatcaggaacactacgcgatagggtattctaaggtgatctgtgacgatgggcagcagcaaacggaacacaatgtcggcgccagccacaagggacatgcagaaggccaccatttggctgttaagttgtgccgtttgtccaagaaaaccaggaaagatcatcgtgaagtttatggtggccgtatagactagagccatgcccacaatgatgctccagaatactaaatctttgagcagctccagatccattgcctgtaccaaccgctgtcccattcggctgcacagagtatccacatttggcgggctacgctcgatcttgctttgattagtcggaacaatcaccacctgaaggggactagtcttttccccatcggcctcggtcaggagtcgaatgtgtttgcggttgttgtgcttggcaggtgggtttagtggtttcaagaaggcagcaccaaaaagctgtaaggtactcgggctgtaagcattggatcaacataatattatattcttaacttaccccaaatagtgatagggaagacatggataggactgcgtagcggaagccgtggttatccaagaggtaacgcactaggtgagggataagcacctgtccaaggccagcacctgccaatgaaacacctacagcccgtcctcgtttagtggtgaagtacgagttaatggccatgaatgtggacggcgagatgaggccgagtccaaagcctacgaagaaactgtagcccagaatgaagtgccagctttcagaggcaaaggcgcacagagccaggcccagggcgactaggatgcaacctgtagcagctacatttcgcggcttaaagctcttaatcgcgggtccaatgaagaggccagagaaattgagagctaggctgtttagattcgtgatcagggccgccgtaaatgtgtcctcttgcattttctgcagctcacccacaaagagctggccgaacactgacaaaatggattggttggtcatctggatgccggcatatgcaataaatatgtttagttttgggtattccttttaaagactattgaacactcacattaatcaatgcaacggcggccaccacaatccatccgtagcccccatcggggacaacgcgactcgattgcacatccatgactgtgctctccgagtttctcgtcgagattaagctggctaaaaatatgtaaacagcgataagtggactgttattaaaacgtctggatttgtttatggcgtctaaagacaggtgtaaaagtgcgttccgataagcccggcgaaatggcatttacccagtggagacgagttgaacggctcgtctcagagatttccccaaactgcgtggccatttcgcaagcaacgttttaacaaattaaggcgaattaaagcctaaattaaaataaattaatcccaaagtcacaaaactttgaatcagtatgacctctctgcgaatgccataaaacgtatattcggaaatattgcgcacttccagatattgcgatatgcaccttctttttatgtgcgaaactgtcagtacagattcgtttaataaaatatttagggtttacttttccagatagtgcttatctaagtgcttattataagcaagtgaaaacaaataacccgaagtttttaattcaaaaacacgactatggtcccactattctggcgccgcttatcgatagccgctagcgatgacagtaatcagctgtgctttgccctgttttcatttgtagaataacacacatttttaataattttttttgtatattttcgcgcgtctctctcacaaatgccttgttttctgtgcactcagactgtggatgatgcggcgggcaatatagagtttgcctcggaggaagccgattcacttggcctgcggtgcatcatcgagaaacacttctggcttcaggtaaacaaacaaatattacctgtgttattattgttattgttattgaagagtgatctttttcagatccctgactcaaaaagagccggctatgtgtgcggcccctgctgggagcagctactgctctttcacaacttttacctcaatgtggaacaagcccacaaagcgctggagcaaactgttttgaaggagacatctccgccagaagtggttgcttccgctctagaagagcacatcgttaaaagcgagcatgacgacagcgtagccgctgccgtcaaacgccgacgtggacgtcctcgaaaagtcgctcaacaggatgcacgcgaggagttgaagagcgtgctggagcaaatcaatttaaatgaaataaaaatcgagttccccgaagctgacttgacaattgccgatgtgcttgaggatcaggaggagcaggatttcctacccgacgactgcatcagcaaggagggagcggaggatccagaggttttggagaaaaaaccgccgacgcttaagcg

SEQ ID NO: 12560 - DNA, 1622 bp, DROSOPHILA
ttttgtgactttgggattaatttattttaatttaggctttaattcgccttaatttgttaaaacgttgcttgcgaaatggccacgcagtttggggaaatctctgagacgagccgttcaactcgtctccactggccagcttaatctcgacgagaaactcggagagcacagtcatggatgtgcaatcgagtcgcgttgtccccgatgggggctacggatggattgtggtggccgccgttgcattgattaatatgaccaaccaatccattttgtcagtgttcggccagctctttgtgggtgagctgcagaaaatgcaagaggacacatttacggcggccctgatcacgaatctaaacagcctagctctcaatttctctggcctcttcattggacccgcgattaagagctttaagccgcgaaatgtagctgctacaggttgcatcctagtcgccctgggcctggctctgtgcgcctttgcctctgaaagctggcacttcattctgggctacagtttcttcgtaggctttggactcggcctcatctcgccgtccacattcatggccattaactcgtacttcaccactaaacgaggacgggctgtaggtgtttcattggcaggtgctggccttggacaggtgcttatccctcacctagtgcgttacctcttggataaccacggcttccgctacgcagtcctatccatgtcttccctatcactatttgggctttttggtgctgccttcttgaaaccactaaacccacctgccaagcacaacaaccgcaaacacattcgactcctgaccgaggccgatggggaaaagactagtccccttcaggtggtgattgttccgactaatcaaagcaagatcgagcgtagcccgccaaatgtggatactctgtgcagccgaatgggacagcggttggtacaggcaatggatctggagctgctcaaagatttagtattctggagcatcattgtgggcatggctctagtctatacggccaccataaacttcacgatgatctttcctggttttcttggacaaacggcacaacttaacagccaaatggtggccttctgcatgtcccttgtggctggcgccgacattgtgttccgtttgctgctgcccatcgtcacagatcaccttagaataccctatcgcgtagtgttcctgatcggcattgttggactctttgtcgctcgctgtgtgcttgccgagaatcaaacgctgcccgtgatcatcaccatgtctgtgttgacaggcatgatgaaatcagccactgtaatcaacaacaatctcaccatatcggcgcattgccgctcggaaaaactggccggcggtctgggtctgagcatgatgtccaagggcgttattgttatcacagtgggccagctgctgggatgggtgcgagactacgccgactcctacctaatctgcctttatgctcaaggagtcattctgctggtggtggttcttgtttggacaccggagatattgtaccgccaccgcaggcagcgatgtgccaccaacaagtccatggagacgcagtctatagacgcagctgaagtggccaaactcaactcctaaatctctggtcactacctgactggataagagtttaag

SEQ ID NO: 12561 - protein, 471 aa, DROSOPHILA
MDVQSSRVVPDGGYGWIVVAAVALINMTNQSILSVFGQLFVGELQKMQEDTFTAALITNLNSLALNFSGLFIGPAIKSFKPRNVAATGCILVALGLALCAFASESWHFILGYSFFVGFGLGLISPSTFMAINSYFTTKRGRAVGVSLAGAGLGQVLIPHLVRYLLDNHGFRYAVLSMSSLSLFGLFGAAFLKPLNPPAKHNNRKHIRLLTEADGEKTSPLQVVIVPTNQSKIERSPPNVDTLCSRMGQRLVQAMDLELLKDLVFWSIIVGMALVYTATINFTMIFPGFLGQTAQLNSQMVAFCMSLVAGADIVFRLLLPIVTDHLRIPYRVVFLIGIVGLFVARCVLAENQTLPVIITMSVLTGMMKSATVINNNLTISAHCRSEKLAGGLGLSMMSKGVIVITVGQLLGWVRDYADSYLICLYAQGVILLVVVLVWTPEILYRHRRQRCATNKSMETQSIDAAEVAKLNS

SEQ ID NO: 12562 - DNA, 3671 bp, DROSOPHILA
caaaacttttatcaagcaccttatcaacagtcaattagccaattcccaatttatggccaattcaactaacaaatgggtgcaacaattcgaaatgaccatttggtcactgatcctaatcaccgtcacatacatacatatagctctgttatatggccaatgcaatctgaagagactgctgtcgcggcgcttatcgatttgcccgataagatgccatcgccgagtggggacccccgcaattcattataatggagcctcccccccttcaaatgctagctccacaagtggccagctacttgagttgctgctcggttgggtaatatcagcaatcaacaatgggctgggaatggctgtcttaagatggcaaggggggattccagcgagattcgaggggtcttccagccactggcccacgacaagtgcagtctgtggcgctggctcacttgacctttgcgagtagccgacaatcaatggattggcgatgtggctgctgcgttttggatgttgctgcttgctcaccttgtgctcgctctcatggaacccgttcctgaacattcgctggtgcgcccgcttgaattcgtccataagcgccgtgtgctgatctcctccagctccggcagctccatttgaaccacctgcccctcctgctcctccgccgcctgtcaaattgctaatgcgttcgctgccctgcagtgtggcagccacgccagcaacattcgcccgctggcgatgcgacacttggccaacggagctgcggtgccctccatttccattgtggcccgtcagttgacgatccacgtttccatttccatcccgatctctatctcgattgtggcgctgctgatgctgctgctgctgctgcttctgcaataattccaattagttgctggtggagcaatctttcattgtgcacttaaaaaatcgcgcattacttcagtacgatattttgaagagattcaaaacaaaatcgaatgacttaagttattttatataaatttaaaaacattttttcaaagtgcagcaccaacctctttgcgcttcttgagctcctcggttatggcactggagagactgctgcccactgagccactggcattggctccttcattcatggccggcggcggtggagcaggtgcaggtgcgatgaccccacctgatcttgatcctgatccagaagatccagcagatccagcagatccagcagatccgcttgataatcctataccggaaccagcggaattaaccggcctcagatggctgcgcttcatggtggttgaattgcgggagggattagatggattcgattgtgactgctgactgcggccggaagttccgctgccagtcgatccggagcccgaaacggaactgccaccggtactggctatatatgtgttgtttatagaagtcccattctccgtcaactttatgatggtcttgttcatctgcttgtgcacctcaacgccctgcgaccaatttggactacctgccccgggtgctgagcttaagccacagccacctccacctgctccggactcctccctgacagccgtcaatcgcttggacttggcgtccgcccaacaagggctctgatctcccgtcaccgaactggcagagctattgtagccactggattcacccgggaagaggtcacatccagccgctgtgcgcaccaccatgtccagcttgctgctgctcttcatcacggccacggcctcgctaaagaggacgtccgagaagtcgatgctgttgacgctgaggatctggtcacctggccgtaatcccgcctcccgggcgacactccgatcctttgtgaactgcacgaagatgcccggcttccactcgggtcccttgcaaatccccagtcccagcttcgtcctgggcgccacatggaggaccacactgatgtcgcggctcgcaccgcgcctttcgcccttgaaggaactctccgagggagtgccgcttacgctgggtaacttcaccacgctccaggataagcgctcctctggtaagctaagaagttgtatacttagtaacactaatttgcattgtttaaagatcatttgcccttactccctcacaggcagcattcccacaccccgcactttcagggtcacccgatcctggccagccaccagttggatgaactccttgtgcacggcatcgtccagccgaaagccattgatccgcaagatctggtcgccaatctgcgagagaaagcaatgcgtaaatggaagacctcaccctggaatccgtcacgtagtgctacgtgatcggaatttttggttgacccactggcgccccagtgacttagtgacccactacttacccgcaaacccttcaggtgtgcctccccgccgtgctccacatgggacacaaagaatccggtgccgtgttcccgtcctccgcgcaccgtgaatccgtaggtgctgcccctttctggtccgccgaccagtagtcgcctctgatgcggcctcaccaggcgcagaacgcggaggcgggagctcgccggtatggcacaccacgaggaggccgccgtggtcgtcaaggtcatcacatcgctggacgccgaactggtcgtcgatccctgcatgctgctgctgcagtccgttgacgccgagttggtcagcgatgcggatgtggatatcgaagccgaggctgctgtcatcgtcatcatattgcgggatgtcttcacaagcagctgcagcacaggagaacaatattatattaattgtaagattcgttaaaacaaaaatccaaagtcatgatatataattactctaaaggtaaaaactgattggctaataagtcgataggtattagcttcattctaaaacctcataatgcataccctttatagctcctatcactcagaaaacgaacttgacgagttgccaaaaagcgaattaagtggattccgtgcgaaagttgaagaaagtggggagtgtcttcccccttctcaaaaaacaatgtcggattcgcgacgtgaacagcctgacaagtaatgaacgtggcagaagcagcagaatgcaaggcgagacgagactcaagtttaagtacatatgtacatacatatgtacatataaataaagtgagcaaaacttgaacttgcaatcgaaaatttcccaaattgggtcacacgcatcggcagaggcggtgctgctgctggtggcttgggtacactgagcaaatttccacagtaacatcatacccccagttggaaaaacaaataacatagaaatgaaacaaatcatgtagttataaattgactatagagtgggttattttgataggaaaggtgtcaagttttttttttcccccagtgtagaattggtgctggtggtggtgcctgctgctttcacgcaccactgccagttggtggagcttgtgagttggtaagccagagatctgaggcgatttacattcactgccgccgccaccgccgtcgcataatttcactttttcacgtaattctacgcttcacttgcagcacgaaaaaaacaaaaacaaaaaccaaaagaaaaacttaaagcgcgaaagaaactggggaaaattatagaaatttattattgaaattatgcgactgcccccgccgggccttgcattatgcacttcgatttggagcgaatcagctatttgttagctgccccagctgccacataaatcatttacttcgc

SEQ ID NO: 12563 - DNA, 1489 bp, DROSOPHILA
atgatgacgatgacagcagcctcggcttcgatatccacatccgcatcgctgaccaactcggcgtcaacggactgcagcagcagcatgcagggatcgacgaccagttcggcgtccagcgatgtgatgaccttgacgaccacggcggcctcctcgtggtgtgccataccggcgagctcccgcctccgcgttctgcgcctggtgaggccgcatcagaggcgactactggtcggcggaccagaaaggggcagcacctacggattcacggtgcgcggaggacgggaacacggcaccggattctttgtgtcccatgtggagcacggcggggaggcacacctgaagggtttgcggattggcgaccagatcttgcggatcaatggctttcggctggacgatgccgtgcacaaggagttcatccaactggtggctggccaggatcgggtgaccctgaaagtgcggggtgtgggaatgctgcctgtgagggacttaccagaggagcgcttatcctggagcgtggtgaagttacccagcgtaagcggcactccctcggagagttccttcaagggcgaaaggcgcggtgcgagccgcgacatcagtgtggtcctccatgtggcgcccaggacgaagctgggactggggatttgcaagggacccgagtggaagccgggcatcttcgtgcagttcacaaaggatcggagtgtcgcccgggaggcgggattacggccaggtgaccagatcctcagcgtcaacagcatcgacttctcggacgtcctctttagcgaggccgtggccgtgatgaagagcagcagcaagctggacatggtggtgcgcacagcggctggatgtgacctcttcccgggtgaatccagtggctacaatagctctgccagttcggtgacgggagatcagagcccttgttgggcggacgccaagtccaagcgattgacggctgtcagggaggagtccggagcaggtggaggtggctgtggcttaagctcagcacccggggcaggtagtccaaattggtcgcagggcgttgaggtgcacaagcagatgaacaagaccatcataaagttgacggagaatgggacttctataaacaacacatatatagccagtaccggtggcagttccgtttcgggctccggatcgactggcagcggaacttccggccgcagtcagcagtcacaatcgaatccatctaatccctcccgcaattcaaccaccatgaagcgcagccatctgaggccggttaattccgctggttccggtataggattatcaagcggatctgctggatctgctggatctgctggatcttctggatcaggatcaagatcaggtggggtcatcgcacctgcacctgctccaccgccgccggccatgaatgaaggagccaatgccagtggctcagtgggcagcagtctctccagtgccataaccgaggagctcaagaagcgcaaagaggttggtgctgcactttgaaaaaatg

SEQ ID NO: 12564 - protein, 493 aa, DROSOPHILA
MMTMTAASASISTSASLTNSASTDCSSSMQGSTTSSASSDVMTLTTTAASSWCAIPASSRLRVLRLVRPHQRRLLVGGPERGSTYGFTVRGGREHGTGFFVSHVEHGGEAHLKGLRIGDQILRINGFRLDDAVHKEFIQLVAGQDRVTLKVRGVGMLPVRDLPEERLSWSVVKLPSVSGTPSESSFKGERRGASRDISVVLHVAPRTKLGLGICKGPEWKPGIFVQFTKDRSVAREAGLRPGDQILSVNSIDFSDVLFSEAVAVMKSSSKLDMVVRTAAGCDLFPGESSGYNSSASSVTGDQSPCWADAKSKRLTAVREESGAGGGGCGLSSAPGAGSPNWSQGVEVHKQMNKTIIKLTENGTSINNTYIASTGGSSVSGSGSTGSGTSGRSQQSQSNPSNPSRNSTTMKRSHLRPVNSAGSGIGLSSGSAGSAGSAGSSGSGSRSGGVIAPAPAPPPPAMNEGANASGSVGSSLSSAITEELKKRKEVGAAL

SEQ ID NO: 12565 - DNA, 2578 bp, DROSOPHILA
gtgcaccaatggtaagtggggatcgagcgtgggaaacgcgcccttgccgtaatcccaaaaaaaggccatttgaaaagcacaagtcccttcgcagaaatatcaacaaaaacaaggcagcaaatcagatacttcagctggcgcggaagccatcgcagaaaaccaaataaacagaagcctccagaaacagattctcatcggttttgacaccaaatgaagttgtataatagtcgagtgcacgggaaaaaatattccagaacgtgaagaaatattttaattttatatatcttgaataacataaagaatggtgttgacaaacaccacagaacataagtttgtaaattcatacaagagaattcaacttgtatcttaacttgtaaaattagctatactttcaaataaatattatatctccaatcattttttaaagtgcaaatcaatttgtgattgagatataggcatacagggattgtatggtccaatatatctggtgtcttctggttttctgtgaattatttggaacttccccaattcgcgttcccttcgagcaaccaagtatcccagtaaccagcaacgtttacttttccgattcctaggaaccccaagtaggtgtctttaggccggcgacaacttttgccatcagcaaattttcctcaatgaaacacgcatcgtctgcagtcgacatcgctgcttcggttgcgtaagctgtcagaaatctgagatggttaatgcaaggtaagtaaaaaaaataaaatgcgactgaataatacctcgcagtatttagtactaaagaccaaaacaattgtgaaatacgaaagatgcaaattgtgcaaagtaactgtaaagaaaaccaagggattcatatatgggatgagcccatatttccgtaaaactaatatgccctgagccgtgctacttagggtgtatctaagctgccgctgctgctccaattccttgggccattcagtcgcttaagatccgaaggtggagctgggccaggcttatgatggcacgtcccgaggagcagaagtctcatgttggagcaaagtcacgatctcatcagtatcgagaggtttttaagccaatgatggagaggaagaggcggtcacgcatcaatcgctgcctggactttattaaggacctgcttcaggaggtgtcgcatctggtgagtggtctcacgttgacctctgacccatggtcttcttactcatctcagctcgtagcaaaatgattttgtatattgtatctcttaaaattgatacaatataatatgtttgaaatgtttgcatacaggacggcgagaccatggccaaaatggatatgggagatgtcctggaattggcagttcaccacctgagcaagaaaaactgtccggtggccacgcccaccacagcgcctacatccggagtatatcagagcccaattgattgctattggagtggctttcgagaatgcgtcctggaagtgtcccaatttctgcaacacaacggctatcagccgagtttcgaatttgcgaaagaattggatcatcttgtggcctccacatccaaatccaagccaaatctctggaggccctggtagtcgtcatgggaaatatccacttaagttcctcaactcacaatttttaaataggataattataaactatttagacccaagtccactaaagacagttttacaatagaggcatgaaataaaactgcacattcgttttttgctttaagtttatctttttcttttcgcaataattccaaaaacttgttaggtatgtggtttgtgtgtagaatgtagaatgtgtgtagtgtaagaatgagtttccattgggggtttaagtttagaatcgttttaattgttaataaacattgcttaatgcattcgaatgctaaattaagtattgcttatgttgaatataatgcacacaaagtaagattttcatctgctgctatcagtatcgttaacgttatatcaatgtagtagcttactagatacccaaaaaaaaaatacatatcaatagagtagtcgagaaaaggtgttctttgagattatccttaagcttattggctttttgtttagcaaatacgtgtgagtgagcatgggattttcttacagtctatgctgaatttttttgtcgggaccctcaaactttccgcctttgtatgtacaatacgagtatatgtatgtagttcacaataatttcgagtttgagtgtaagaagcgcgaaaattgattgttgctgcagtttgttttagtttggttttccatcgacctgctgatttgtatctgttgcatatatgtataggtatactcaaagtttcgtatatttagatatcgatatcttctcagcttcgcttgatttactcagtttttatttcacttttttttttttgaggacaggaaggcatgcaattttgtgcagtgtaggtgtgagtgtcttcttaaattcaaatcgtttccaacaataaatctatgcaaaaacaatttgcaaattgcacaagtaaaatacaaatggggacttctatataataatagatgtatatataattatcaatatctgtgtgtgtgtatatatatttatatatat

SEQ ID NO: 12566 - DNA, 450 bp, DROSOPHILA
atgatggcacgtcccgaggagcagaagtctcatgttggagcaaagtcacgatctcatcagtatcgagaggtttttaagccaatgatggagaggaagaggcggtcacgcatcaatcgctgcctggactttattaaggacctgcttcaggaggtgtcgcatctggacggcgagaccatggccaaaatggatatgggagatgtcctggaattggcagttcaccacctgagcaagaaaaactgtccggtggccacgcccaccacagcgcctacatccggagtatatcagagcccaattgattgctattggagtggctttcgagaatgcgtcctggaagtgtcccaatttctgcaacacaacggctatcagccgagtttcgaatttgcgaaagaattggatcatcttgtggcctccacatccaaatccaagccaaatctctggaggccctggtag

SEQ ID NO: 12567 - protein, 149 aa, DROSOPHILA
MMARPEEQKSHVGAKSRSHQYREVFKPMMERKRRSRINRCLDFIKDLLQEVSHLDGETMAKMDMGDVLELAVHHLSKKNCPVATPTTAPTSGVYQSPIDCYWSGFRECVLEVSQFLQHNGYQPSFEFAKELDHLVASTSKSKPNLWRPW

SEQ ID NO: 12568 - DNA, 5607 bp, DROSOPHILA
ggcgtgaaagttttgttcggtttgcgggcgtttgagtgggcgtggcaacataggtcatcaaacttgcgctgcgtctatgtttcgagaatttgtatggtgaatcttaaccctctagcttttatagttactgggatctcgaggttcatacggacagacggacatggccagatcgactcggctaatgatcctgaccaaggatttacttaatatggtcggaaacgcttcattctgcctgctaaatacttttcaacgaacttagtaaaaaaaaaaaaaaaggatgttaagtggaggtttcgtacgtggctaatcccggctaatattgtatcatgaggcgcaactgcatcagaactcaacacagcttcgtggttcttgggaccagaagcaggcctagccaatgtcgtcggcattgatacggacgccgtcgaatcagaacagaaaactatgccgaaaactatgttcttcttcgcatacgtcttacttttcgcccgatttacacactggcccaataatcttggcacacttttgtgacctgaagagcttggacgagtatcattttgcattatttggaatgtgcagcaccaacaaataaatacaaaccaattacaagtaactttaaaatcatatattcatttcttgttaggtcgtcaggatatttgcttatccgtgagattggagaacgctagatattactaaacagtaaatcacatttctcatagatatacgctcgttatttgcatttacggaattgcattgctggaccatcctagaattctgaattagaaacgccagagatctaggtcttcgaatcgtacacaatcgtatacaaaacaataattggatttttaacctgttgaacgactgatccacaacaacccattcaaaggtgcgatattgacttttgtggaccaatcagaacatcgtaagacagggtcgtcctagaaagtggcatttaaatgtgtttatttgattgataaccaaataaatttacatcaaagcggtttcaaatgcgtaggccaaagcatttgccgcagcgctgaagacagtgcttatgcgttcgccgcccacagacatctactgtgacaacggaaataaatttctttggagaatcacctggggaacaattctactctagagactatcgcgacgtattagttttatcttcatagaaatccttactttggaggcctctgggaagcggcggaagtgactttacgaaacctgacagcgtcaggcgcgaaaacaaaactgaggaagtctttaggatacaatttaatatcctcaccaataaactacatacagtagactgaaaatacaaaaacctacccctttaagtggttacaacattagttaaaccacgaatgaggatctctaatggctagctagtgaaaactttgtaatcatatgatacattatatgatatatcaaattaaagcagataacaaatttaaaggagacctactttatctgcctttctttatagacaaagttaacgaactggacattaccctacaactgtgaatgcaacgcaaaaaacgggaaaaaaattagaaatttaaaaattgttcaaaactgtgggcaagaccggtttggtcgttttgtaggtgaaaacagggtcgtttggtatacagataaaaattggcaagacaaacaataaaacgaaaataaacaaaaaatttaccagtcaaaatatttgtcaaatatgatattttaacaactcttaacttaaaacaaaagagaatgcttaggtcgactttccagaatatcagataaggagggcgtgggcacattttttccggtataccaaggaaaatacaacgaggaaaaatcacattaaaaaaagttttaaatatgtgggtgttgcagttttagggcggtagaatagaatacatacttttcaacgaatctagtacaataatatgaaacagaaagctaggtaagaaatccattttgaaatacaggacctttagaacaaaaagacaaaaagcacttgcacttataggggatcattaatctgtaaagcgcgaatgaatatttaaaaaaaaagatataaattctatctcgtcaatacaggaaaactgataattctgcttttataattaaaagcaatagtgaagttgacgaaaataccactgacgagaaaataacaaataagttctattcccataacttcagaaaacggttatttacttctgaacacagtgaaatacctcttagctgtcaacatcatatgatgaaaatatatcaaaagaatatcacatatcaaaaatattatgatgatgatgatgacaaaaaataattaaaagattaaaataataaaaaattctattataaaataatattcttaaaacacaaagaaggagatgccttatgcattaatagatattaacggaagtgataagtagataataagataataaattgtgtaggtcccattcagcatattttaacaattaataattttaattattttcaatttcaaagttaacctttcagtggcgattatgaacaatcacaaactcttcagagcgtcatttgtagttttcatatgttgaattgccatctcttttctggtggtaaagtagcgttaatgtaccagaatttacttgcattttactcactacaatttataaaaacgaatacatcttcattttgtgctaaaccaatttatccactgtgacaacccctcattaccaaaaagatacattctcgtttggtgccatgttgatcgctagttctacaagtttagactttctagtgttgtagtttgccattttaggtacaaacctttaggtactcgttaatcgttgggtaaaagagtatactatattcgttgaaaagaatgcagcaggtaaaaagatgcgtttttgaccgtaaaatatcccaaaacgtgttggacacgcgcacttaagcgccttttgaaataattaacattttttcattttcggaatttcttgctcacacacccactgtgtgacgggaactgtaactgatagatcggaataaaagctgatagattaattaaattgattacctaaaaatattaccttacaaataattgctacttacattgttttaaaaacagacgtaaagtgaaccatatgcacttctgaaaaagttgatggggcatctggtgggcagacagcacagttctgggtttgagctttaataagcgtggggttatctcttttaagtacgtcatatggatatataattctccgagatgttcaacatctgagttcgcccatcgtcgacgccaaatataaggcagggcaataatgccataaaaaatagggccggagaaaattatcgtaaggattagatggggccagatgtcttgcttaaacgggcgcataatcgccagggcctcattaaggcgtctgggagcgtgtgtagcaaacgctcctgaatcagccagtgtgaaaaaagagaactcgatggccttccgccgttcccagcttagaccgacatctcccaaaaaaaagtcagcttgctgctgagccataatatctaaatttaactgtttaagaaaaggttaaagaccacttactccactttgcagcaatccaatgccccctgtgaaactgtcgttcgaatccttgccatcttctgacctcattgagccctgggttcgaccgggtgcttcgatatacttaaaccgaaagttcatatgcttagatagcagcatgagtaggcggtgatcgcggccaccagtgacccgaacctttctcttctctatgctgtctaggctgttaaactcctcgtcctcttcgaagctgttattgcaatacgttacccaaaaccacggcggagactgcaatcaaatatagcatagattaggacctgcattggtgtttcaagccacaaagcgttacatgaaatacgggcacccgaaaggtacgacctttaaagttggcgtacacggataatgcagtcgggaggaggggaattcgttgcagaccaaggttatcgccgtcgtaccaattaaccaactgtagctgactgtcgctacagggtctagcctggttgtagtaaatgcggaaggccttcttgcgaggacgagttacgactaccactcgaagcggctctctaaaacgaattacacgggagctgggtggccagcgtgctccccaatagaaaataaataggcttaagcgatgtccgagatgtcgatcgtggaggctattcaacagctggttgggctcgtccaaaatcaggctgatgcactcgtttgcaccttgaaggttttcctcaatgtgttgaaaaaagagctccgtctggctgaataccaccgacttgtagttactgcgatgaagacgctgcagaaaatcgtcaagataaacgttgcgctctttctggcaaactccatcagatagagcgaggcttggtagcgccaatatggcaagagaagattgttgcaagcctcttacaatttgggtgagcgctaggagccaaaggctatgaaaactttttgcttagaaaaaatgagtataccttgtgtacaaacctattgcagtgtctgactcatcgttaccaataaaagtcagccttgtgctgtttagcaatcccaaaaggtagggcagcaggcccaatgccagaaacttatgcatcttgaatcatcggaccagggctatgctccttttttatatactccttttgacaattatttggtgtccaattatggcatcaacttctatatatcaaatgtcaaacgtctcaaaggagcatttcgatgtacggtactgacaactcggacagcttgaaaagctattaagagtgcacatggctaaaaatcgattttattttagactgtaagaaagcgggttaaaataaaactattgttaatagcactaagtttcgtacttttttttactagttttgcttacaaaaattaagtaagaataacaaaatacaatcgtctaaaattaaagatttataatttttcaatactgaaatttataattataacctttggacatacatagtgacgtgcccaaacctgccaattcaatcatttggcaggaccataaacaatagagtatttaattgctttcagtactgtccaattctgcgatgtatgtgttcttataaacaattgcaacggcacttatcgactattgtaaacatcttaaagccttacacatgtaagcagttttgcgtgctgtctctgaagcagcgccaactgtagcatccaagtgcaatgctctcccaaaatacactaacatatttgtatgacaattttacataccttaaactacaatagtatacccttaccagtcaaaaaaaaaaaaatattgtacacggcttctttctcacggaacaccgaccatttttttaacaacaaagaattttatgagaagtattatatgtaatgcatttagttgtattaaattaagaaacaggaaatttgtcgattgctcatatttttaaaatcatgcatatttgggtacaagccgaaactatgttttgtctacacacacaaagtttctacagaaatactataatcttttacttttgtaaaggaaatataaattgaatttgtttataactgtgaaaacttttatctttcggagaaggagatgttgtttccagaaaggcgcctaatcgaat

SEQ ID NO: 12569 - DNA, 1458 bp, DROSOPHILA
atgcataagtttctggcattgggcctgctgccctaccttttgggattgctaaacagcacaaggctgacttttattggtaacgatgagtcagacactgcaatagcgctcacccaaattgtaagaggcttgcaacaatcttctcttgccatattggcgctaccaagcctcgctctatctgatggagtttgccagaaagagcgcaacgtttatcttgacgattttctgcagcgtcttcatcgcagtaactacaagtcggtggtattcagccagacggagctcttttttcaacacattgaggaaaaccttcaaggtgcaaacgagtgcatcagcctgattttggacgagcccaaccagctgttgaatagcctccacgatcgacatctcggacatcgcttaagcctatttattttctattggggagcacgctggccacccagctcccgtgtaattcgttttagagagccgcttcgagtggtagtcgtaactcgtcctcgcaagaaggccttccgcatttactacaaccaggctagaccctgtagcgacagtcagctacagttggttaattggtacgacggcgataaccttggtctgcaacgaattcccctcctcccgactgcattatccgtgtacgccaactttaaaggtcgtacctttcggtctccgccgtggttttgggtaacgtattgcaataacagcttcgaagaggacgaggagtttaacagcctagacagcatagagaagagaaaggttcgggtcactggtggccgcgatcaccgcctactcatgctgctatctaagcatatgaactttcggtttaagtatatcgaagcacccggtcgaacccagggctcaatgaggtcagaagatggcaaggattcgaacgacagtttcacagggggcattggattgctgcaaagtggacagcaagctgacttttttttgggagatgtcggtctaagctgggaacggcggaaggccatcgagttctcttttttcacactggctgattcaggagcgtttgctacacacgctcccagacgccttaatgaggccctggcgattatgcgcccgtttaagcaagacatctggccccatctaatccttacgataattttctccggccctattttttatggcattattgccctgccttatatttggcgtcgacgatgggcgaactcagatgttgaacatctcggagaattatatatccatatgacgtacttaaaagagataaccccacgcttattaaagctcaaacccagaactgtgctgtctgcccaccagatgccccatcaactttttcagaagtgcatatggttcactttacgtctgtttttaaaacaatgtgattctccaaagaaatttatttccgttgtcacagtagatgtctgtgggcggcgaacgcataagcactgtcttcagcgctgcggcaaatgctttggcctacgcatttga

SEQ ID NO: 12570 - protein, 485 aa, DROSOPHILA
MHKFLALGLLPYLLGLLNSTRLTFIGNDESDTAIALTQIVRGLQQSSLAILALPSLALSDGVCQKERNVYLDDFLQRLHRSNYKSVVFSQTELFFQHIEENLQGANECISLILDEPNQLLNSLHDRHLGHRLSLFIFYWGARWPPSSRVIRFREPLRVVVVTRPRKKAFRIYYNQARPCSDSQLQLVNWYDGDNLGLQRIPLLPTALSVYANFKGRTFRSPPWFWVTYCNNSFEEDEEFNSLDSIEKRKVRVTGGRDHRLLMLLSKHMNFRFKYIEAPGRTQGSMRSEDGKDSNDSFTGGIGLLQSGQQADFFLGDVGLSWERRKAIEFSFFTLADSGAFATHAPRRLNEALAIMRPFKQDIWPHLILTIIFSGPIFYGIIALPYIWRRRWANSDVEHLGELYIHMTYLKEITPRLLKLKPRTVLSAHQMPHQLFQKCIWFTLRLFLKQCDSPKKFISVVTVDVCGRRTHKHCLQRCGKCFGLRI

SEQ ID NO: 12571 - DNA, 14458 bp, DROSOPHILA
gtatttttagaaaacattgctgtaatcctaattggctgttagcgaataatttagaaggcatatcatagaaaattttgacacttttatgatttttctgcttgtgtaaaaatgttgtaatacccctgagatctgtatagcatatatatttgggctctatatttggctggggtttcatgctctagcctcttttctttttgataataatatatgctaaatcaatttgaaatcaatcgattcaaatatttacatatatagtctctaacgcttaaatgtattcaatattctagatgttctaatgttctagaaaccgtttccaaaagtcaaatcattctatttaagtttgctcccagaattatatctcaatctttatagtctagggactacgtgctggaatactggtttggcactaccttttaaataatatccgaggcccctgaaccaagaaaatgtgccaataaatataaattatgaactttatgatctgcagaggatgccaaatatttcaacatgacttatatgtatgtacgttcgagaattgggaaaatttatgtgtagatacattctggccagacgctagatacacaaaatgaaacgcacaaatgacacaggctaattacaggtaagcaatagaaaagaaaagacaagaaaagcaggcgtacttcgtgtttttgagtttattttcgtagggggcaagctctcaggcaaactagcgtgaaaatgcgttcacacaagcttcggcccaagtgaaatgaaaaatcaaagaattttccacacaactgagcaattaacacaacaacacggccgcgtgaaaagtcactcgaaagtcccactcacattcacataggtggtggtggtggcttatagatatatctcagggtatatcccactcggatccgatcggcggggagccgatggcgcccgacggcgaccgaaggctcccgaagggaaccgaataaatcgttgaaatagacgaattcagctggcaggccaaaccaattcaacgaaatactctttattcgaacgacaacgggatctcttgttcagtagatcaccagccttactccgacgtttattacgaattttctcggtgactcggtgacaactacaaaactgcgtgcggtgctgtatagattttcgcttgagaggaacacacaaatcataatactagatacgcgaaccgatcgcacattaatttatagaaccaaaatcgaaaatctgacctagcaaacatgtcgtcatcgcaggctgtccgctcctcgaaatactcctaccgtgccacgtccaccggacccggtaccgccgatgtgaacatcgagtacatccaggacctgagctcgctctcccgcttggaggtaaggatcccgtcccgctccgtctcggaatctcgaattcgaattcgtaattggaagcggaccggtatcgtttaagaaatcggcatcgtattgggcaccaaatccccaaaaagacgttggaattccgaccagggaataggaatacgaaatgcgtgtgcgccaaattttcttcaaaatctacgagaatttctctctcttgtttcggtgtctgtgtagagactgaaaaagaatcggaatataatcaagaaaaaatacgaaaaacaaactaagaaacccgaaaaattcatctacactctatatcaaatgcacatatataccgtagatatatattcgtgtgttaagttctcggcgcgttcttgtgtgtggaaatatagaaaattcggtgaagcaaaattctagatttgtatatgtatctaaacgtgtctgtatatacatatgcattgctaaaaaattatgtaatggccacctctgggcaatacatatacacgagaaaacatcgaagaaaaatttgtgaagaaatcaatcaactgtgctgtaaagtgctttttaatgaatgttttaatcaaataatatgaaataacgagcccataaaagatcaaactcaataaatgtatccaccattttcttgcaggacaagatccgtttgctccaagatgatcttgaagttgaacgtgagttgcgccaaagggtgagtcattcaatatggaaatattcataattttaaatatttttaagttatttttgaaccgagtatttttaaggtattactataggtttctttggaatatttttgaacattcttaatttattgagagcatcgtttttagtcaataagattatttgctgatgaaatcggcgtcagagatatgacatatccgaggaagttagaaaagatcagaccgcattctccgagacccaatggaaatcaaagcgccagggaaaaccatttttacttttttcacctcgcaaatgtcaccctaaaaacagcaaaaatatgtggaaagccaaaataaaatcaaaatagaccaaagtagcagtagcgatagaaccgatagaaaagtcagcaaacaaatgcaaatctaagaataaactacccttcgtagagtttcgaaagtgtgaaagtaaatgataatgatgtgcattgaacttcaatcgctttcgtttttggcttttccttccctgcggagcattgataaatgatttttcccctgactttgcaaagacagcggccgcaaagacagcaaagtcaggaacagccagagaaaagtgggaaaattcgcaggccgaaagtgcacttcattcagcgcaatcctcttgggcgttacaaatttagaaaatgcgaagagctcttgccggaatggaatgggctggccaggaatgttctgaaaattttgttaaaaaatcaaatttaattactttgtgccttatggattagcacgcactcgcacacagatacaacgccccccaacacacactcacaatatatggaacaaaatggctaaaattagcgcacgacattcaatacagagaagcgaatgattaacttgaaaacaaccaaaatatgagcagagaagaaaagaaaataaagtagccaaaaagtcatcatcatcaccatcttcatgatcagcggcggcagagaggaaaattcgctcgctcactacgggaaaatcttcgctttttgtctgtgggcgtgtgtctgtgggaaaattaaataattttcatgcacattaaaagtcttcacaccgcctggcattctttctacatatccacatatgcatatataggcggcaaaaacatgtatctacaagatacatatggcgcaaatggatttacggcccgtacttacgtggcctttgtggcaatcggcaactttttgttatgccaaatgaacggacaaacacatgttcgcctaggtattatcataaacataaatgtacaaacatattcagcgagagatttaaaagagatttatcagaccaatacgttctttatttaagcttggggcatttcagttagctgaattttttatgattgcttcggacagctccaaataccagaaatcccaatggccgcacatagctttcataaaatagcatttaattgcaattcgcaaaattgaccaaacgaggtcgtcgacaaaggcgaaaagcaaatgtttagattccgagggagccaacaaaaaatgtttctgttcaagcgaaaaatgttcgaatgcctttttggaaatgcaatctaggaaagcggtgtgcggccgcccacaaaagatatatacgcatatatagacgcatatatcgtggatgcaatcggactatggctacacctctgcgtggaagatttcttggcaagatgccattgttattttaggtgttgcatgtgcataattatttttgactgattaatgtgatttataatttttattatgggctgtttgagtagccacagagcatggctagcgcagggtatttatagatccttcacattataccaagtcgctaatgaaatctcttcttaatctctgcttatattcttcaaatttcagatcgagcgcgagaaagccgatctcagcgttcaggtcattcagatgtccgagcgtctcgaggaggccgagggtggtgctgaacatcaagtgagtaccatgtggtaaaccaatattgcaatccagccataactgatgtatcttccaatcccagtttgaagccaaccgcaagcgcgacgctgagctgctgaagctgcgcaagctgcttgaggatgttcatcttgagtcggaggagaccactttgcttttgaagaaaaagcacaacgaaattatcacggatttccaggaacaggttgaaatcctaacgaaaaacaaggccaggtaggcattgcaacaggctctggccatcgccacccgacgtccccatttccattccattgacccagaaaccataccatatccaaaacataaacatctccatcccgagctgtcatgcatccgcagaacatatttatttgcccccaatgatgatgatcaagtggcgtcagctggctcttgcggacatttcaatgtctcgagatctcgtgcagtaactaaccaatacaatgcctaaccttgcgctgccccgttgacccaaaaaaaaaaaaaaaaacagagaaaatcgaagcagatcataaaccattcatcaaaatgccatgacatgcgaaatgcaaagcgaaaaaaatcagaaaacataaacctgcatggcttgcaagttctattggcacaaatcgcggccgaaaggccaaacgaatgagaaaaaaattcgagaaactttcggttgctggccgcctctcatatttccaaatcgatgcgagcgatttccaaaaataaattcctaggaattttgaaatcgcaacaattcaaggctatcaaaagataacgagtcatttagattaatatgcattcggataaatcaaaatcaactcatatcctaagattaaatcaagttcaaagttgagtttctttaccgttctttaagatttccacctttaagataggtgcgcccgagtttgcgcacttccgttcgtagacaaggacagaaggtcggaagatcaagcagccgtcccactctatcgaaaaagctttggaaagctttcgcacagcgaaactttcttccatatgttgtgcccaccaccccataccatattttctttctgagcggaaatttatttatagaaattttgaaattttcatccacattcttgaacagagaggctctttgttgctgttgccattccgctcccaccgcctccctgcatcactccctctcgctcgcaccaacgctccaacccaaatatgtctttgattgaatcatatagaaaatgtgtttattgtttttgttgctgtcccgctccgacccatcgcgtattatggaaatccgatacgttttttcgctggcttttcagcttgtgggtgggaaaggtcggttgcaccgattctagccccctgacaggtggaaaagctggcaaatgccacgaattgcacacggaaaattcgatcgacaatcaaggcgatacataatgggatattactttgatcgattcagagcacactggacttaatatatgaccactatgattagaaaagattacaatgcgccttaggtacaaaattcacatatctataagtaacattctcaaatttaccaaacgtatcaaattgatttacactgatcggagtaattcatattacatatcctatctattcgtcccagcttatgcatatttattttacaatcaattatcatagcttgcttccaggcagacccaacatgatcttaacccttggcctgctgagccttcgaccaccgttcgataatcctacgataaactttcgaacggtggccgaaagctcgcagttccactcaagcttgctagcgactcacagcctggccgatctcacaaaccatgactaagtatcgggattgtgatcatagaccccaaaaactaaagtggagaaccctcttctccctatttttaaccgaatgcttgcagagccgaaaaggacaaggccaaattccagaccgaagtctacgagctgctctcccagatcgagtcctacaacaaggagaagatcgtgtcggagaagcacatctccaaactggaggtctcgatctccgagctcaacgtgaagatcgaggagcttaaccgcaccgttatcgacattagctcccaccgatcccgcctctcgcaggagaacattgagctgaccaaggacgtccaagatctgaaggttcagctggacacggtctcgttctccaagagccaggtcatttcccagctggaggacgcccgccgtcgcttggaggacgaggaccgtcgtcgctcgctgctcgaatcctctctgcatcaggttgagatcgaattggactcggttcgtaatcaactcgaggaggagtccgaggcccgcatcgacttggaacgtcagttggtcaaggccaatgccgatgccacctcctggcagaacaagtggaactccgaggtggctgcccgcgccgaggaggtcgaggagatccgtcgcaagtaccaggtccgcatcaccgagctggaggagcacatcgagtccctcatcgtcaaggtcaacaatctggagaagatgaagacgcgcctggccagcgaagtggaggtgctcatcatcgatctggagaagtcgaacaacagctgccgcgagctgaccaagtcggtcaacaccctcgagaagcacaacgttgagctgaagagccgtctggacgagaccatcatcctgtacgagaccagccagcgcgacctgaagaacaagcacgccgacctcgtccgcactgtccacgaactggacaaggtcaaggacaacaacaaccagctgacccgcgagaacaagaaactgggaggtgcgttaccatactaaaagactttcacaattgtatattgtagttatcatgatataatatttaataataacctattattaaccagatgatcttcatgaggccaagggtgccatcaacgaactgaaccgtcgtctgcacgaattggaactggagctgcgtcgtctggagaacgagcgtgatgagctgaccgctgcctacaaggaagccgaggctgtaagtaatcacaaaaaaaaaaaaaaacatacacataacatttttagttataatcctaataatttgtgtaatattattttatagggccgcaaggctgaggagcagcgcggacagcgcctggccgccgacttcaaccagtaccgccacgacgccgagcgtcgtctggccgagaaggatgaggagatcgaggccattcggtaagttactgaccagggattggtaactagagttaaccccctttttggaagtagccccacgccactgcaccacgagtgacagcgagaacagacgaaggttttcgtttcccctgccaaagcggaagtcccaaaaaaaataaacacccctcaaggccccaagggggaaattattcgattgattcgcaatcgctttcgcaattgccaacacaattgatagtgaactgacccatttagcaattagcaatcagtttgagttctttagtcgcacaaaaagcaacggcattagttttctattcaggaagccaggcaaaagatcctgatcccactgaaggttcaaaggctgagctcaagaagtgggttatatccatctggttttcaaaaccataccgattttttaaaaatccgtatctaattctctgcagaaaattgcgcagttgctgtgattacacaatcaaagtgggttcatagttgaaaatcgaaagaacccattgagaaaactttcgatttgaagagtggctctccagcaagtggtaggtttttggatcaatcatcaatcgagttggtggtcagtgttagtctgtgattgaaatgatcttatgtcttaagcagagatcagttctagctttcttaaaaacagataagttaggtgtgcataatgcttgatcttaatagctattgttgattttgtaaaatttttacacacgtttccggtaattaaatgatattgtgaaatcgatagaagtatctatctgaacttgtacaaattaaaatcggttgatttggaatgttcaaataactttacataaatagatacaataactgaatagaaaattgattatatgcacttttagacactttccctagttccttagagtcttccatgactattgcataaaatgtcttgctattatgacattgtctatgagcactttgccaaaatgaatcaatcatagccgcacacattgactgccaacaaatgatgataataatgatgatggtgatgatgatgttattgtcgtcattatgctcatacctagcccgatgccaacagctgaaagaaacgaaatgcaatctttttatagatttcgacaaatttgaaaatttatttgcaaagcagcagcaactgccactgctgccaaccgaggagaacccaagaaacccgaagctacagaggcgacaaggcgacacacagaggcggcgacaattgtagctttaattagagtactcttaagaaaacacattaggccattagaccattagaccatcgcaacccccttgagaaatccgcccccccttcacaaagatccccttcctaaaccatggccctagccctaaaacaaagaccttctcgcttccgtccgacgacgacaacgtatgaggataactatgggtacaccatgaacttctaccagcccatgctggactatctggacgccaaggccaagggtctggaggtcaagaagccgcacctgccgtgggtcagcgagaggggactgaagcagtaccgcccctcgaatgcggtgcgacaatataacgccgacgagatcgtccgattgtcgcgcacctgcgccgctcgggccgacgagatattgcttaactttcgggcccagaaacgctcgccgttcagtgtacaaaagttggtcgacgcatcgcgagtgaccaagcaccttgaaccggacacagttgtcgaaagatcgcgccagcgccgccgtcgccgtcaggaggagctcgaggatttgatcaaacgcgacactcttaagatattgcagcgtatccgtaagattgaattggataacgaactcgacaagatgtccgacgatttcaagcgctcgattcgcggcaaatccgccagtgccatcgcccaggcgctgctctccgaatcggagaagaacatcaagacggccaagaaggaggaggaggactatatcgcccaaactttagtgcgctcgagtcgtgcagtttcgcgtgcccgttcgcgttcctcctcccccctcgatggccagtatcgcgcccatgcgctccacatcgagctcatggacgaccggctggtggacaagctggaccatcgcgtctcctcgtcccttcacaatgtgaagcgccaattgtcgacactgaatcagcgcactgtggagttctacgcggacagcaggtgcggtattgaggataagtgctggatctgtcgcaaggtcttgcgcacccatcccaagctcaaggactatagctacgtgtattggaagcactaggtccaggtcgatgtccctaatcccaattccttgcccaattccagaccctcttttcgctcatagcttcattcgatatcttagatttcaagcacaaggtaacttaatcttttttgaccatccgaaatgtatctcaaatgtataccaaaggatatatttgtgttactgcacacatcgaagaggagagaaaaccttttaaaaatcaaatatatgatttttagaggcctctattttgcttactgttcactacacgaaacggttctttacgaatactaaaagacatggagtggttaaatatatttatctcgagatattaaaagatccatcttcagaaagccaaaaaaatgtgttaatatcaagtggatcgaactgcgtttctctgtgtactttcccatccgggcaatttgaataaatgcgaacatttttgaattgcagctcaattttttgtctgagcatcctagcatccacctcccccgacccggcaatttggcatctctatttgtctgtttgtcgtttctcgtctggcacaaaatgtatttttgtttcaagagtttttgcaaatcgcgttcttgttttgttcctctagcattgtgtctgttgtgcagtcttctgaaaattatttatacagaattatgcgcagcatatttgaccacggctaattgcagaaaatcgccagcaatttggtcattaattagaaactttgtgggtgtttcttatgcttcttgtgttgggcatctaaacaagcctttgagtgggaaatatctttgttttaattgtgtatataatcaacactcttatctgccgaatatgtcaagttagtataatccctaaatgccaagttaatcagaatgcacatatattcatcactttcccctgaaataacgacttcttagcccagtcctatcatatttcgcacccgcaccttagaaatttcgaggctgtcagtccgatttgcgcgtagatggtccgaccaactatttctttgggtttgtccttcaaatcgagatttattttattttcaactgaaaagaaaactgaggcgcatgacagcaaaaacaatcacaagaagaggtggcgacaaaaaaaaaaaaaacagaacaacattagacacagcaaatatttttgcgtaaacattgaaacaatggcggtgaaaaattaaaatctaaatgagaatgcttaagctttctacctaaaaccaaataccttggcaaaacgacagcaatgggcacacacacatgattttcagattaagtaaccaacacaggggcttttataagaaaactcaactaaacaagaataatcataggaattaggaaatactgactgatgagggattataatattgttatataaccagggaaaaggaaatgattctgcaaattaagcatcattaagatactccttccaaactcaaaaattgttagatactggaaatccattagcttcctatgttttcgatggtaatatattctatcaccaccttgtaaaacgacctatcgccactgaaatagaattcagtagtcatgttcacttatcactaattgcaacaggtacacgactttgaattaaattagaaagtgaatcaggtagagtatcagaagtgcaagcataactcaaatttagttggcatcgctgcaccttcgcccaagaatagacgcatgatgcacttaccccaaaaacaaaaacaaaaatgcattttagggggagaaggaactagtcggcaaatagcttggcatgtatgtcccaactatttgtgacaagttcgatgtctttatcatgcgtaaaaatacaccgaaattcgcgaatgcagcagccagcgaaacaatgaaacatttctgacaatgccagtgcacctgagttgagtggttgagtgcttggtggttgagtgcccaactgctgagtggtgcgaaaaatgtaaaattgtgggtcaggcattggggccaaaaatagagccagcaatgcgaatcgacggagggtcattgtgtggtaaactggggctacttctcggtatcaattcaattgataaatggtggaaaaatatgtcaaagttctaatgaatgcattcaatccgtagcaagcagacctcgatcgagatcgagcagctcaatgcccgcgtcatcgaggcggagacccggctgaagaccgaggtgacccgcatcaagaagaagctgcagatccagatcaccgagctggagatgtcgctggatgtggccaacaagaccaacatcgatctgcagaaggtgatcaagaagcagtcgctgcagctgaccgaactgcaggcccactacgaggatgtccagcgccagttgcaggccaccttggaccagtatgccgttgcccagcgccgtctggccggtctcaatggcgagctggaggaggtgcgctcgcacctggacagcgccaaccgtgccaagcgcaccgtggagctgcagtacgaggaggctgcctcccgcatcaacgaactgaccaccgccaatgtcagcctcgtctccatcaagtccaagctggagcaggagctctccgtggtcgcctccgactacgaggaggtgtccaaggagctgcgcatcagcgacgagcgctaccagaaggtccaggtggagctcaagcatgtcgtcgagcaggtgcatgaggagcaggagcgcatcgttaagctggagaccatcaagaagtccttggaagtcgaagtcaaggtgggtgtttgggttttgggacatctatctaactaatatttcatagggataaaacttactacctatctggtactatatgactcaacgaaccttgcaatctctcccgcagaacttgtccatccgcttggaggaggtcgagctgaacgccgtcgccggcagcaagcgcatcatcagcaagctggaagcccgcatccgcgatctggagctggagctggaggaggagaagcgccgccacgccgagaccatcaagattctgcgcaagaaggagcgcaccgtcaaggaggtgctggtgcagtgcgaggaggaccagaagaacctcatcctgctgcaggacgcgctggacaagtccactgccaagatcaacatctaccgccgccagctgtccgagcaggagggtgtctcccagcagaccaccacccgtgtgcgccgcttccagcgcgagctggaggctgccgaggatcgcgccgacaccgccgagtccagcctgaacatcatccgcgccaagcaccgcacattcgtcaccacctcgacggtgcccggatcccaggtgtacatccaggagaccacaaggacgatcaccgaatagagccccacgctccgcaccgagatcatttcattatcaaacgctaaccgaagaaccgaacacaaccaatcccgaacccatgaagaagaccatctggcggagggcagagttcagagtgcaggacgagaacgagaattgcgtgagaaagtttttataatttaaatttttttgtcaaacccccaaaacgccgcggcagcgattagaacccagtggacttcggcgggggctcgtataggctacacactataaatacataacactacacatcctatctatataataataatactattttgaagttcatgtaatttaattaaaataatgaacctgaaaaacctaaaaacaaaataaaaacaaaccaacgaaaacttggcagagttttgctagcgctagagatatgatatataccatataccatataccacatacgatatataatacttgtacgtagagagatgagagagatcaaccgagttggctgaacaataacgtttaatggaaatggagcccatttgaacgaaaagcactaaaacttaataacttgaaatggaaatgataatcgtcaccgaaatatcccactaagcacgccaccgcagcatcgagttaaccgagttacaaccgcttctactatttgtttttagttcactttatgtttagtaggtaaatttctgtgtgctcgtaacgaatttgaattttacattaaatcagcatcaacaaaactgagcaattttcacattttttactttgtatcttgcaataaaaacgaaattctattcataataataacaataagaaattgtaagtgaaattcggttttactaatgggggggtcttcaagatttcaagaaatggtgtagctgcgaaccttagtggacttcaagtaatgaagtttggcatagccaactcaaagtttttgaagttttttttttagccatctaaagtttcatggcattcaaaaataggcagaagttgtcggagtaaacaaacattctcatttgcaaataaagattcgctcaagtttggtttcccagcccaataaatgaatttccattgatttatattgctttaagctatcactatttattaacacttttggagctatacaatccaagctcttagatggccacaacacccagtttggcgtcggtcttcaggtacgcattctcgccgtaagatccgccgtattggctcttcttgaagactgaaaggtagagaagatacaaaagaaggtaagtctgggtggcaaagcggtgctatgaagtcaatccaaaatcataggataaacaatattatccagttaagaactccatgttgtagcttagtttaggaacccacctggatcgacctcagccacgaaggagcgtggtggcagagcagcagcgtatagcgggtccagagggccgtagggcttggccaaaagtgggcgaccctgctcccatccataacggttgagggaattccagtcagcaccgtccagcttggcggcggaggcagctgctccggcagcgttggtcagggcagaagcctgagcctcggcggtctcagcggccttaaccacatcgccgtagctggctccgtatccggatccgccgtagttggggcgattggccacagccagggcgacgcagcaggccatcaggcagagaagacgtagggtggcggacatttttttttggtggtggtgcgaggaacggactgtttcgaaaactaattaaccagagcgtgtgtccaaattgcttttatagcaacaccatttgagctgctccgcgatttgtgagctcaccagacgtgaccaaacc

SEQ ID NO: 12572 - DNA, 3665 bp, DROSOPHILA
acgaaatactctttattcgaacgacaacgggatctcttgttcagtagatcaccagccttactccgacgtttattacgaattttctcggtgactcggtgacaactacaaaactgcgtgcggtgctgtatagattttcgcttgagaggaacacacaaatcataatactagatacgcgaaccgatcgcacattaatttatagaaccaaaatcgaaaatctgacctagcaaacatgtcgtcatcgcaggctgtccgctcctcgaaatactcctaccgtgccacgtccaccggacccggtaccgccgatgtgaacatcgagtacatccaggacctgagctcgctctcccgcttggaggacaagatccgtttgctccaagatgatcttgaagttgaacgtgagttgcgccaaaggatcgagcgcgagaaagccgatctcagcgttcaggtcattcagatgtccgagcgtctcgaggaggccgagggtggtgctgaacatcaatttgaagccaaccgcaagcgcgacgctgagctgctgaagctgcgcaagctgcttgaggatgttcatcttgagtcggaggagaccactttgcttttgaagaaaaagcacaacgaaattatcacggatttccaggaacaggttgaaatcctaacgaaaaacaaggccagagccgaaaaggacaaggccaaattccagaccgaagtctacgagctgctctcccagatcgagtcctacaacaaggagaagatcgtgtcggagaagcacatctccaaactggaggtctcgatctccgagctcaacgtgaagatcgaggagcttaaccgcaccgttatcgacattagctcccaccgatcccgcctctcgcaggagaacattgagctgaccaaggacgtccaagatctgaaggttcagctggacacggtctcgttctccaagagccaggtcatttcccagctggaggacgcccgccgtcgcttggaggacgaggaccgtcgtcgctcgctgctcgaatcctctctgcatcaggttgagatcgaattggactcggttcgtaatcaactcgaggaggagtccgaggcccgcatcgacttggaacgtcagttggtcaaggccaatgccgatgccacctcctggcagaacaagtggaactccgaggtggctgcccgcgccgaggaggtcgaggagatccgtcgcaagtaccaggtccgcatcaccgagctggaggagcacatcgagtccctcatcgtcaaggtcaacaatctggagaagatgaagacgcgcctggccagcgaagtggaggtgctcatcatcgatctggagaagtcgaacaacagctgccgcgagctgaccaagtcggtcaacaccctcgagaagcacaacgttgagctgaagagccgtctggacgagaccatcatcctgtacgagaccagccagcgcgacctgaagaacaagcacgccgacctcgtccgcactgtccacgaactggacaaggtcaaggacaacaacaaccagctgacccgcgagaacaagaaactgggagatgatcttcatgaggccaagggtgccatcaacgaactgaaccgtcgtctgcacgaattggaactggagctgcgtcgtctggagaacgagcgtgatgagctgaccgctgcctacaaggaagccgaggctggccgcaaggctgaggagcagcgcggacagcgcctggccgccgacttcaaccagtaccgccacgacgccgagcgtcgtctggccgagaaggatgaggagatcgaggccattcgcaagcagacctcgatcgagatcgagcagctcaatgcccgcgtcatcgaggcggagacccggctgaagaccgaggtgacccgcatcaagaagaagctgcagatccagatcaccgagctggagatgtcgctggatgtggccaacaagaccaacatcgatctgcagaaggtgatcaagaagcagtcgctgcagctgaccgaactgcaggcccactacgaggatgtccagcgccagttgcaggccaccttggaccagtatgccgttgcccagcgccgtctggccggtctcaatggcgagctggaggaggtgcgctcgcacctggacagcgccaaccgtgccaagcgcaccgtggagctgcagtacgaggaggctgcctcccgcatcaacgaactgaccaccgccaatgtcagcctcgtctccatcaagtccaagctggagcaggagctctccgtggtcgcctccgactacgaggaggtgtccaaggagctgcgcatcagcgacgagcgctaccagaaggtccaggtggagctcaagcatgtcgtcgagcaggtgcatgaggagcaggagcgcatcgttaagctggagaccatcaagaagtccttggaagtcgaagtcaagaacttgtccatccgcttggaggaggtcgagctgaacgccgtcgccggcagcaagcgcatcatcagcaagctggaagcccgcatccgcgatctggagctggagctggaggaggagaagcgccgccacgccgagaccatcaagattctgcgcaagaaggagcgcaccgtcaaggaggtgctggtgcagtgcgaggaggaccagaagaacctcatcctgctgcaggacgcgctggacaagtccactgccaagatcaacatctaccgccgccagctgtccgagcaggagggtgtctcccagcagaccaccacccgtgtgcgccgcttccagcgcgagctggaggctgccgaggatcgcgccgacaccgccgagtccagcctgaacatcatccgcgccaagcaccgcacattcgtcaccacctcgacggtgcccggatcccaggtgtacatccaggagaccacaaggacgatcaccgaatagagccccacgctccgcaccgagatcatttcattatcaaacgctaaccgaagaaccgaacacaaccaatcccgaacccatgaagaagaccatctggcggagggcagagttcagagtgcaggacgagaacgagaattgcgtgagaaagtttttataatttaaatttttttgtcaaacccccaaaacgccgcggcagcgattagaacccagtggacttcggcgggggctcgtataggctacacactataaatacataacactacacatcctatctatataataataatactattttgaagttcatgtaatttaattaaaataatgaacctgaaaaacctaaaaacaaaataaaaacaaaccaacgaaaacttggcagagttttgctagcgctagagatatgatatataccatataccatataccacatacgatatataatacttgtacgtagagagatgagagagatcaaccgagttggctgaacaataacgtttaatggaaatggagcccatttgaacgaaaagcactaaaacttaataacttgaaatggaaatgataatcgtcaccgaaatatcccactaagcacgccaccgcagcatcgagttaaccgagttacaaccgcttctactatttgtttttagttcactttatgtttagtaggtaaatttctgtgtgctcgtaacgaatttgaattttacattaaatcagcatcaacaaaactgagcaattttcacattttttactttgtatcttgcaataaaaacgaaattctattcataataataacaataagaaattg

SEQ ID NO: 12573 - protein, 879 aa, DROSOPHILA
MSSSQAVRSSKYSYRATSTGPGTADVNIEYIQDLSSLSRLEDKIRLLQDDLEVERELRQRIEREKADLSVQVIQMSERLEEAEGGAEHQFEANRKRDAELLKLRKLLEDVHLESEETTLLLKKKHNEIITDFQEQVEILTKNKARAEKDKAKFQTEVYELLSQIESYNKEKIVSEKHISKLEVSISELNVKIEELNRTVIDISSHRSRLSQENIELTKDVQDLKVQLDTVSFSKSQVISQLEDARRRLEDEDRRRSLLESSLHQVEIELDSVRNQLEEESEARIDLERQLVKANADATSWQNKWNSEVAARAEEVEEIRRKYQVRITELEEHIESLIVKVNNLEKMKTRLASEVEVLIIDLEKSNNSCRELTKSVNTLEKHNVELKSRLDETIILYETSQRDLKNKHADLVRTVHELDKVKDNNNQLTRENKKLGDDLHEAKGAINELNRRLHELELELRRLENERDELTAAYKEAEAGRKAEEQRGQRLAADFNQYRHDAERRLAEKDEEIEAIRKQTSIEIEQLNARVIEAETRLKTEVTRIKKKLQIQITELEMSLDVANKTNIDLQKVIKKQSLQLTELQAHYEDVQRQLQATLDQYAVAQRRLAGLNGELEEVRSHLDSANRAKRTVELQYEEAASRINELTTANVSLVSIKSKLEQELSVVASDYEEVSKELRISDERYQKVQVELKHVVEQVHEEQERIVKLETIKKSLEVEVKNLSIRLEEVELNAVAGSKRIISKLEARIRDLELELEEEKRRHAETIKILRKKERTVKEVLVQCEEDQKNLILLQDALDKSTAKINIYRRQLSEQEGVSQQTTTRVRRFQRELEAAEDRADTAESSLNIIRAKHRTFVTTSTVPGSQVYIQETTRTITE

SEQ ID NO: 12574 - DNA, 3233 bp, DROSOPHILA
acataatttcctgcaccatcgaattggctactctattgtaattggctgagctccacaaaacttctttatgcataacattcgagcgtgaatttggtttagttataacgttactcgatatatcctataactatgaatagtattccatgtaaaattgctccttgtttttggtaatacatatatgtaaattgtgtatatttcgaatttatttttttccaaagattcattttatgaattctcatgctctttggtttaatttaaagaataaacttgaacaatttacaataaaagtcaaataagcttattttgatatttttatgtgggcttaatttactttgtgcccactgtagaacagatgcaaccaggtgaacacagaatatcgcttatcgataactcagccctgttaatatttgtctgcgaaaacagctgtggctattgtctgttaactcgcttagtctatttatttaactaaataccatgtcgaatatttcaagtgtggcaccacctcctcccccaccacccatgatagtcactcctagcacacctgctaccacaaaggaacgtccagttggggacaatataaccaccgatgagtgcacttgggcatgtgagtatcctgaggtgcagaaaggatgctatttaagtcgcgtctgccaatatacaccaccgaaacactgtcaatactactccgtaaacagcatagtgcaggtgagttagaaaacaataaagatttctcagtttgttattcgataacatatgtatgtgcaccgaaggtgggacctacttgtggcttagtggccctcagcatgttgcttggtggcagtcccacggcagatgatctcctcaaggatgcaatcgaccaggagtatacccttaatggtgaactatttagtgctcagtatttgtttgaactgacccggaagcatatgccaggacctgctgcgtgtcagttgcatgtaggtcctttggactgcaaaaaagtcaaggaacttttaaaggccggaggctgcctactagtgccgtatcctttttcaaaaatattgccatttaaacccgggttgagtttggtattcccctgcatttaaagccgttggcgcctaacagcacttgtaaacggtgaacagcacactgttgtctggcagtgttgtaaaactcgcggtagttcagtggtgcaacttataaacagcgttttgtgtttcgcaaaataatatacaattttcagtcagtaagtaaacgagaagtgcaaatacttttattaaatggccgacgaaacagagcaggtatgtgtaagaataaaagcgaaaaggatattctctatattccgtacttgcagctcagtcaggtgattttgccggtaaaggagcctttggatctcatccgattgagtttagatgagaaggtgtacgtaaagatgcgcaacgagcgggaactgcgaggacgtcttcacgtgagttgatgcctctttttactgttgcccagcaatctttcaatatacacctttatctaggcctttgatcagcatttgaacatggtgctcggcgatgcggaggagacggtgaccactgtggagatcgacgaggagacctatgaggaggtgtacaagaccgccaagcgcactattcccatgctattcgttagaggcgatggagtcatcctggtttcgccacccatgcgggtgggctagcgggtcttgtttagctttaaatcaattacctgcatttatacaagctatatctaaataggtttataaatgtcttttaaaaaaaataatgtcttgtttaatttttgcttactatataaatatataaaaatcttttctatgggttgtccttaatcaattgtaatttcaaaagctacgatgccgatgtaaaccatgcgccatgcgttaaaaatggacaccgagcccattgggctttgattgtaggttatctggtggacacgcaggaccgggtgagtggaaaaagctaggcatattaagaccaatattaatgtataagcccttccgcagttttatgtcctggctcgtcatggtaaatctcgtaacctagccgtttggccactggacacgctcagccaaagcaacgaaaatttaaaagagtttgcccaacccaagggctacccagatgatgagtttctgctgccaccgggtggaatcggtggatctctgggcctcaacgagcgctgcattcttgtcaacgggctgccaaagcaggtgattcatgttcgctggtcctaaatatatgtgcatcgaaatattttcaataaaaaaaaccttttttaattacgtagttaactttaatatatttaatagtacagttataaattacacgccttacaatatttcacttcgcaacgcaatcaacgcacctcgaactcctttccatcattcagttcaaacggggagagaaacacgcagagttttcgtatttaatcggttcgcaactactacggggacacgaatgcgattttagggggaatagaatataatatacaataatgatatatcgaactttcatttggtttagagccagctgtgtataaatttatgtatacaagtataaatttacgcttttccaacatccgctaataagactgggctgccttgaaatttcaaaaatcacaacaataagagtagtacacatggttttgtatatatggtagataagataggtaactatatatagtatgttttgtatataatttcacacacagatatttttctgatttaggtagtacatagacgacgggcttgggtataatgtcaaatttttgtcaagtagatttagtatgctgctgtacttttaggttcatttgatagttggccaaacgggagcggcgattttgagatcatggggcctaatgctcccgattgcttggaaactgtcggttaaagaatatatatatattttattatatatgctagtacatgccaacaggcaagagcaacgtgtccatagaaatttttgaaacggcaactacaaagtttggttttagttctagaacttcttgtacaggatattttgatacgcgttgttcatctctgacgagtttataattactttgagcataccattaaactagttagtgtctgtttgtctgtatgtgtctggttgcgggtcgaaagtatctctgataaattcacaagttgcgtgcgaaaatgaactgaacttaaatgaacgttacaggctaacggtttattaactaaaaatttacaaatactagttataaataaatta

SEQ ID NO: 12575 - DNA, 791 bp, DROSOPHILA
aggctgcctactagtgccgtatcctttttcaaaaatattgccatttaaacccgggttgagtttggtattcccctgcatttaaagccgttggcgcctaacagcacttgtaaacggtgaacagcacactgttgtctggcagtgttgtaaaactcgcggtagttcagtggtgcaacttataaacagcgttttgtgtttcgcaaaataatatacaattttcagtcagtaagtaaacgagaagtgcaaatacttttattaaatggccgacgaaacagagcaggcagctcagtcaggtgattttgccggtaaaggagcctttggatctcatccgattgagtttagatgagaaggtgtacgtaaagatgcgcaacgagcgggaactgcgaggacgtcttcacgcctttgatcagcatttgaacatggtgctcggcgatgcggaggagacggtgaccactgtggagatcgacgaggagacctatgaggaggtgtacaagaccgccaagcgcactattcccatgctattcgttagaggcgatggagtcatcctggtttcgccacccatgcggttttatgtcctggctcgtcatggtaaatctcgtaacctagccgtttggccactggacacgctcagccaaagcaacgaaaatttaaaagagtttgcccaacccaagggctacccagatgatgagtttctgctgccaccgggtggaatcggtggatctctgggcctcaacgagcgctgcattcttgtcaacgggctgccaaagcaggtgattcatgttcgctggtcctaa

SEQ ID NO: 12576 - protein, 143 aa, DROSOPHILA
MRNERELRGRLHAFDQHLNMVLGDAEETVTTVEIDEETYEEVYKTAKRTIPMLFVRGDGVILVSPPMRFYVLARHGKSRNLAVWPLDTLSQSNENLKEFAQPKGYPDDEFLLPPGGIGGSLGLNERCILVNGLPKQVIHVRWS

SEQ ID NO: 12577 - DNA, 2975 bp, DROSOPHILA
atttgtttttacggcccttctggcccttgtcagctgcgaggttatcattggccaggacgaactggtggacgaggtgtctggcctgtacaccatcgaaggacgcgtttccccgccggattccattttttcacccactcaaggaggcggacgaagtgctccggtgaacaagaatacaccgaagtggcacacagagattacgctctccatcaacgacggcgaatttaagggattcgtccgcgaggatgggcagttcatgatcagcggagtgccatccggcagctatatcctggatgtccaccacccggatgttttctatgagccggtcagttaagggaatccattcaatatgatgccagaatcactaaaaatttcttcaattgcaggtgcgcgtcgagatcaatcccaagggcaagttccgcgcccgcaaagtgaactttgtgcagcccgcccaaattatgcaggtggcatatcccctgcgcgtgaagccactgatgccctttaaatacttccagaccagagagcagtggaaggtgcatcattatattgccaccaacggaagaatcacaaaactaacttttgctcttgacccacacagatcaccgacttcttgttcagccccatggtcctaatgatggtcttgcctctgctccttatgctggtgctgcccaagatgatcaacgatcccgagacaaagaaggagatcgacaatctgcagttcccaaaggtaagccgtgaggatcatgtatagcacagcactatagtattatatgaatcatgctctgctccacagatgggcaacgatatgcccgagatcagcgaaatgctgacttcactgctaacgggcaagcagcccgagcccaaggagaagaagcctgctccggccgtcaggcaggcgaagaagcgcaaggaccagtagtagttggccaccagatagcttttagtattaagcttaatcggagcgccgagctccaagtcagagtcagatcgtttaaatagtaaattttcattacaagactttgccgctttatttaagaaatcctactatttgcggtcgcttgagtccgacgcgctgctgctccagatttagcattttagtgagcagccggtccagatgctcgccaatggccagacccagctccagacagttgcgcatggtgtcccggtgcatggctccgccgccggtcaagtgtgtacccgaaaggaatgcctgtccattccgcatggaaactgacacaaccatgctcactgtgctgcagacttcctcctccgccgaaggatccaccaggacataatcaccgatcttgcaaactgtgaccaacagcggaaccgtctcgatgccgatgcgggtgcagtcatacggattgtccgatatgatgaggtctgtgatgccggcatccaacatggtggctgtcacccggggcagctttgtgttgaacagagccgctttggcggccagcgacactgcgtcgtgtagattgccgccacactccagaatctgcgagaacagggattagcattttcggtataattaagcacactagagtctaaccaggatgtctatgtacagcttccagcactgctgacccggaatgaggcacaacgtgcggtagttgaaggccaatggcgattcgtaggcgttctgcagggagagaataagttcttgggccagatccgagcccccgcgtccttcaaactccggcgtggcattagcagagctgaaatatatatgttatggcatattcttcgaacttcagttgcatcattaccaatccacaaaaaattccagtttaccaaactcgggcgtcagcgggttgggtacatcaatctcggttttgacgcccaccagtatgtctgtgttcgccagccgaaggcgagcggatccactggcattgctaaccagtccagtttccaggtccatgggccggtaatctcgtcgtgaacgtccatcgcaacgaaagtcatcctggaaacgcatagtttaaggtacagactatatttcttgcataaccgtttaacacacctccacgccgtgtagaatatatgttttttcagcttcgctcagtgcaacgtatgccattttagacttaattcaagaaaacaaatattcaaaacaaattcaacatgtgcaatgaacccacatcgatactatcgatataccgcaaagcagggctgctggcacttcgtttttactttactgaactgttgtcagtgcgaaaggtgtatgttttcatttgaagcatttcatttcacatcgccatctggtaacacttatccaaaacaagccagtcatttcgtgttcgtgcggcgtttcaacaaatatcaattgtaaattgaattgtaacaaatttaaagatcaatatgcagcccgactttgatttcaccgacacaccggtcagcactggtgtaagtatgaagagcatcagccacataacttcgtactaagagcacaatcctacctatttgcagaccaccattatggcagtggagttcgatggcggagtggtcattggagccgattcgcgcaccagctcgggcgcctatgttgccaatcgggtcaccgacaagctgacccgcatcacggacaaagtgtactgctgccgcagtggctcggccgccgacacccaggccattgccgacattgtggcctactcgctgaactatcacgagaatcagaccaacaaggatgctctggtgttcgaggccgcctcagagttccgtaattactgctacagctaccgcgagtccctgcttgccggcatcattgtggctgggtgggatgagcagcgcggcggccaggtgtacagcatcccgttgggcggcatgctgacccgcgagtcctgcaccatcggcggatcgggatctagttttatctacggatttgttagggagcactaccgccccaatatggcgctggaggattgcgttacattcgtcaagaagggtaggtaatcccaaaaaaaccaaaacagtttccc

SEQ ID NO: 12578 - DNA, 870 bp, DROSOPHILA
atgcgtttccaggatgactttcgttgcgatggacgttcacgacgagattaccggcccatggacctggaaactggactggttagcaatgccagtggatccgctcgccttcggctggcgaacacagacatactggtgggcgtcaaaaccgagattgatgtacccaacccgctgacgcccgagtttggtaaactggaattttttgtggattgctctgctaatgccacgccggagtttgaaggacgcgggggctcggatctggcccaagaacttattctctccctgcagaacgcctacgaatcgccattggccttcaactaccgcacgttgtgcctcattccgggtcagcagtgctggaagctgtacatagacatcctgattctggagtgtggcggcaatctacacgacgcagtgtcgctggccgccaaagcggctctgttcaacacaaagctgccccgggtgacagccaccatgttggatgccggcatcacagacctcatcatatcggacaatccgtatgactgcacccgcatcggcatcgagacggttccgctgttggtcacagtttgcaagatcggtgattatgtcctggtggatccttcggcggaggaggaagtctgcagcacagtgagcatggttgtgtcagtttccatgcggaatggacaggcattcctttcgggtacacacttgaccggcggcggagccatgcaccgggacaccatgcgcaactgtctggagctgggtctggccattggcgagcatctggaccggctgctcactaaaatgctaaatctggagcagcagcgcgtcggactcaagcgaccgcaaatagtaggatttcttaaataaagcggcaaagtcttgtaatgaaaa

SEQ ID NO: 12579 - protein, 281 aa, DROSOPHILA
MRFQDDFRCDGRSRRDYRPMDLETGLVSNASGSARLRLANTDILVGVKTEIDVPNPLTPEFGKLEFFVDCSANATPEFEGRGGSDLAQELILSLQNAYESPLAFNYRTLCLIPGQQCWKLYIDILILECGGNLHDAVSLAAKAALFNTKLPRVTATMLDAGITDLIISDNPYDCTRIGIETVPLLVTVCKIGDYVLVDPSAEEEVCSTVSMVVSVSMRNGQAFLSGTHLTGGGAMHRDTMRNCLELGLAIGEHLDRLLTKMLNLEQQRVGLKRPQIVGFLK

SEQ ID NO: 12580 - DNA, 4069 bp, DROSOPHILA
ttggaagaacctctagattctgttggaacacttacttttctagaactgtcgaacaaagtggatatccgcaaagtttgtttatttcccgctcatccactatgtctgaataatttggggggccaatctcacagagctgcgtgtacaggaaatgcttagtctacccgtcaagcttttaatttgcattattttaccagggacaggaactcgggctccggtattccgggctccaaaagccgcaccacgatttcatgggctctcgcaatcgccgctcgtttctttaccaccgccgctatcagttgttgtctggaaaacagtgagtacttcactcagtgatattgaatatgtatttattttaatttacctcaactgctcccctttttctgtagtcattttacgcttccaaaatttgcaattgagatggtcgataacaaccttcgatagacacttagttgggaaatatgcggtcaatcggtagcaaacaatcgatattaatatcaatggaatggtcactctgtttttgcaaaacgtaaataaaaaacaaattgaattgataacaaaaatggtttgcgagaagtgcgaggccaagctctccaaagtttcagcgcccaatccctggcgaacgagcacagctcctgcgggaggacgtaaaatcaacgagaacaaggctttatcctcggcccgcgagcgatacaatcccatagggactgctttaccaccttgccggtagggaaatctcctcaagaattcatctgcatatcttaatctgatttttaattatccagaatctgccgacagaaagtgcaccagatgggttcgcactattgccaggcgtgcgcctacaaaaaggccatatgcgccatgtgcggcaagaagatcatgaacaccaagaactacaagcagagctcaacgtgatgcagtttatcaaaggatgcacttaagactaaactaaccatagacaacagaataattataacctatagtacaacaaatgccttactaatcagttctcggatggcgtcttttcccgttttcgcttggcattttggatctgggttgagtagctcaagccgtctttgtcgaattccagtggcatgatgcccaggtcgccggaataacgattcttggcaatttggagatacttcttgccccgcacagaagtcagcctcttgtcttgaatgatcaacacgttgtccgcttcttgggtggcctttgctgtgccgaaaaccgagctggtggtcagctcgtcctcctgccgctccttgcgcggatgcattacgagtgtcacgtgtacattgtgcttggtggcaaaggagcgaaaggcagctataatagagtcctgttcaaagaacttgtcgcctcgaaatgtggacacgcccatcataaattgcagattgtcaatgatcacgtgcatcacatcgtgcacatacgacgcatgctcgatggcttccagaaccggcttaaggggctgctgtccgtggaaggtcataaagtatagcggcaaacgctcaaactccgctgcccagtggttaaactcatgcaaccggtcgtccaacgggtagcccacatactggcgaagcaaggtggccgccagccgggtgtttcggatctcaaaagagccccacagcgtgtttacgccctgcatggccagatccagagagtactcgctcataaaggttgtctttccactacccgtgggtcctgtgaggattgtcaactctcccctccgatggcctttgagcagcttattcagtactggaaagcgcttccactttactccattgactttctcgatgttttgcaactcgctgagaatgtcatttcgcattgctccgaatgttgtgatggccttgtgctgcaccggtgtcgctttggccaggatgtggcgcagattgagtcgtcggcgcagagccaaatgtggcgcaggttccgtctcagtaggtcggattaacaggcatcgcctttcgtccaactttaacgcaaaagctctagctgcatcccagctgtgactggcatcgtagtgcaaccaaaagatgagctctttgaagcgttccaaggcgggcagacactcttgtggtagagtcttcagttcgtagggcaggcatacaacgcaatctaggagacaatttaatttttaaattaaattatatcttaaatgtgtactagctgagccaaactggtttccaaattatttttaattgatatcttaaatatatcaccctaggatttcttcactattctgcaaccaatgaaaaatattcctaaaagctatgttttcacttacgcgtttcaatgttctgtgtggcaaggacaataaagtcaattagattgctgactagaaccgctttggttttgttcatcgcaccgtgaatcagcagcccggagctggagctgctctggaagatctcctcccgtcgatcgcccagatataacaccttttcgccaacctccacttgcgcggcattgcgtaacttaaagtggagcagctgttgctgcggctcccactgtgctcctatggcatttagttggtcctccttcaagcccttgattcccaaagctgcacaggcctcgggagtaaccacggccaggtggggaaatcgggattcatagaccggctgcctctgcagcggttgcttatagccaaccggcttgggcaactgataggataataaagcgctggtcagtgaggtttttacgtcgcaattggggcagataaaggctcctaaaggaaaattgaatatactacggttttttttgcgaaatgtaattggtgctctcacccgtccgcttgtttacgtaagccagcagcccatgatcggtgcccttttgggcgtttgtcaccggctgcctattgcgatcgcagaggcgacactccagctgcaagcacgtgtgtccgtctttgtggggcaagttgagctgccgcagctgccgcttgaagtccacatactccttggggtctagtgagcactcctccaagccggaaaccacttgggtagcgtagttttttctccaaacacgttgtttttcgttatttatacgcaacagcggtttgattaaaccggcgcgtctcattttccatgttatcgatatcgaaagtgaggggtggaaaatagggatgacaattgggcgcgcaattttgaagatttgtttacctactattaatcattcaaatatctttgtactctctcagtgctctgggaagcgctctatttaatactaggaaatctcattaaattactttcgtaaagtgcgcttacaattgtgctaaattgttcgataaataccagtttagttaagcacggtaaattcaaattataaagcattatctatctataactttgttctaaggtcaatactttatttgtacaactgattaaacaaattgcggctcttttccaccatcccaataacaataaaaaatatatacaattcgtgattatttgattttattagtttatttattttagtatttgaagatgtccaattctttttatatcaagatcttttacacaaggcaacgtcactctgcaattaaagtaaaatataaaatatattaaatacatcatctcaagacagccgaaatatatatatttgtattagtcagacgccttagaccatccttaagccgaagctttctggtggaaaccgcaaaaggtgtttaaggtaatcatcagtttatttattaatttaaaaaaaaaaattctcgaaaatattaccttatacagtcgaataaacgagctcatttagttatatttgcctgcgataaaccacatttctgagttgatctggaaacaagagataaaataggtaagtaaaatgctagtttaagtataataaagtttttattgaaactttttagtcagacgccttagaccatcattaagccgaagctttctggtggaaaccgcaaaaggtgttgaagttaatcatcagtaaaacgtatattgcattcaaacataaaaatgttagtgtaaataaattacctttatcggtaaatccatgtgctcgctgctgcagctggacccatacataacctcaaaccagaatgtaaattctggaaataaaagaaaat

SEQ ID NO: 12581 - DNA, 1842 bp, DROSOPHILA
atgagacgcgccggtttaatcaaaccgctgttgcgtataaataacgaaaaacaacgtgtttggagaaaaaactacgctacccaagtggtttccggcttggaggagtgctcactagaccccaaggagtatgtggacttcaagcggcagctgcggcagctcaacttgccccacaaagacggacacacgtgcttgcagctggagtgtcgcctctgcgatcgcaataggcagccggtgacaaacgcccaaaagggcaccgatcatgggctgctggcttacgtaaacaagcggacgggagcctttatctgccccaattgcgacgtaaaaacctcactgaccagcgctttattatcctatcagttgcccaagccggttggctataagcaaccgctgcagaggcagccggtctatgaatcccgatttccccacctggccgtggttactcccgaggcctgtgcagctttgggaatcaagggcttgaaggaggaccaactaaatgccataggagcacagtgggagccgcagcaacagctgctccactttaagttacgcaatgccgcgcaagtggaggttggcgaaaaggtgttatatctgggcgatcgacgggaggagatcttccagagcagctccagctccgggctgctgattcacggtgcgatgaacaaaaccaaagcggttctagtcagcaatctaattgactttattgtccttgccacacagaacattgaaacgcattgcgttgtatgcctgccctacgaactgaagactctaccacaagagtgtctgcccgccttggaacgcttcaaagagctcatcttttggttgcactacgatgccagtcacagctgggatgcagctagagcttttgcgttaaagttggacgaaaggcgatgcctgttaatccgacctactgagacggaacctgcgccacatttggctctgcgccgacgactcaatctgcgccacatcctggccaaagcgacaccggtgcagcacaaggccatcacaacattcggagcaatgcgaaatgacattctcagcgagttgcaaaacatcgagaaagtcaatggagtaaagtggaagcgctttccagtactgaataagctgctcaaaggccatcggaggggagagttgacaatcctcacaggacccacgggtagtggaaagacaacctttatgagcgagtactctctggatctggccatgcagggcgtaaacacgctgtggggctcttttgagatccgaaacacccggctggcggccaccttgcttcgccagtatgtgggctacccgttggacgaccggttgcatgagtttaaccactgggcagcggagtttgagcgtttgccgctatactttatgaccttccacggacagcagccccttaagccggttctggaagccatcgagcatgcgtcgtatgtgcacgatgtgatgcacgtgatcattgacaatctgcaatttatgatgggcgtgtccacatttcgaggcgacaagttctttgaacaggactctattatagctgcctttcgctcctttgccaccaagcacaatgtacacgtgacactcgtaatgcatccgcgcaaggagcggcaggaggacgagctgaccaccagctcggttttcggcacagcaaaggccacccaagaagcggacaacgtgttgatcattcaagacaagaggctgacttctgtgcggggcaagaagtatctccaaattgccaagaatcgttattccggcgacctgggcatcatgccactggaattcgacaaagacggcttgagctactcaacccagatccaaaatgccaagcgaaaacgggaaaagacgccatccgagaactga

SEQ ID NO: 12582 - protein, 613 aa, DROSOPHILA
MRRAGLIKPLLRINNEKQRVWRKNYATQVVSGLEECSLDPKEYVDFKRQLRQLNLPHKDGHTCLQLECRLCDRNRQPVTNAQKGTDHGLLAYVNKRTGAFICPNCDVKTSLTSALLSYQLPKPVGYKQPLQRQPVYESRFPHLAVVTPEACAALGIKGLKEDQLNAIGAQWEPQQQLLHFKLRNAAQVEVGEKVLYLGDRREEIFQSSSSSGLLIHGAMNKTKAVLVSNLIDFIVLATQNIETHCVVCLPYELKTLPQECLPALERFKELIFWLHYDASHSWDAARAFALKLDERRCLLIRPTETEPAPHLALRRRLNLRHILAKATPVQHKAITTFGAMRNDILSELQNIEKVNGVKWKRFPVLNKLLKGHRRGELTILTGPTGSGKTTFMSEYSLDLAMQGVNTLWGSFEIRNTRLAATLLRQYVGYPLDDRLHEFNHWAAEFERLPLYFMTFHGQQPLKPVLEAIEHASYVHDVMHVIIDNLQFMMGVSTFRGDKFFEQDSIIAAFRSFATKHNVHVTLVMHPRKERQEDELTTSSVFGTAKATQEADNVLIIQDKRLTSVRGKKYLQIAKNRYSGDLGIMPLEFDKDGLSYSTQIQNAKRKREKTPSEN

SEQ ID NO: 12583 - DNA, 9021 bp, DROSOPHILA
tctgtaatccataatacaacgaagcgaacaatcaagtcgtctccaatggaaacgagcacaccagatgcctggttagttgtgttctattttaaggcggcgactttgagtgacattcatcatgctgagcatcccaactagttgccaagccggcctgataactaaccacatccgtgccggccagagtcgtgatgacgcgcatctcccaaaagtgcaccatgtttgtttttagggcctgttcccctctcacaatcgccgtgccctgactgtaggtgggatggaagatgatgtcccggtcggtgaccacggcatccgattcatcagtggcgtgccaccgccaggcattcacgtttccggactcatcctcgccgcattggcacctgaccaggtcgggtatatggcccttgtggttggtaacctcaatggagttgggaaacgggcaatcacagaagccgggattgcaggcttcttggtacgggggcagcagcatgctggcacttgttcctcttcactggtttaccttcgattgctttgtaatgaattgtgtcagccgtgtacaatgatctcgagcagtcgacggaccacaaatgtttccagttaaaccagctgcagcctcatatataagcacattactctgatctgactgaacaataaacaaaacgatgcgttgtaaatagacgtcggcatcgctgccgacgtcgccgccagtgtgaccgaagccgcagttcggaacttaaaatatactagatatatctcaattatgagaattatggtcaaatttatagcaatttcttttgtggattgctagtgcgtaggaaattttggtgtttacaaaagctaaaaaaccagtattcaaattttaaatagaatgttgatgggctacatttttaaaaacttagatgcgcgcgctaacgataggtttcctacaaatggcagccctgatatcgattttcagttggcttcgcacatatggcatctctttagccttttgacaatctggcagcacgcgtagccacaaacagcggcttttcactacgatatttccgcaaaaagttgtaaaataggttaataaaagtgcttaatacttataaaaacaactaaacagacatggcggatgccgcagcacgtcagctgcaatacgagtacaaggcggtaagtgtcaaatcccgcccgggaaaacttctcccactccatgcggcgtctcaccagaatttcacaaacacgttaaatgtattttccatttttcagaactccaatcttgtgctgcaagccgatgtccgactcatcgaacgtccgcgccgcgatgaggccactggcgaggtgtgttccctggtgggaaagctggacggaacaaggatgggagatcggtaccagcgaacgaagccggagaaaacggaggagcgcaaggtgaaacgtcagaagcgcgacgaggcccagtacgatttcgagcggatgaagggagccactctgctctccgagggcattgacgagatggtgggcattgtgtatcgacccaagacccaggaaactcgtcagacctacgaggtcctgctcagtttcatccaggaggctctgggggatcagcccagggatatcctgtgcggtgccgctgatgagattctggctgtcctcaagaacgatcgtttaaaggatcgggagcgaaagaaggatatagacagcttgctgggcgcagttacagatgagcgattcgctctgctggttaacctgggcaaaaaaatcacagactttggcagcgatgccgtgaatgctttgactgctgctcccaacaacgaggagcagatcgatgaaacctacggcatcaatgttcagtttgaggaatccgaagaggagagcgacaacgacatgtatggcgagattcgcgacgatgatgcccaggatgaaggagaggaggcccgcattgatcacacactgcatgcagagaatgtgagtaatgtagttaaaattgcgaatcccatttcttattcgtgtatcccttcccagctagccaacgaggaagccgcaaataatgtaaagaaagagcgctccttgcatcctctggacatagatgcgtattggttgcagcgttgtctgagcaagttctacaaggacgccatggtgtcgcaaagcaaagccgccgatgtgttgaagatcctcaaagatgccgccgacgatcgcgattgcgaaaatcaattggtgcttctgctgggctacgattgctttgacttcattaagcaattgaagcttaaccggcagatggtcctgtactgcaccatgctcgcctcggcccaaacggacagcgagcggcaaaggattcgcgagaagatgcgcggaaattctgcgttggccaaaatccttcggcaattggatacgggaaagtcagaggatcaggaggagggcgaagcacggggaagcaagcgtggcaaaggcgatgcagaggatggtggagcggcggctgccgggcaggtggccggtgtgcgacagctactcgagttggaagagatggcattcactcaaggatctcactttatggccaacaagcgctgtcagcttcccgacggctcctacaggaaacaacgaaagggctacgaggaggtgcacgtgcctgcactgaaacccgtgccatttgatgccaatgaggaacttcagcctgtggacaagcttccgaaatatgtgcagcctgtgttcgagggtttcaagacccttaatcgtatccaaagtcgtttgtacaaggccgcactggacagtgatgagaatatgctgctgtgcgcccctactggagctggtaaaactaatgtggcactgctaaccatgatgcgggagattggaaagcacatcaacgaggatggcaccatcaatgcgcaggatttcaaaatcatttacgtggctcccatgaaatcgctggtgcaggaaatggttggcaattttggacgacgtcttgcttgctataatctgacggtctctgagttgactggagatcaccagctgaccagggaacagatcgccgccacgcaggtgattgtgtgcacaccagagaagtgggatatcatcactcgaaagggaggcgagcgtacctttgtgagcttagtccggttggttatcatcgatgagattcacttgctccacgacgagcgtggtccggtgcttgaggccctggtggcgcgtacgataaggaatattgaaactacccaggaggaggtgcgattggtgggcttatctgccacactgcccaactatcaggacgtggccaccttcctacgcgtaaagcccgataaaggcctcttctactttgataacagctatcggcctgtgtccctggagcagcagtatatcggtgtgacggagaagaaggccctaaagcgattccaggtgatgaacgagatcgtttatgagaagaccatggagcatgctgggcgtaatcaggtcctggtcttcgtacactcgcgcaaggagactggaaaaacggccagggctgtgagggacatgtgcctggagcaggatacccttggtagctttcttaaggaaggatcagcaagcatggaagtgctgcggactgaagccgaacaagtaaagaacacagagcttaaggagttattgccctacggcttcgccattcatcatgctggaatgacccgcgtcgatcgtactttggtggaagatctatttgctgatcggcacattcaagttttggtttccaccgccacgctagcttggggtgtcaatctccctgcccatactgtaatcatcaagggcacgcaggtatacaatccggaaaaaggacgttgggtggagctgagtgctttggatgtactgcagatgttgggtcgtgctggacgaccgcagtatgataccaagggtgagggtattcttataaccaatcacagtgagttgcagttctatctctccttgctcaaccagcagttgccgattgagtcccaattcatctccaagcttcctgacatgctcaatgcggagattgtgctaggaacggtccaacatctccaggatgcagttaactggttgggctacacttatctgtacattagaatgctgaggaatcccacgttgtacggagtttcccatgatgccatcaaggctgatcctctgttggaacagcatcgtgctgatctcctgcataccgcagcttgctgtctggagagaagtggccttattaaatacgatcggaagacgggacactttcaggttactgatctgggacgcattgcctctcactattacctaacccatgaaaccatgctgacttacaaccagctccttaagcaaactcttagtgagattgagttgttccgcgtattctccctatcctcggaattccggcatatttccgtccgagaagaggaaaagttggagctgcagaagctcatggaacgagtgcccattcccattaaggagtccattgaagagcacagtgccaaggtgaatgttttgctgcaagcctatatctcccagttgaaactggagggctttgcattgatgtcggacatggtgtttattacccaatccgctgcccgtttaatgagagccatttttgagattgtattgacccgcggatgggctcaattggcggacaaaacgttgacgctctgcaagatgatcgacagaagaatgtggcaatcgatgacaccacttaggcagttcaagaagatgcccgatgagattgccaagaagctggagaaaaaacacttcccctggggcaggctttacgatctagagccacatgaacttggtgagctgattagagtgcccaagctaggaaagaccatccacaagtttgtgcaccagttccccaaattggagctctccacgcacattcaacccataacaaggggaactctgagagtggaactaacaattacaccggatttccaatgggatgaaaaggtgcatggccagtcggaaggtttctgggttttaattgaagatgtcgactcggaactcattctccatcatgagtttttcctgctgaagcagaagtattcccaagatgagcaccagcttaagttctttgtgcctgtctttgaacctctgccaccgcagtacttccttcgcattgtctcagatcgttggataggtgcagagacccaattaccagtttctttccgacacttgattctgcccgagaagaatatgccacctacggagcttttggatctccaaccgcttcctattagtgcactccggcagccgaagtttgaatccttttattcgcaacgcttcccgcaattcaatcccattcagacacaggtcttcaacgcagtctacaatagtgatgagaatgtctttgttggagcaccaaccggatccggaaagatgactattgcagagtttgccatcatgcgcttgttcactacccaatccgatgcccgatgtgtatatttggtctcggaggaggcattggcggacttagtttttgcggattggcatagcaaatttggatccctggacataaaagtggttaaattgaccggcgaaactggaaccgatcttaagctcatagccaagggacagctggtgatcactactgcggataagtgggatgtgttgtctcgcagatggaaacagaggaagaacgtacaattggtgaacctgttcattgtggacgaactgcagttggttggtggcgaagaaggtcccgttttggaaattgtatgctccaggatgcgatacattagctcgcagattgagaaacagatcagaatagtggcgttgtctgcatcgctaacggatgccagggatgtcgcccagtggctgggctgtaatcccaatgccactttcaatttccaccccagcgtgcgtcccattccgttggagctgcacatccagggctataatgtcactcacaacgccaccagaattgctacgatgtccaagcctgtttacaatgccatcctcaagtacagcgcccacaagccggtgattgtgtttgtctcgtccagaaagcaggccaggctcactgcaattgatgttttgacctacgcagcatcggatttgcaacccaaccgttttttccatgctgaggaggaggacatcaagccgttcctcgaacgaatgacggataaaactttgaaggagaccctagcgcaaggagtggcctatctccatgagggcctatccgcctcagatcatcgcctggtggagcagctgtttgactctggcgccgtgcaagtagctgttatctccagagacctttgctggggcatgagcatctccgctcacttggtgatcatcatggacacacaattttacaatggcaagaatcattcgtatgaggactatcccattacagacgtgctgcaaatgattggtcgagccaatcggccgaacgaggatgcggatgccaaatgcgtgctgatgtgccagagcagcaagaaggacttctttaagaaattcatcaacgagccgctgcccatcgaaagtcatttggatcatagaatgcatgatcactttaacgccgaggtggtcaccaagacaattgagaacaaacaggatgccgttgattatctcacctggacgttcctctacagacgattgacccaaaatcccaactactacaatctgcagggtgtcacgcatcgccatctctccgaccatctttcggagttggtggagaatacgctgagcgatctagaacagtccaagtgtattagcgtggaggatgatatggacacgctgccactcaatctgggcatgattgctgcctactattacatcaactacacaactatcggtatgaagcattagatttaagtttaggcaattgtcatcttcattttcctatcattttttcccagagctcttcagtttgtccctcaacagcaaaacaaaagtgcggggcctgctggaaattatttcatcggcagctgagtacgaggatgttgtggtcaggcatcatgaggagcaggttctgcgcacgctgtctcagcgactgcccaacaaactcacaggacccaatgaaacggctccaaagtaagcaacccatacatttagatcttaaaaagaattttaccaatgttatttttagattcaatgatccgcacatcaagaccaatttgctgcttcaggctcatctttcgcgattgcaactgggacctgaactgcaaggcgatacggagcagatactgagcaaggccatccgcctcattcaggcctgcgtagatgtgctgagttcaaatggctggctgtcgccggctgtggctgccatggagctggctcagatggtcacgcaggccatgtggagcaaggactcgtacttgaaacagttgccgcactttagtcccgagattgtcaagcggtgcacagagaaggtgagagtaacaacaagtgaatctctaggattatctcatgtttcgtcgtatatttcagaaaatcgaaaccgttttcgatatcatggaattggaggacgaggatcgcactcgcctgctgcagctctccgatttacaaatggccgatgttgctcgattctgcaaccgttaccccaacattgagctgaactatgaggtggtggacaaggatcgcatcaactcaggatcaaccgttaatgtagtggttcaactggaacgtgaggatgaggtcactggcccagtcattgctccattcttcccgcagaagcgcgaagaaggatggtgggtcgtcataggtgatcccaagaccaactccctgctctccatcaaacggctcacgctgcagcaaaaggcaaaggtcaagctggactttgtggcacctagtccgggcaaacacgactacactctgtactacatgagcgattcctatttgggttgtgatcaggagtacaagttttccatcgaagtgggtgacttccagtcggaaagcgaaagcgagtcagattagttttctttaggatcatcagttgggcatgtttgcacaaatgaaaatcaatcattttacaatttacgcgcattaattgtagcaataataaattcgtgtactactttagtagaaaccaaattgtacaaggatacactgaggataattatataaagtagtacaaaaaaaaaaaaaaacaaaataaaaaaaacctttcaactttctttcgctggttgataccaagaatctaaatattttgtagtcaacagtgccaattcttatattgtcttaagcttttaaatttcgtatggaacaattcaagtttgttgtaatttgtaatctggatcatcaaaatgcaaccgtttagattttaaaaaaatcattcaaattattcattcaaattcaattcaatcataaatatttatttggattttttagatatttgcacataggattgctgacaaatagattaacttggaggtattttccctgtatggtgaacttggcttttagcggctgacagaaactgccgatccatggctactgccacgattggctcctccattagcgaagctgttcgtggagctaaagtttattgtctgtccattgggaagatggtaaacctgactcagcgaagcacctgccgcattattggatccaaaggggctggtgttctgggactgagtggccgtgcttgcggaggaggcaccgaatgatccattggcactctgcgactggaagccctgagcctgcccactggcggccgaggatcctgagttgagtccattgttgtagttgctgtgggcagctccgttggatgcggcctgctcctggttgtaaccactgggtccgagtggtcccagcggatttaactcgacgttggcattggcattgccgccatctggtccggcaccaacatcaacacccgctttggttcccccagcgccggccgatgtacctgcctgaacttttccaccttgattaccgccgaatccgggatttcctccgaatcctgggttaccgccgaattcctgattaccgccgaaaccctgattacctccgaatccctggttgcctccaaatccttgattaccgccgaatccacctccaaaaccaggctctccaccgaatccgccaccgaagccgggatttccagcatactgaccaccaaattgtcgccca

SEQ ID NO: 12584 - DNA, 6712 bp, DROSOPHILA
cacgcgtagccacaaacagcggcttttcactacgatatttccgcaaaaagttgtaaaataggttaataaaagtgcttaatacttataaaaacaactaaacagacatggcggatgccgcagcacgtcagctgcaatacgagtacaaggcgaactccaatcttgtgctgcaagccgatgtccgactcatcgaacgtccgcgccgcgatgaggccactggcgaggtgtgttccctggtgggaaagctggacggaacaaggatgggagatcggtaccagcgaacgaagccggagaaaacggaggagcgcaaggtgaaacgtcagaagcgcgacgaggcccagtacgatttcgagcggatgaagggagccactctgctctccgagggcattgacgagatggtgggcattgtgtatcgacccaagacccaggaaactcgtcagacctacgaggtcctgctcagtttcatccaggaggctctgggggatcagcccagggatatcctgtgcggtgccgctgatgagattctggctgtcctcaagaacgatcgtttaaaggatcgggagcgaaagaaggatatagacagcttgctgggcgcagttacagatgagcgattcgctctgctggttaacctgggcaaaaaaatcacagactttggcagcgatgccgtgaatgctttgactgctgctcccaacaacgaggagcagatcgatgaaacctacggcatcaatgttcagtttgaggaatccgaagaggagagcgacaacgacatgtatggcgagattcgcgacgatgatgcccaggatgaaggagaggaggcccgcattgatcacacactgcatgcagagaatgtgagtaatgtagttaaaattgcgaatcccatttcttattcgtgtatcccttcccagctagccaacgaggaagccgcaaataatgtaaagaaagagcgctccttgcatcctctggacatagatgcgtattggttgcagcgttgtctgagcaagttctacaaggacgccatggtgtcgcaaagcaaagccgccgatgtgttgaagatcctcaaagatgccgccgacgatcgcgattgcgaaaatcaattggtgcttctgctgggctacgattgctttgacttcattaagcaattgaagcttaaccggcagatggtcctgtactgcaccatgctcgcctcggcccaaacggacagcgagcggcaaaggattcgcgagaagatgcgcggaaattctgcgttggccaaaatccttcggcaattggatacgggaaagtcagaggatcaggaggagggcgaagcacggggaagcaagcgtggcaaaggcgatgcagaggatggtggagcggcggctgccgggcaggtggccggtgtgcgacagctactcgagttggaagagatggcattcactcaaggatctcactttatggccaacaagcgctgtcagcttcccgacggctcctacaggaaacaacgaaagggctacgaggaggtgcacgtgcctgcactgaaacccgtgccatttgatgccaatgaggaacttcagcctgtggacaagcttccgaaatatgtgcagcctgtgttcgagggtttcaagacccttaatcgtatccaaagtcgtttgtacaaggccgcactggacagtgatgagaatatgctgctgtgcgcccctactggagctggtaaaactaatgtggcactgctaaccatgatgcgggagattggaaagcacatcaacgaggatggcaccatcaatgcgcaggatttcaaaatcatttacgtggctcccatgaaatcgctggtgcaggaaatggttggcaattttggacgacgtcttgcttgctataatctgacggtctctgagttgactggagatcaccagctgaccagggaacagatcgccgccacgcaggtgattgtgtgcacaccagagaagtgggatatcatcactcgaaagggaggcgagcgtacctttgtgagcttagtccggttggttatcatcgatgagattcacttgctccacgacgagcgtggtccggtgcttgaggccctggtggcgcgtacgataaggaatattgaaactacccaggaggaggtgcgattggtgggcttatctgccacactgcccaactatcaggacgtggccaccttcctacgcgtaaagcccgataaaggcctcttctactttgataacagctatcggcctgtgtccctggagcagcagtatatcggtgtgacggagaagaaggccctaaagcgattccaggtgatgaacgagatcgtttatgagaagaccatggagcatgctgggcgtaatcaggtcctggtcttcgtacactcgcgcaaggagactggaaaaacggccagggctgtgagggacatgtgcctggagcaggatacccttggtagctttcttaaggaaggatcagcaagcatggaagtgctgcggactgaagccgaacaagtaaagaacacagagcttaaggagttattgccctacggcttcgccattcatcatgctggaatgacccgcgtcgatcgtactttggtggaagatctatttgctgatcggcacattcaagttttggtttccaccgccacgctagcttggggtgtcaatctccctgcccatactgtaatcatcaagggcacgcaggtatacaatccggaaaaaggacgttgggtggagctgagtgctttggatgtactgcagatgttgggtcgtgctggacgaccgcagtatgataccaagggtgagggtattcttataaccaatcacagtgagttgcagttctatctctccttgctcaaccagcagttgccgattgagtcccaattcatctccaagcttcctgacatgctcaatgcggagattgtgctaggaacggtccaacatctccaggatgcagttaactggttgggctacacttatctgtacattagaatgctgaggaatcccacgttgtacggagtttcccatgatgccatcaaggctgatcctctgttggaacagcatcgtgctgatctcctgcataccgcagcttgctgtctggagagaagtggccttattaaatacgatcggaagacgggacactttcaggttactgatctgggacgcattgcctctcactattacctaacccatgaaaccatgctgacttacaaccagctccttaagcaaactcttagtgagattgagttgttccgcgtattctccctatcctcggaattccggcatatttccgtccgagaagaggaaaagttggagctgcagaagctcatggaacgagtgcccattcccattaaggagtccattgaagagcacagtgccaaggtgaatgttttgctgcaagcctatatctcccagttgaaactggagggctttgcattgatgtcggacatggtgtttattacccaatccgctgcccgtttaatgagagccatttttgagattgtattgacccgcggatgggctcaattggcggacaaaacgttgacgctctgcaagatgatcgacagaagaatgtggcaatcgatgacaccacttaggcagttcaagaagatgcccgatgagattgccaagaagctggagaaaaaacacttcccctggggcaggctttacgatctagagccacatgaacttggtgagctgattagagtgcccaagctaggaaagaccatccacaagtttgtgcaccagttccccaaattggagctctccacgcacattcaacccataacaaggggaactctgagagtggaactaacaattacaccggatttccaatgggatgaaaaggtgcatggccagtcggaaggtttctgggttttaattgaagatgtcgactcggaactcattctccatcatgagtttttcctgctgaagcagaagtattcccaagatgagcaccagcttaagttctttgtgcctgtctttgaacctctgccaccgcagtacttccttcgcattgtctcagatcgttggataggtgcagagacccaattaccagtttctttccgacacttgattctgcccgagaagaatatgccacctacggagcttttggatctccaaccgcttcctattagtgcactccggcagccgaagtttgaatccttttattcgcaacgcttcccgcaattcaatcccattcagacacaggtcttcaacgcagtctacaatagtgatgagaatgtctttgttggagcaccaaccggatccggaaagatgactattgcagagtttgccatcatgcgcttgttcactacccaatccgatgcccgatgtgtatatttggtctcggaggaggcattggcggacttagtttttgcggattggcatagcaaatttggatccctggacataaaagtggttaaattgaccggcgaaactggaaccgatcttaagctcatagccaagggacagctggtgatcactactgcggataagtgggatgtgttgtctcgcagatggaaacagaggaagaacgtacaattggtgaacctgttcattgtggacgaactgcagttggttggtggcgaagaaggtcccgttttggaaattgtatgctccaggatgcgatacattagctcgcagattgagaaacagatcagaatagtggcgttgtctgcatcgctaacggatgccagggatgtcgcccagtggctgggctgtaatcccaatgccactttcaatttccaccccagcgtgcgtcccattccgttggagctgcacatccagggctataatgtcactcacaacgccaccagaattgctacgatgtccaagcctgtttacaatgccatcctcaagtacagcgcccacaagccggtgattgtgtttgtctcgtccagaaagcaggccaggctcactgcaattgatgttttgacctacgcagcatcggatttgcaacccaaccgttttttccatgctgaggaggaggacatcaagccgttcctcgaacgaatgacggataaaactttgaaggagaccctagcgcaaggagtggcctatctccatgagggcctatccgcctcagatcatcgcctggtggagcagctgtttgactctggcgccgtgcaagtagctgttatctccagagacctttgctggggcatgagcatctccgctcacttggtgatcatcatggacacacaattttacaatggcaagaatcattcgtatgaggactatcccattacagacgtgctgcaaatgattggtcgagccaatcggccgaacgaggatgcggatgccaaatgcgtgctgatgtgccagagcagcaagaaggacttctttaagaaattcatcaacgagccgctgcccatcgaaagtcatttggatcatagaatgcatgatcactttaacgccgaggtggtcaccaagacaattgagaacaaacaggatgccgttgattatctcacctggacgttcctctacagacgattgacccaaaatcccaactactacaatctgcagggtgtcacgcatcgccatctctccgaccatctttcggagttggtggagaatacgctgagcgatctagaacagtccaagtgtattagcgtggaggatgatatggacacgctgccactcaatctgggcatgattgctgcctactattacatcaactacacaactatcgagctcttcagtttgtccctcaacagcaaaacaaaagtgcggggcctgctggaaattatttcatcggcagctgagtacgaggatgttgtggtcaggcatcatgaggagcaggttctgcgcacgctgtctcagcgactgcccaacaaactcacaggacccaatgaaacggctccaaaattcaatgatccgcacatcaagaccaatttgctgcttcaggctcatctttcgcgattgcaactgggacctgaactgcaaggcgatacggagcagatactgagcaaggccatccgcctcattcaggcctgcgtagatgtgctgagttcaaatggctggctgtcgccggctgtggctgccatggagctggctcagatggtcacgcaggccatgtggagcaaggactcgtacttgaaacagttgccgcactttagtcccgagattgtcaagcggtgcacagagaaggacgaggatcgcactcgcctgctgcagctctccgatttacaaatggccgatgttgctcgattctgcaaccgttaccccaacattgagctgaactatgaggtggtggacaaggatcgcatcaactcaggatcaaccgttaatgtagtggttcaactggaacgtgaggatgaggtcactggcccagtcattgctccattcttcccgcagaagcgcgaagaaggatggtgggtcgtcataggtgatcccaagaccaactccctgctctccatcaaacggctcacgctgcagcaaaaggcaaaggtcaagctggactttgtggcacctagtccgggcaaacacgactacactctgtactacatgagcgattcctatttgggttgtgatcaggagtacaagttttccatcgaagtgggtgacttccagtcggaaagcgaaagcgagtcagattagttttctttaggatcatcagttgggcatgtttgcacaaatgaaaatcaatcattttacaatttacgcgcattaattgtagcaataataaattcgtgtactactttagtagaaaccaaattgtacaaggatacactgaggataattatataaagtagtac

SEQ ID NO: 12585 - protein, 2149 aa, DROSOPHILA
MADAAARQLQYEYKANSNLVLQADVRLIERPRRDEATGEVCSLVGKLDGTRMGDRYQRTKPEKTEERKVKRQKRDEAQYDFERMKGATLLSEGIDEMVGIVYRPKTQETRQTYEVLLSFIQEALGDQPRDILCGAADEILAVLKNDRLKDRERKKDIDSLLGAVTDERFALLVNLGKKITDFGSDAVNALTAAPNNEEQIDETYGINVQFEESEEESDNDMYGEIRDDDAQDEGEEARIDHTLHAENVSNVVKIANPISYSCIPSQLANEEAANNVKKERSLHPLDIDAYWLQRCLSKFYKDAMVSQSKAADVLKILKDAADDRDCENQLVLLLGYDCFDFIKQLKLNRQMVLYCTMLASAQTDSERQRIREKMRGNSALAKILRQLDTGKSEDQEEGEARGSKRGKGDAEDGGAAAAGQVAGVRQLLELEEMAFTQGSHFMANKRCQLPDGSYRKQRKGYEEVHVPALKPVPFDANEELQPVDKLPKYVQPVFEGFKTLNRIQSRLYKAALDSDENMLLCAPTGAGKTNVALLTMMREIGKHINEDGTINAQDFKIIYVAPMKSLVQEMVGNFGRRLACYNLTVSELTGDHQLTREQIAATQVIVCTPEKWDIITRKGGERTFVSLVRLVIIDEIHLLHDERGPVLEALVARTIRNIETTQEEVRLVGLSATLPNYQDVATFLRVKPDKGLFYFDNSYRPVSLEQQYIGVTEKKALKRFQVMNEIVYEKTMEHAGRNQVLVFVHSRKETGKTARAVRDMCLEQDTLGSFLKEGSASMEVLRTEAEQVKNTELKELLPYGFAIHHAGMTRVDRTLVEDLFADRHIQVLVSTATLAWGVNLPAHTVIIKGTQVYNPEKGRWVELSALDVLQMLGRAGRPQYDTKGEGILITNHSELQFYLSLLNQQLPIESQFISKLPDMLNAEIVLGTVQHLQDAVNWLGYTYLYIRMLRNPTLYGVSHDAIKADPLLEQHRADLLHTAACCLERSGLIKYDRKTGHFQVTDLGRIASHYYLTHETMLTYNQLLKQTLSEIELFRVFSLSSEFRHISVREEEKLELQKLMERVPIPIKESIEEHSAKVNVLLQAYISQLKLEGFALMSDMVFITQSAARLMRAIFEIVLTRGWAQLADKTLTLCKMIDRRMWQSMTPLRQFKKMPDEIAKKLEKKHFPWGRLYDLEPHELGELIRVPKLGKTIHKFVHQFPKLELSTHIQPITRGTLRVELTITPDFQWDEKVHGQSEGFWVLIEDVDSELILHHEFFLLKQKYSQDEHQLKFFVPVFEPLPPQYFLRIVSDRWIGAETQLPVSFRHLILPEKNMPPTELLDLQPLPISALRQPKFESFYSQRFPQFNPIQTQVFNAVYNSDENVFVGAPTGSGKMTIAEFAIMRLFTTQSDARCVYLVSEEALADLVFADWHSKFGSLDIKVVKLTGETGTDLKLIAKGQLVITTADKWDVLSRRWKQRKNVQLVNLFIVDELQLVGGEEGPVLEIVCSRMRYISSQIEKQIRIVALSASLTDARDVAQWLGCNPNATFNFHPSVRPIPLELHIQGYNVTHNATRIATMSKPVYNAILKYSAHKPVIVFVSSRKQARLTAIDVLTYAASDLQPNRFFHAEEEDIKPFLERMTDKTLKETLAQGVAYLHEGLSASDHRLVEQLFDSGAVQVAVISRDLCWGMSISAHLVIIMDTQFYNGKNHSYEDYPITDVLQMIGRANRPNEDADAKCVLMCQSSKKDFFKKFINEPLPIESHLDHRMHDHFNAEVVTKTIENKQDAVDYLTWTFLYRRLTQNPNYYNLQGVTHRHLSDHLSELVENTLSDLEQSKCISVEDDMDTLPLNLGMIAAYYYINYTTIELFSLSLNSKTKVRGLLEIISSAAEYEDVVVRHHEEQVLRTLSQRLPNKLTGPNETAPKFNDPHIKTNLLLQAHLSRLQLGPELQGDTEQILSKAIRLIQACVDVLSSNGWLSPAVAAMELAQMVTQAMWSKDSYLKQLPHFSPEIVKRCTEKDEDRTRLLQLSDLQMADVARFCNRYPNIELNYEVVDKDRINSGSTVNVVVQLEREDEVTGPVIAPFFPQKREEGWWVVIGDPKTNSLLSIKRLTLQQKAKVKLDFVAPSPGKHDYTLYYMSDSYLGCDQEYKFSIEVGDFQSESESESD

SEQ ID NO: 12586 - DNA, 4014 bp, DROSOPHILA
ttgagtaagactggcaaaaagttctttatcctattgatttgtccagtgcgccaagctcgcaagctcctcgcgagctttcgttgggggtgttctcgatggtcacgctgtgtgtggtgcgcaaatcacctttgacactttcccaatgcacttttaagttatttttaatcatattatttatacaagtaccgaaatatttcaacgacagtttcgcacagcccacgaaattgctaatactaattaataaatacattttagaatagttttgagtacctaaattgttatattaaatatatatgtgtatatatttatatatattatatataatatattttatatatgcaacattattacttaacatattattattagcgcacaatggaaatttggtttccattgctgcttatcatcgaatgaataataattcggactcaccgcgtttcagtcgctttgctttcagtttcgatggcgacggggatgaagcactggcgctcgccaccgtgtccggcgcaacaggtacaacaggtggtgcgggctcgtcgggatacgggtacgtggtggtgccatcgattacctcggaagaggcggctgctgcggccgcattcgagaactgtgtggatatgtggctgaagatctgcgaggagatgctctccgtgcgccggaaggtgttccgcaggcggtccagcgatgacgtgggggcgctgggcgcaggcgcggcacctccggtggtgggcgtaaccggaatggagacactcgaggattgggagtcttcactcctttcgcggcgcaccagcagatcgtccgtgctcatggcgaatcacttgcttcgcggcgattatcaggacactgtgcggagtcacatgaatcaaaatgacgcgattacagccgctaatttcgcttgttttgcgcttgaacgcgggtaaacaaaaaagtttgtcaatacaaaattaaaacagctgttgcactgcgattggggatgggcgataacaatcactggttacagatcacggttatcgcagctcgatgggagctgttatgttattgaactgactatgcttatcgataagaaaactcaagcaggtgttaaaagcatcatagggtggcaacactgtgcccacttttaccgccaaaataaattgctaggtttatttacgaaaattaaacgcccaacgaaaggacaacgaatggaggaggaattgaagcagcagttcgacgagatgggcgtggagccagcggacgcagttctgggcaggtgtgcggagctggccattacctacaacatccacgacgccaccgagttcgtggagcagtggatggccttcagtttgtcgcacctccaaggcgaggatcctgcgatcgagaatctgggcgactttgagcgcaaggtgttgcagctgcggaaggacaaggcgggatacaaggcaactggccagaaggcgaaatcatatggttcgccctctgtacaggatacgagctcactggccacctatggcgtcatggaggacgatcccatgctggatgactatgtcagcgaatcggcagtggactcctccgctctgcacacgcccaaggccaagaagcagtcggatcggaccgccaatctcaagggcgccgcactctttagccccgccagctatacaccccaatcggcaaagaggaaagcaggtttagaaacaccatccaactcagtggccggcaagccgggcgatatagttgacaccttcggacatcccaaactcctggctggctccagctggcagtcacaaatggagcacacggttccggtgactcaaaaactgctgcacaacgacgccccgctgaccatcgcaaatttgggctacatgaacgacctgctgaccgaccgatgtcacaacctgcgcgtccgcttcaaccaaaccggtccggcactagtggacaagaaacttggacaagcaggcgcagccgagtgcatttggtatccgcaggataggcaggtattgcagtccgcaggtggactccacgcggtgggaatgattcattccgaggacgatggcccactggacgcccactccgcatttatggccgttttagatgacgatgtagaagatgaaatggacccaacgctcacgctcaacttctccagggtcaagtctgccagcatattcccaggtcaagtggtgctcgccaaagggttcatacccaggggcaaaaccttcatggtagaggagatacacacagagcgcaaactgacgccagcaacgccactgcaaatagacagggagcttcagtttgtggtggcctccggaccctttacggacagtacggatctcttctacgaaccgctgcacgacctgctcaagtacctcaaggatcacagacctgacgtgctggtgctcacgggaccattcctggatgccgatcacaagatggtcggcgaactggccgagaccttcgatacattcttcgagaagatgattgggggaataatggagtcgattggtagtcacacagcagtgctggtggtgaccagtcagaaggatgccatggctctttccgtatatccaacgccgccgcccgctctgcgcagaacctatccaaatctatacatgctgcccgatccatctctggtggacttggatggctttacgctgggcgttacctcaaccgacgtggtggaccacctgttgagtcacgagtttgctgtgaatgccggcgagcggatgcacagggccatcaaccacttgttccaccagggctccttctatcctttgtatccgccggcggacgaagacatggcctacgattcccagctggcgttgaaatatgcacagctcaaacagctaccaaatgtgctcatcttgcccagcgatcagcggcatttcatccgcttggtcaacgactgcctggtgatcaatcccggccgtgtcgcggacaagaagggtggaactttcgcccgattcctggtggcgccttcggtgccgggaaaggcggccaacatgttcaacagtgtggcgtgtcaagtccaacgcatctaacctgaccactttgtgatgatgataaggaaaggatagtgggaaatagatcagtacaatattattagttaatataatgaacacactactttgtcataacttttcacaaaatacattcaacaacaaacaactagcattagttattttgggccaaagtaggtattgtattatttgtaaacatatgccctggagttttctcagactcaagttttatatacaacaagatcaataatggctagcaacgttgctgcgccacaagcttcagctggaggagattcgacggaactggagcgctgttgctggatctgttttgagaccgataaggaggcaggtcgccaggcttgggtgaatccatgtctctgccgaggaaccaataagtgggtgcaccagagctgcatttccctctggatcgacgagaagacccgaataaacaacaatctgcaagccgtttcctgtccacaatgccaaacggagtacaccattgcatacccgaatctctggattttcgatagggctttggagctgaccaacgatcttatcctaacaaacttatataattgcctggccaatgtcttcacggtggtctttgcctattggtcagcggtttcattcggagcaaaaacatatttgcagatcactggtcaggaaggtcacgttcatcaaataattcaatcgggagacctgttggttgttctggtcggattcccattaatctcggtagttctgatacttggacgcttaattccctgggaagatgccctgttgcgcttcattagaatatgttattcattgctgcgaagtctttcaatgatgtgcctaggacggaaatatgaccaccagaccgaaccatacccttctgcgccaatgaccgaatattcagcatcgcgggtggtctgtggagccatcctcttgcccaccatatccatgtacgtgggtagagttctttacagctctgtcgacgatagattgcaacaaactcttcttgggggattgactttcatagcga

SEQ ID NO: 12587 - DNA, 2014 bp, DROSOPHILA
atcacggttatcgcagctcgatgggagctgttatgttattgaactgactatgcttatcgataagaaaactcaagcaggtgttaaaagcatcatagggtggcaacactgtgcccacttttaccgccaaaataaattgctaggtttatttacgaaaattaaacgcccaacgaaaggacaacgaatggaggaggaattgaagcagcagttcgacgagatgggcgtggagccagcggacgcagttctgggcaggtgtgcggagctggccattacctacaacatccacgacgccaccgagttcgtggagcagtggatggccttcagtttgtcgcacctccaaggcgaggatcctgcgatcgagaatctgggcgactttgagcgcaaggtgttgcagctgcggaaggacaaggcgggatacaaggcaactggccagaaggcgaaatcatatggttcgccctctgtacaggatacgagctcactggccacctatggcgtcatggaggacgatcccatgctggatgactatgtcagcgaatcggcagtggactcctccgctctgcacacgcccaaggccaagaagcagtcggatcggaccgccaatctcaagggcgccgcactctttagccccgccagctatacaccccaatcggcaaagaggaaagcaggtttagaaacaccatccaactcagtggccggcaagccgggcgatatagttgacaccttcggacatcccaaactcctggctggctccagctggcagtcacaaatggagcacacggttccggtgactcaaaaactgctgcacaacgacgccccgctgaccatcgcaaatttgggctacatgaacgacctgctgaccgaccgatgtcacaacctgcgcgtccgcttcaaccaaaccggtccggcactagtggacaagaaacttggacaagcaggcgcagccgagtgcatttggtatccgcaggataggcaggtattgcagtccgcaggtggactccacgcggtgggaatgattcattccgaggacgatggcccactggacgcccactccgcatttatggccgttttagatgacgatgtagaagatgaaatggacccaacgctcacgctcaacttctccagggtcaagtctgccagcatattcccaggtcaagtggtgctcgccaaagggttcatacccaggggcaaaaccttcatggtagaggagatacacacagagcgcaaactgacgccagcaacgccactgcaaatagacagggagcttcagtttgtggtggcctccggaccctttacggacagtacggatctcttctacgaaccgctgcacgacctgctcaagtacctcaaggatcacagacctgacgtgctggtgctcacgggaccattcctggatgccgatcacaagatggtcggcgaactggccgagaccttcgatacattcttcgagaagatgattgggggaataatggagtcgattggtagtcacacagcagtgctggtggtgaccagtcagaaggatgccatggctctttccgtatatccaacgccgccgcccgctctgcgcagaacctatccaaatctatacatgctgcccgatccatctctggtggacttggatggctttacgctgggcgttacctcaaccgacgtggtggaccacctgttgagtcacgagtttgctgtgaatgccggcgagcggatgcacagggccatcaaccacttgttccaccagggctccttctatcctttgtatccgccggcggacgaagacatggcctacgattcccagctggcgttgaaatatgcacagctcaaacagctaccaaatgtgctcatcttgcccagcgatcagcggcatttcatccgcttggtcaacgactgcctggtgatcaatcccggccgtgtcgcggacaagaagggtggaactttcgcccgattcctggtggcgccttcggtgccgggaaaggcggccaacatgttcaacagtgtggcgtgtcaagtccaacgcatctaacct

SEQ ID NO: 12588 - protein, 653 aa, DROSOPHILA
MLIDKKTQAGVKSIIGWQHCAHFYRQNKLLGLFTKIKRPTKGQRMEEELKQQFDEMGVEPADAVLGRCAELAITYNIHDATEFVEQWMAFSLSHLQGEDPAIENLGDFERKVLQLRKDKAGYKATGQKAKSYGSPSVQDTSSLATYGVMEDDPMLDDYVSESAVDSSALHTPKAKKQSDRTANLKGAALFSPASYTPQSAKRKAGLETPSNSVAGKPGDIVDTFGHPKLLAGSSWQSQMEHTVPVTQKLLHNDAPLTIANLGYMNDLLTDRCHNLRVRFNQTGPALVDKKLGQAGAAECIWYPQDRQVLQSAGGLHAVGMIHSEDDGPLDAHSAFMAVLDDDVEDEMDPTLTLNFSRVKSASIFPGQVVLAKGFIPRGKTFMVEEIHTERKLTPATPLQIDRELQFVVASGPFTDSTDLFYEPLHDLLKYLKDHRPDVLVLTGPFLDADHKMVGELAETFDTFFEKMIGGIMESIGSHTAVLVVTSQKDAMALSVYPTPPPALRRTYPNLYMLPDPSLVDLDGFTLGVTSTDVVDHLLSHEFAVNAGERMHRAINHLFHQGSFYPLYPPADEDMAYDSQLALKYAQLKQLPNVLILPSDQRHFIRLVNDCLVINPGRVADKKGGTFARFLVAPSVPGKAANMFNSVACQVQRI

SEQ ID NO: 12589 - DNA, 8643 bp, DROSOPHILA
gcgagtccatcagattagttgtaagttcatgttgtttttctttctgtacgataaaccgcttataaatacacatttcgcccaggctcaacaatccctacctcaggagccgtccgaacaggaaacggggacttcaaagatccgagtgcgtaagcccactggcgattttctggagcgccgttttttcatcaacaacaacctacaggtaggtgctactaagccacacttgaattgcctgttgactgttctctgtttgaccaggatctgctcaactttgtgacggccaatggtttcctcatcgaggagtacaagctaatcagcagctggccgcgtcgcgatcttacggccatcgagagtagccaaacattggagtcgctcaagctgtatccgcaggaaacggtcatcctggaggagcgatgattccgcttgttactttaaggccgtttcgttcgattgggtttagtttttgcattaatatctgaaaattgtagatctacctataatttacgtactataattaagcaagcagcaacactttaacgaaagcatacacaccacatacatacatatatacctatatctaaagataatgataatttctagctgcaaggttttatacaaatccatactaaacatagaataatccaacgcaatccgatcgatcagcactcaccagcaccagatactaccggtaaaacatatatgcatgtagcgcagcagattaaaattgagcatagcagcaaagaagagaaagaaagtactgcatttatgttggcttgttttattttattaataataaattatataacatgtactgaacgctccgccccaggttacacatgcgcctaattacacttaacaacacaaagctgaatggaaaaaggatgggaatttgggtggtgggcagggcagagccgtgggcggaaggggttaaacaatgagcacacaaaactgacacgagtattggaaggggacaggttacaggacatccgaattagggggcctaggactttcccaggaattgttcgatgggcgccagcaccaccaacaggatcagcaccgtcacgaagagaatcagcaccacgccgtaaactccgagcaatcccttgcgcatgcccgcatactgaaattgggaagttacaggatgaagaatatggacaatataggttactactacttaccggggcatccatcttccgctccatgctcatgccattccgcatggcgtgctgctgatgatgggacatgtcgcccatttggaaagtgttcgcccgctggctgagatgacgctccgaggccatgccgccaatctgccaatgattcaaacacaagccgatctacacattaagggacatagccaccagttctcgagcggatgatgggtgacagatgaattagtatggaatgaatgaacgtttagggacacaactagaaccactgtacaggcaggcaggcgatgctgggtctaatctttgtacacttcggggtcacatgagaggggagaaacacccaaccactgcagtatgaattacttacggagaatatcaggtggacgagtacatgcaccaccacgaagctgaccaggatccagtccatccactcgggcagctcggcctttggtagttttacagaaaagaagatggtaacaactgcaagaagattcgtgaataagccatatatttggatgatctacgaccgctgaactcacttcccagaatatgggccaggttaccgcccagccaatgaccccagttgaagtatggccgcttcttgtcattgggtcccggtcggaacagagctccaatgggttgaatgaagcacaatatcaccgtgatcagaccgattatcgaatgggcatgccacacagcctgcttcagctccacccagatgagtacgtaagcggccaccgtaagcgaccaggtggtgaccatgaggaggcgatgccaggcgaaccattgatccgtgccgcagctctggctgcccacccacgtctgcttgaagtagcgcgcaaagatgatgcccagcgaggtggttccaatccatgcggcaatcatgaaggcaccgtggagctggatgagcagtctgctagaaccactcaggtcttgcacctccgccagattgatcggttgcgccgagggcaggcgtccaatgtcgtggtagcccacgctgttctccttaaggctgctgccggatgccaccagcagatggtacttgccattgcgaagatcaaaagtgcgtccctgcacattggtcactgcatccctttgcacacggcagtagatcactccatccacaatggaggcgtccagcaggcgggcagagttctggttctagaaagagtggtatccattaagaggtaaattattcattttattcatttgttgcgtgattatgagtcaaacttaccacattggatctcactgccgagtaaggagaggccgaagtcaaggaggaatacaggttaacccggccattctctggcacacattcggtggtcaagtcgtcacccatcttggcgtcatcagaaagaccaactgccacgtaagcagcattggttcctagaaacggcgatgaagatgaagaccaacttgggaaaaaagaaaaacggatgactcacccttgccggactgaatctcaaactcgaagacatctccacgcaccgtgaccacagtgatggaggtacagctcttcgtcgccacgcaaccgtcggggaatccaaaacagttcttgctctgtccgcagccattgtagatgggatccgaggaaacggcaaccacgttgtttggcgccacatagctgggcggcacatagggagcacgggtggtgcccgcaggggcagatggactctgtgtgggtagtggtggagcagcggacagatcgcgacggactatctgaacgggctgagatggcacgcccacccagaattcattgtagctctgggcaatggtggcactgtgatgggtatacaaattaaagatagtatcattgatgcctgccagtcgattcccctccgactcacttgaagaccacctggccgagaaagtccactggtgattgccactccaggataacctgctgcttgggtcctgcattgctatgcgtggctgaattattcacggagttctcgcagttcattagcttaatggtgccatcgcgggcgggtccaaattgtccgatgatctgatggggtggattccgattgcgcgcctggatcatgtagccaccgaagcttaagcccgccggcacacccgtcagatccacgcgaagcgtctgaccctggccaagtgtcgaggaagaggtctccacgctgaagggcgacacactgttctggggtagcacactgccgccggagtggaacggcagcatggtgtcgcacacggtttccggagcaccttgcggcagactctgtcccggatccggccagatggccaccgccagcagcgccgtcaccagcgttgccagccaactccgcatcgtcagcgcctgcatcatctatgaatggagcacctgtcgtggtggtagacaatgccgcttagagttttgcttttcgctatcgaatgataattgagtgatcagtagcgaaccgtgtcccgacttccgttcccctttgcttcctcctgaccccacaaagaaactatatgtatacatacatatatgtatgtatatgcatatgtacgtagctatctgaaaccctcgtcaaacattcgtcatttccatcttctgtcgtctgtttaattaccatggcataaataattgctttcccgcttatcgggggcacgttttcagcgaacccgcaaacaagtgaattgcgaatctatctgtgcatctacatatttgataacaatcgaagtatctacagctactgagtggatggcacttcaagtccctacgttggttccatgacatatggttagagcacgttactataaatataagtgatatatgctctataggaagttctccgaaaattagtgattaaatgtttttgtgcaagaagttgtaatttatatgtgtatttatttaattaagtttgtatttaggtttagagtataaagtaaaattaatcaaaaacataaaagttgaagtcaaaaaaccgtaacattatgtatgctcaaagtattatttactaattggttactattcataatgcccagactccaaatcaaaatgcttccatttgtttacgaatgcgaccgattgtggtctagattatgttaccccgatatggatataacacatttgccacggacgtatcgcttaacaccgtttagctttcagattgtccggccaatcgacgcttatcacttggggaatatcacgggtcgtcaggcatcgctgcgtatgcgtactattcctactgactgcaaatatattacgcatacgcgcatatgagtcgagctaattactcgccaactgggctataaatcaacgtttattgtacttaagcaaatcggcacattaactgggatttacgggttatgggtgctacttttatttaaacactcgcatggttaagaaaacattaacgaggtcagttcccccgcgagtcacaagatgacttttgctttcgttaaaaccaagatcaagatcaatgaggaagtgagtgggtagaatatgttatgggcctgggactttcccatgtggcggtggtgggaatacagacgacagtgattcatcgacaacagcacggttgtttgtatctgtatctgtatctgtaactcctctatattttttccccgctccgtgtcaagaattcgaattgaacttgaatttgaaagcatttacgattgaccttggcgcgttttatagcgcatgtatctcataaatgctggcttacttgtttttatacatttgcctttctttgaagtgccagctaaatgttaattaaagcgcggttttagctcgatacagtcattgtttacaccaaaatttttggcagctggttttggctgaacctctgaccacttcgagtcattcaagaaccgcacaatgggtgctcgcatttggttagaccttgaaagtcaaatgtattgattatgagtgatttatctaaaaaaaaaaaagaaacattcacccagaccttcgcgaaggtatcgctgaacatatctacatcgttggttagatacatatatgtatgtatctggtagttcgcactgtctgtagaaggcaaagtgaaaaccgaaagaaatttcacctgccgcacaaaagtaacgataaatgctttccattaaattcttggcacattaataagcgtttcgcggcatatagccattggcctacccatacgtgtatggccctataaccacgactcgactcaacacaaccaaaactcaactggaactcggcttttgtgcttttgttttctgtgaacgtgggacaaaactgattagcgacttttccgacagcaacaatgagccattatgttaccaccaacttgcccattgtaaggggtatatatgtacatatatatcacatatagtatatagtataaactacacataagcttgtcgtgcccttgctaaaaagccagttttgaaactcgtacacaaaataatcgcaatttgaatgctatcggtgtgtagacactgcacgaaacatatccacttatacgtttttgacactccaacactaattgcttcgatcaatgcgaatggtatgtagatcgccgacatcagaaaggtaaacggacttgttaaaatccaccttcttggactggatgtcacttaagatcggttgtgctgaatcacccacttctaaagttgcgtaaagcgatcataattggcatacccctgtaagtcgataagattgcatttgactttggctagtccgttagattatggcccaatcaggcgaagaaataggtctatatccacttgtttaaccgtcgtatcatccattagacgtagtgggttgactattcctaggtagttttgtagcacacgccaactattggcttttgaccccatccaaagagttcaaatggggcggatggcgggcgtagtgcccaggtggatggggtctggtcaaggtggtcgcccaatttccttgcaccgcaacaatcttggccggacatcgcgtgccagaacctgtgtaaactgggttaactactggcctgtggtgcgcagttccaggcaaccgagtactagacccttccacccattcggctggctttttgtataggaagcatggttactgaggtctcaggctggttctgtgcataccgaataggattgatcaacatttgcacttggaacttgagtggcatgtgtcaaagacttgggcctaaattaatgtttaaccaggcgatagacaacaggtcgtacgactatagatcgattttaactgctaatggttaggaataatgaaatgtactatctatagcataaccacccatcatcatcatgtatgtatatatcccttctatatcgtgtctatttcaaatttggtatacatattattagtaaacactagtatagtcatttagaaatccctcaaagttaacttccttccgaactaagtgcaaattaattgattgagatccgaacaggtgttccacctgtaaaacctagtagaatgcgtaaactgtgccacagtcgcgtggccgagaaaaaggccttaacggctcgaatattggattcgatgtattcacatcaaatgcccattagatgacatcacatcgcacacagatcgaggaaatcgcctcgccaagtgggggccaaatacaaaaactgtaccaagctgtactgtctgtcgtcattagttgagcgacacttatgcatggaagtgcatttgttgaaagtgacagtcgccgctgattaatcagccatcgaattgcgcaagccactaagctcgtgtccgcgagtgtgccaattcctctaaagggaccagggcacgtcccgagataaacccgaataagttggttaactttgttgtctttactacctttgcgacttgtttacatcaccaacaactttgcgcagacgcgccgcttgacatcactcactagcttttgtttctattttcgagtgcctaattaatttattattatttgccattgtgatcgtaactagaagacttgcattgcgtcttgccattgaaatgttgtgtgcgaaaaaaaatataaatctatgcaagcgttgaattgagtaagtgagggggggcggggtttgtgtgatctcagcatcattaacatttctgaaaccggtttcactgtacatgcgacacagttcaagtggattggatacaaaaacacagcagtaactttggaatttttatgtgctgatttaggggatcggtctcagatttgatccaacgttcatcccacaacccattgacattgcccaaaaaccacaacaaagttaagattgtgcttcaggctgaacttgatgtgtggcctgttgcacgctgcatgttgcaagcgcggcatgtggcacttattggccatgggcacacctgcacgcccagtagaacgcgaacgcaaatgccgtcgccattcatcgcgaataactcaaaacccgtttgtcaaagcacgcactaacctaaaatcgccgtcaacaatattcgaaaaacactccgagctgcgttagctccgtacttcttgtccaatcaacagagtgaatatggccaaaccgaacgcaacgaaatgccgccaacgactgaaaagtcggcggagagccgctcgaaaagtgctgcgaagcatttgaagtgggttttcagtcgtgtatcgatagtaagccaaaagacaaaccaccgataccgccaactaccgagctttttggttttaagtcagcgaaactggttttcaattgccttaagtcagtttgataacaacatttaaagaagggaggtttattctttaaagctaactttgattgtgaaatcgtaagcattgcaaaatctaagggtctaagggtctgcggttcaagctttatataaaaaaaaaacgtacattgaaatattggttcattgaagttcccaaataatatccataaatataagcaattttgatctgcgcatttcggacaaagcatttcaatgaaataatgaatgcaatattatatattcaaaggataccattttatgcattgtcttcgcatcgattggaatgctatatcaaaggtttgtcaaacatattctgtaagtatttcagcaaatttatgtaaaacaagtttctttcattggttacacacatttaaatatcccgcgttgccgtaacttttttttttttgttgccagccctgtcattggattttacacaacctcacaaacggtcacatcatcggctgacaattggaaaattggagaaaaaatttactttgacccgaataatgtgcctaaagttatttgtttttacggcccttctggcccttgtcagctgcgaggttatcattggccaggacgaactggtggacgaggtgtctggcctgtacaccatcgaaggacgcgtttccccgccggattccattttttcacccactcaaggaggcggacgaagtgctccggtgaacaagaatacaccgaagtggcacacagagattacgctctccatcaacgacggcgaatttaagggattcgtccgcgaggatgggcagttcatgatcagcggagtgccatccggcagctatatcctggatgtccaccacccgg

SEQ ID NO: 12590 - DNA, 2067 bp, DROSOPHILA
gcatttcgttgcgttcggtttggccatattcactctgttgattggacaagaagtacggagctaacgcagctcggagtgtttttcgaatattgttgacggcgattttaggtgctccattcatagatgatgcaggcgctgacgatgcggagttggctggcaacgctggtgacggcgctgctggcggtggccatctggccggatccgggacagagtctgccgcaaggtgctccggaaaccgtgtgcgacaccatgctgccgttccactccggcggcagtgtgctaccccagaacagtgtgtcgcccttcagcgtggagacctcttcctcgacacttggccagggtcagacgcttcgcgtggatctgacgggtgtgccggcgggcttaagcttcggtggctacatgatccaggcgcgcaatcggaatccaccccatcagatcatcggacaatttggacccgcccgcgatggcaccattaagctaatgaactgcgagaactccgtgaataattcagccacgcatagcaatgcaggacccaagcagcaggttatcctggagtggcaatcaccagtggactttctcggccaggtggtcttcaatgccaccattgcccagagctacaatgaattctgggtgggcgtgccatctcagcccgttcagatagtccgtcgcgatctgtccgctgctccaccactacccacacagagtccatctgcccctgcgggcaccacccgtgctccctatgtgccgcccagctatgtggcgccaaacaacgtggttgccgtttcctcggatcccatctacaatggctgcggacagagcaagaactgttttggattccccgacggttgcgtggcgacgaagagctgtacctccatcactgtggtcacggtgcgtggagatgtcttcgagtttgagattcagtccggcaagggaaccaatgctgcttacgtggcagttggtctttctgatgacgccaagatgggtgacgacttgaccaccgaatgtgtgccagagaatggccgggttaacctgtattcctccttgacttcggcctctccttactcggcagtgagatccaatgtgaaccagaactctgcccgcctgctggacgcctccattgtggatggagtgatctactgccgtgtgcaaagggatgcagtgaccaatgtgcagggacgcacttttgatcttcgcaatggcaagtaccatctgctggtggcatccggcagcagccttaaggagaacagcgtgggctaccacgacattggacgcctgccctcggcgcaaccgatcaatctggcggaggtgcaagacctgagtggttctagcagactgctcatccagctccacggtgccttcatgattgccgcatggattggaaccacctcgctgggcatcatctttgcgcgctacttcaagcagacgtgggtgggcagccagagctgcggcacggatcaatggttcgcctggcatcgcctcctcatggtcaccacctggtcgcttacggtggccgcttacgtactcatctgggtggagctgaagcaggctgtgtggcatgcccattcgataatcggtctgatcacggtgatattgtgcttcattcaacccattggagctctgttccgaccgggacccaatgacaagaagcggccatacttcaactggggtcattggctgggcggtaacctggcccatattctgggaattgttaccatcttcttttctgtaaaactaccaaaggccgagctgcccgagtggatggactggatcctggtcagcttcgtggtggtgcatgtactcgtccacctgatattctccattggcggcatggcctcggagcgtcatctcagccagcgggcgaacactttccaaatgggcgacatgtcccatcatcagcagcacgccatgcggaatggcatgagcatggagcggaagatggatgccccgtatgcgggcatgcgcaagggattgctcggagtttacggcgtggtgctgattctcttcgtgacggtgctgatcctgttggtggtgctggcgcccatcgaacaattcctgggaaagtcctag

SEQ ID NO: 12591 - protein, 641 aa, DROSOPHILA
MRSWLATLVTALLAVAIWPDPGQSLPQGAPETVCDTMLPFHSGGSVLPQNSVSPFSVETSSSTLGQGQTLRVDLTGVPAGLSFGGYMIQARNRNPPHQIIGQFGPARDGTIKLMNCENSVNNSATHSNAGPKQQVILEWQSPVDFLGQVVFNATIAQSYNEFWVGVPSQPVQIVRRDLSAAPPLPTQSPSAPAGTTRAPYVPPSYVAPNNVVAVSSDPIYNGCGQSKNCFGFPDGCVATKSCTSITVVTVRGDVFEFEIQSGKGTNAAYVAVGLSDDAKMGDDLTTECVPENGRVNLYSSLTSASPYSAVRSNVNQNSARLLDASIVDGVIYCRVQRDAVTNVQGRTFDLRNGKYHLLVASGSSLKENSVGYHDIGRLPSAQPINLAEVQDLSGSSRLLIQLHGAFMIAAWIGTTSLGIIFARYFKQTWVGSQSCGTDQWFAWHRLLMVTTWSLTVAAYVLIWVELKQAVWHAHSIIGLITVILCFIQPIGALFRPGPNDKKRPYFNWGHWLGGNLAHILGIVTIFFSVKLPKAELPEWMDWILVSFVVVHVLVHLIFSIGGMASERHLSQRANTFQMGDMSHHQQHAMRNGMSMERKMDAPYAGMRKGLLGVYGVVLILFVTVLILLVVLAPIEQFLGKS

SEQ ID NO: 12592 - DNA, 7581 bp, DROSOPHILA
accgagctggaggagcacatcgagtccctcatcgtcaaggtcaacaatctggagaagatgaagacgcgcctggccagcgaagtggaggtgctcatcatcgatctggagaagtcgaacaacagctgccgcgagctgaccaagtcggtcaacaccctcgagaagcacaacgttgagctgaagagccgtctggacgagaccatcatcctgtacgagaccagccagcgcgacctgaagaacaagcacgccgacctcgtccgcactgtccacgaactggacaaggtcaaggacaacaacaaccagctgacccgcgagaacaagaaactgggaggtgcgttaccatactaaaagactttcacaattgtatattgtagttatcatgatataatatttaataataacctattattaaccagatgatcttcatgaggccaagggtgccatcaacgaactgaaccgtcgtctgcacgaattggaactggagctgcgtcgtctggagaacgagcgtgatgagctgaccgctgcctacaaggaagccgaggctgtaagtaatcacaaaaaaaaaaaaaaacatacacataacatttttagttataatcctaataatttgtgtaatattattttatagggccgcaaggctgaggagcagcgcggacagcgcctggccgccgacttcaaccagtaccgccacgacgccgagcgtcgtctggccgagaaggatgaggagatcgaggccattcggtaagttactgaccagggattggtaactagagttaaccccctttttggaagtagccccacgccactgcaccacgagtgacagcgagaacagacgaaggttttcgtttcccctgccaaagcggaagtcccaaaaaaaataaacacccctcaaggccccaagggggaaattattcgattgattcgcaatcgctttcgcaattgccaacacaattgatagtgaactgacccatttagcaattagcaatcagtttgagttctttagtcgcacaaaaagcaacggcattagttttctattcaggaagccaggcaaaagatcctgatcccactgaaggttcaaaggctgagctcaagaagtgggttatatccatctggttttcaaaaccataccgattttttaaaaatccgtatctaattctctgcagaaaattgcgcagttgctgtgattacacaatcaaagtgggttcatagttgaaaatcgaaagaacccattgagaaaactttcgatttgaagagtggctctccagcaagtggtaggtttttggatcaatcatcaatcgagttggtggtcagtgttagtctgtgattgaaatgatcttatgtcttaagcagagatcagttctagctttcttaaaaacagataagttaggtgtgcataatgcttgatcttaatagctattgttgattttgtaaaatttttacacacgtttccggtaattaaatgatattgtgaaatcgatagaagtatctatctgaacttgtacaaattaaaatcggttgatttggaatgttcaaataactttacataaatagatacaataactgaatagaaaattgattatatgcacttttagacactttccctagttccttagagtcttccatgactattgcataaaatgtcttgctattatgacattgtctatgagcactttgccaaaatgaatcaatcatagccgcacacattgactgccaacaaatgatgataataatgatgatggtgatgatgatgttattgtcgtcattatgctcatacctagcccgatgccaacagctgaaagaaacgaaatgcaatctttttatagatttcgacaaatttgaaaatttatttgcaaagcagcagcaactgccactgctgccaaccgaggagaacccaagaaacccgaagctacagaggcgacaaggcgacacacagaggcggcgacaattgtagctttaattagagtactcttaagaaaacacattaggccattagaccattagaccatcgcaacccccttgagaaatccgcccccccttcacaaagatccccttcctaaaccatggccctagccctaaaacaaagaccttctcgcttccgtccgacgacgacaacgtatgaggataactatgggtacaccatgaacttctaccagcccatgctggactatctggacgccaaggccaagggtctggaggtcaagaagccgcacctgccgtgggtcagcgagaggggactgaagcagtaccgcccctcgaatgcggtgcgacaatataacgccgacgagatcgtccgattgtcgcgcacctgcgccgctcgggccgacgagatattgcttaactttcgggcccagaaacgctcgccgttcagtgtacaaaagttggtcgacgcatcgcgagtgaccaagcaccttgaaccggacacagttgtcgaaagatcgcgccagcgccgccgtcgccgtcaggaggagctcgaggatttgatcaaacgcgacactcttaagatattgcagcgtatccgtaagattgaattggataacgaactcgacaagatgtccgacgatttcaagcgctcgattcgcggcaaatccgccagtgccatcgcccaggcgctgctctccgaatcggagaagaacatcaagacggccaagaaggaggaggaggactatatcgcccaaactttagtgcgctcgagtcgtgcagtttcgcgtgcccgttcgcgttcctcctcccccctcgatggccagtatcgcgcccatgcgctccacatcgagctcatggacgaccggctggtggacaagctggaccatcgcgtctcctcgtcccttcacaatgtgaagcgccaattgtcgacactgaatcagcgcactgtggagttctacgcggacagcaggtgcggtattgaggataagtgctggatctgtcgcaaggtcttgcgcacccatcccaagctcaaggactatagctacgtgtattggaagcactaggtccaggtcgatgtccctaatcccaattccttgcccaattccagaccctcttttcgctcatagcttcattcgatatcttagatttcaagcacaaggtaacttaatcttttttgaccatccgaaatgtatctcaaatgtataccaaaggatatatttgtgttactgcacacatcgaagaggagagaaaaccttttaaaaatcaaatatatgatttttagaggcctctattttgcttactgttcactacacgaaacggttctttacgaatactaaaagacatggagtggttaaatatatttatctcgagatattaaaagatccatcttcagaaagccaaaaaaatgtgttaatatcaagtggatcgaactgcgtttctctgtgtactttcccatccgggcaatttgaataaatgcgaacatttttgaattgcagctcaattttttgtctgagcatcctagcatccacctcccccgacccggcaatttggcatctctatttgtctgtttgtcgtttctcgtctggcacaaaatgtatttttgtttcaagagtttttgcaaatcgcgttcttgttttgttcctctagcattgtgtctgttgtgcagtcttctgaaaattatttatacagaattatgcgcagcatatttgaccacggctaattgcagaaaatcgccagcaatttggtcattaattagaaactttgtgggtgtttcttatgcttcttgtgttgggcatctaaacaagcctttgagtgggaaatatctttgttttaattgtgtatataatcaacactcttatctgccgaatatgtcaagttagtataatccctaaatgccaagttaatcagaatgcacatatattcatcactttcccctgaaataacgacttcttagcccagtcctatcatatttcgcacccgcaccttagaaatttcgaggctgtcagtccgatttgcgcgtagatggtccgaccaactatttctttgggtttgtccttcaaatcgagatttattttattttcaactgaaaagaaaactgaggcgcatgacagcaaaaacaatcacaagaagaggtggcgacaaaaaaaaaaaaaacagaacaacattagacacagcaaatatttttgcgtaaacattgaaacaatggcggtgaaaaattaaaatctaaatgagaatgcttaagctttctacctaaaaccaaataccttggcaaaacgacagcaatgggcacacacacatgattttcagattaagtaaccaacacaggggcttttataagaaaactcaactaaacaagaataatcataggaattaggaaatactgactgatgagggattataatattgttatataaccagggaaaaggaaatgattctgcaaattaagcatcattaagatactccttccaaactcaaaaattgttagatactggaaatccattagcttcctatgttttcgatggtaatatattctatcaccaccttgtaaaacgacctatcgccactgaaatagaattcagtagtcatgttcacttatcactaattgcaacaggtacacgactttgaattaaattagaaagtgaatcaggtagagtatcagaagtgcaagcataactcaaatttagttggcatcgctgcaccttcgcccaagaatagacgcatgatgcacttaccccaaaaacaaaaacaaaaatgcattttagggggagaaggaactagtcggcaaatagcttggcatgtatgtcccaactatttgtgacaagttcgatgtctttatcatgcgtaaaaatacaccgaaattcgcgaatgcagcagccagcgaaacaatgaaacatttctgacaatgccagtgcacctgagttgagtggttgagtgcttggtggttgagtgcccaactgctgagtggtgcgaaaaatgtaaaattgtgggtcaggcattggggccaaaaatagagccagcaatgcgaatcgacggagggtcattgtgtggtaaactggggctacttctcggtatcaattcaattgataaatggtggaaaaatatgtcaaagttctaatgaatgcattcaatccgtagcaagcagacctcgatcgagatcgagcagctcaatgcccgcgtcatcgaggcggagacccggctgaagaccgaggtgacccgcatcaagaagaagctgcagatccagatcaccgagctggagatgtcgctggatgtggccaacaagaccaacatcgatctgcagaaggtgatcaagaagcagtcgctgcagctgaccgaactgcaggcccactacgaggatgtccagcgccagttgcaggccaccttggaccagtatgccgttgcccagcgccgtctggccggtctcaatggcgagctggaggaggtgcgctcgcacctggacagcgccaaccgtgccaagcgcaccgtggagctgcagtacgaggaggctgcctcccgcatcaacgaactgaccaccgccaatgtcagcctcgtctccatcaagtccaagctggagcaggagctctccgtggtcgcctccgactacgaggaggtgtccaaggagctgcgcatcagcgacgagcgctaccagaaggtccaggtggagctcaagcatgtcgtcgagcaggtgcatgaggagcaggagcgcatcgttaagctggagaccatcaagaagtccttggaagtcgaagtcaaggtgggtgtttgggttttgggacatctatctaactaatatttcatagggataaaacttactacctatctggtactatatgactcaacgaaccttgcaatctctcccgcagaacttgtccatccgcttggaggaggtcgagctgaacgccgtcgccggcagcaagcgcatcatcagcaagctggaagcccgcatccgcgatctggagctggagctggaggaggagaagcgccgccacgccgagaccatcaagattctgcgcaagaaggagcgcaccgtcaaggaggtgctggtgcagtgcgaggaggaccagaagaacctcatcctgctgcaggacgcgctggacaagtccactgccaagatcaacatctaccgccgccagctgtccgagcaggagggtgtctcccagcagaccaccacccgtgtgcgccgcttccagcgcgagctggaggctgccgaggatcgcgccgacaccgccgagtccagcctgaacatcatccgcgccaagcaccgcacattcgtcaccacctcgacggtgcccggatcccaggtgtacatccaggagaccacaaggacgatcaccgaatagagccccacgctccgcaccgagatcatttcattatcaaacgctaaccgaagaaccgaacacaaccaatcccgaacccatgaagaagaccatctggcggagggcagagttcagagtgcaggacgagaacgagaattgcgtgagaaagtttttataatttaaatttttttgtcaaacccccaaaacgccgcggcagcgattagaacccagtggacttcggcgggggctcgtataggctacacactataaatacataacactacacatcctatctatataataataatactattttgaagttcatgtaatttaattaaaataatgaacctgaaaaacctaaaaacaaaataaaaacaaaccaacgaaaacttggcagagttttgctagcgctagagatatgatatataccatataccatataccacatacgatatataatacttgtacgtagagagatgagagagatcaaccgagttggctgaacaataacgtttaatggaaatggagcccatttgaacgaaaagcactaaaacttaataacttgaaatggaaatgataatcgtcaccgaaatatcccactaagcacgccaccgcagcatcgagttaaccgagttacaaccgcttctactatttgtttttagttcactttatgtttagtaggtaaatttctgtgtgctcgtaacgaatttgaattttacattaaatcagcatcaacaaaactgagcaattttcacattttttactttgtatcttgcaataaaaacgaaattctattcataataataacaataagaaattgtaagtgaaattcggttttactaatgggggggtcttcaagatttcaagaaatggtgtagctgcgaaccttagtggacttcaagtaatgaagtttggcatagccaactcaaagtttttgaagttttttttttagccatctaaagtttcatggcattcaaaaataggcagaagttgtcggagtaaacaaacattctcatttgcaaataaagattcgctcaagtttggtttcccagcccaataaatgaatttccattgatttatattgctttaagctatcactatttattaacacttttggagctatacaatccaagctcttagatggccacaacacccagtttggcgtcggtcttcaggtacgcattctcgccgtaagatccgccgtattggctcttcttgaagactgaaaggtagagaagatacaaaagaaggtaagtctgggtggcaaagcggtgctatgaagtcaatccaaaatcataggataaacaatattatccagttaagaactccatgttgtagcttagtttaggaa

SEQ ID NO: 12593 - DNA, 2686 bp, DROSOPHILA
tcgcacaaaaagcaacggcattagttttctattcaggaagccaggcaaaagatcctgatcccactgaaggttcaaaggctgagctcaagaaaaaattgcgcagttgctgtgattacacaatcaaagtgggttcatagttgaaaatcgaaagaacccattgagaaaactttcgatttgaagagtggctctccagcaagtgatttcgacaaatttgaaaatttatttgcaaagcagcagcaactgccactgctgccaaccgaggagaacccaagaaacccgaagctacagaggcgacaaggcgacacacagaggcggcgacaattgtagctttaattagagtactcttaagaaaacacattaggccattagaccattagaccatcgcaacccccttgagaaatccgcccccccttcacaaagatccccttcctaaaccatggccctagccctaaaacaaagaccttctcgcttccgtccgacgacgacaacgtatgaggataactatgggtacaccatgaacttctaccagcccatgctggactatctggacgccaaggccaagggtctggaggtcaagaagccgcacctgccgtgggtcagcgagaggggactgaagcagtaccgcccctcgaatgcggtgcgacaatataacgccgacgagatcgtccgattgtcgcgcacctgcgccgctcgggccgacgagatattgcttaactttcgggcccagaaacgctcgccgttcagtgtacaaaagttggtcgacgcatcgcgagtgaccaagcaccttgaaccggacacagttgtcgaaagatcgcgccagcgccgccgtcgccgtcaggaggagctcgaggatttgatcaaacgcgacactcttaagatattgcagcgtatccgtaagattgaattggataacgaactcgacaagatgtccgacgatttcaagcgctcgattcgcggcaaatccgccagtgccatcgcccaggcgctgctctccgaatcggagaagaacatcaagacggccaagaaggaggaggaggactatatcgcccaaactttagtgcgctcgagtcgtgcagtttcgcgtgcccgttcgcgttcctcctcccccctcgatggccagtatcgcgcccatgcgctccacatcgagctcatggacgaccggctggtggacaagctggaccatcgcgtctcctcgtcccttcacaatgtgaagcgccaattgtcgacactgaatcagcgcactgtggagttctacgcggacagcagcaagcagacctcgatcgagatcgagcagctcaatgcccgcgtcatcgaggcggagacccggctgaagaccgaggtgacccgcatcaagaagaagctgcagatccagatcaccgagctggagatgtcgctggatgtggccaacaagaccaacatcgatctgcagaaggtgatcaagaagcagtcgctgcagctgaccgaactgcaggcccactacgaggatgtccagcgccagttgcaggccaccttggaccagtatgccgttgcccagcgccgtctggccggtctcaatggcgagctggaggaggtgcgctcgcacctggacagcgccaaccgtgccaagcgcaccgtggagctgcagtacgaggaggctgcctcccgcatcaacgaactgaccaccgccaatgtcagcctcgtctccatcaagtccaagctggagcaggagctctccgtggtcgcctccgactacgaggaggtgtccaaggagctgcgcatcagcgacgagcgctaccagaaggtccaggtggagctcaagcatgtcgtcgagcaggtgcatgaggagcaggagcgcatcgttaagctggagaccatcaagaagtccttggaagtcgaagtcaagaacttgtccatccgcttggaggaggtcgagctgaacgccgtcgccggcagcaagcgcatcatcagcaagctggaagcccgcatccgcgatctggagctggagctggaggaggagaagcgccgccacgccgagaccatcaagattctgcgcaagaaggagcgcaccgtcaaggaggtgctggtgcagtgcgaggaggaccagaagaacctcatcctgctgcaggacgcgctggacaagtccactgccaagatcaacatctaccgccgccagctgtccgagcaggagggtgtctcccagcagaccaccacccgtgtgcgccgcttccagcgcgagctggaggctgccgaggatcgcgccgacaccgccgagtccagcctgaacatcatccgcgccaagcaccgcacattcgtcaccacctcgacggtgcccggatcccaggtgtacatccaggagaccacaaggacgatcaccgaatagagccccacgctccgcaccgagatcatttcattatcaaacgctaaccgaagaaccgaacacaaccaatcccgaacccatgaagaagaccatctggcggagggcagagttcagagtgcaggacgagaacgagaattgcgtgagaaagtttttataatttaaatttttttgtcaaacccccaaaacgccgcggcagcgattagaacccagtggacttcggcgggggctcgtataggctacacactataaatacataacactacacatcctatctatataataataatactattttgaagttcatgtaatttaattaaaataatgaacctg

SEQ ID NO: 12594 - protein, 477 aa, DROSOPHILA
MSDDFKRSIRGKSASAIAQALLSESEKNIKTAKKEEEDYIAQTLVRSSRAVSRARSRSSSPLDGQYRAHALHIELMDDRLVDKLDHRVSSSLHNVKRQLSTLNQRTVEFYADSSKQTSIEIEQLNARVIEAETRLKTEVTRIKKKLQIQITELEMSLDVANKTNIDLQKVIKKQSLQLTELQAHYEDVQRQLQATLDQYAVAQRRLAGLNGELEEVRSHLDSANRAKRTVELQYEEAASRINELTTANVSLVSIKSKLEQELSVVASDYEEVSKELRISDERYQKVQVELKHVVEQVHEEQERIVKLETIKKSLEVEVKNLSIRLEEVELNAVAGSKRIISKLEARIRDLELELEEEKRRHAETIKILRKKERTVKEVLVQCEEDQKNLILLQDALDKSTAKINIYRRQLSEQEGVSQQTTTRVRRFQRELEAAEDRADTAESSLNIIRAKHRTFVTTSTVPGSQVYIQETTRTITE

SEQ ID NO: 12595 - DNA, 3050 bp, DROSOPHILA
ccggccagctgaacgtggtgggcgccgtgggactgggcatcgcctttgtccagctgttcgggctgatcacctcgatgctgctgttctgcacggtgaagcacaagcgggcctcggacacctacaagtcatactccccgtcgattgatcctcagacccgcaccagcagttgggaagattgaacgcgcctgtgacggtggtaggcggacttctaaattggggggttgcagtcggcctcccgaactccctgtcgctatctctattccttttgttaactctcttagtttctaatttattctgcgaaatgtgccaaaaattaatttaattcaaagtgtatttttttttgtttttttgtttgtaatctgtaggcggagacaagtcgaaacaaaattgaactggcagcaaaatgacaaattcgcactgggcacagtgtgaacatgtcatattgctgccggtgaaacaatcacatatttagttagcagtgtatccatattgtgatgtgctctctagtagtatagtataaggcccaaggcccgaaacgcacctggaacagggtatagtgcgttccatacttatcaggctggctgcttagctgcaagagtacctgacacatatatacagctagtgtgagtcggaatccttggacctggatatgcttatgctcgtaacccttcaactaaaccaatatatcaactacaatatatatttatatataattatataatacttatgttactttatggaaatctgtagtattcgaaatagcagaaaccgcaactgcccgaaaagcgcgaggaaagcgagaagagaagagaaaagaaaagaagagaagacgaagtggagaaagagggagcaaatagttaaagcaaatattacattactactatgcgtatgattattttattcatacatacaaatatttatatcgaaatgcattcctaaacaacatgttcgtgttaagttacaaaataaattaaagtatttatttaaattacacgccttctcaaaggcccaccaatttgcctcctatgatatccaattgagccgtgatccccttcgtcacgctgcgcgccaactctttgggcttctgcaagagagaaatggggggaagagagtggtcaagagagggaaagctggcactggaactgaccttgctcaaagcgaagcgcaagcgcacacgacgagcgactaattgcataagcagtgccagcgggtcgtggtactgtcaatctggcttgaaaatagccaagactcaaggacttgcagtaatactgacagctaaggccgtaagttgataggctctttcgtacgcatgtttaaagtattgtttaaattttgtttggctgctgagccggtgcatcgctgggaccattatgcaacgtgtgtgcgaatggattgaccaagaaacagggcaaacaaacaaaccaaacacaatggtcgcaatttcggcactccctcacctgaataaaggtgttgagcaggttggaaaaggcctcgtagccgttgacaatggatcgcgagatgccgtcgaacatgtcaccgttgttgccgtacttctcgtgctcactgatggagtccaaaatgggaacgggctgaaatcaaaactgggtcctagtggctctggtctttggtggatatatatatgtatcacatcacttacctgcgccaaatcggccagcctcttttgactgttgtcgtacacgctcagcaccttcgagggaatggcctcctgctctagattcaccgattccgccgttttagccggagtgggcaggagagagatctgccgaaaaataaggggaagtcacttggatttttaaagtatacctcggttactcaccttgaacccggcgtcgctggcctgcgcgtgggtggattccgcggagctgtcggcggcatcgaaagcatcctgggctccgaagtcggcggccgagacgcgggcgtcgatgggcgtggcgccatcgggcgtggcaggagctatgggcgtggcacagatgcagcgcatcatggccaagagcagcagcagagtattcatcttttgaagttgcagcattttcgttagtatgtgcggagaagggggaaagggcccaactatgtggttttataacaaggtgaaaacttccaaatccaaatcccaggttgagcttcgatccgaagtctctcgagtccaaaattcaactgaatagctgcgtctgcgcaacgattttattggtttaacccgaccacgagagtcgccgctttggacattgagccacgatcgttttggctttagtttgggtttcagttgagcacaggttttcagggggcaatcgggggttagcgcctcgtggagccgctgcatagttatgtgtgattattacgttgcataaaatgcaaactctttcaacgaaaatattttattaaaataatataaatttaataagattgaccacagaagatttaatttgaatgtttaaaattatctgggatatttgattcatttaagtagttcacttagttcactcttgttcaaagctccaaggcttgttcaactttaggaaaactaaaattttatctaatatcttctttatatcgcgagagccgcctaaattttttcctacagtgtagtgtattgatcgttatcgtaatgacaacaacaaatagtcataaaactgtaacaataacaacataggcgaaatctgcaacttgttgctgtcaacaaatgttgccgtcattctgtcgcaacaatgaggaaggaaactcggcttacttggtttactcagttagttggtcaatcggtagcctcatcccccatctactcccgccagtccatcagtaaaacccccgcgacacatatgctggttgtgcaattacgaccacactgaaagaaattcaatacaatgacgtaaacatcgcctgaactaaaacactttttattgataggaaaatgagttttctcgtttgcacggattttttgccagtgaatttgtcaggcaacaacaccaccgccgcccacttttacatttcatgcaactcaatcaattaagagagagagagttactcagcaacaaggc

SEQ ID NO: 12596 - DNA, 552 bp, DROSOPHILA
atgctgcaacttcaaaagatgaatactctgctgctgctcttggccatgatgcgctgcatctgtgccacgcccatagctcctgccacgcccgatggcgccacgcccatcgacgcccgcgtctcggccgccgacttcggagcccaggatgctttcgatgccgccgacagctccgcggaatccacccacgcgcaggccagcgacgccgggttcaagatctctctcctgcccactccggctaaaacggcggaatcggtgaatctagagcaggaggccattccctcgaaggtgctgagcgtgtacgacaacagtcaaaagaggctggccgatttggcgcagcccgttcccattttggactccatcagtgagcacgagaagtacggcaacaacggtgacatgttcgacggcatctcgcgatccattgtcaacggctacgaggccttttccaacctgctcaacacctttattcagaagcccaaagagttggcgcgcagcgtgacgaaggggatcacggctcaattggatatcataggaggcaaattggtgggcctttga

SEQ ID NO: 12597 - protein, 183 aa, DROSOPHILA
MLQLQKMNTLLLLLAMMRCICATPIAPATPDGATPIDARVSAADFGAQDAFDAADSSAESTHAQASDAGFKISLLPTPAKTAESVNLEQEAIPSKVLSVYDNSQKRLADLAQPVPILDSISEHEKYGNNGDMFDGISRSIVNGYEAFSNLLNTFIQKPKELARSVTKGITAQLDIIGGKLVGL

SEQ ID NO: 12598 - DNA, 12044 bp, DROSOPHILA
aaaaaatattaaatcaataaaaaaaacgtgacataaagaatttattaaagtaaatcccttcaaatttaaattccattttaaattatgtcaaccagataactatcaccgacgttttcactctttgaagttcgccttgttctcaataaaaatgcaatgtgtccatataaacgtagcaaaaaacatgctcgcgatttcagttctatttttagaaagtaccgttagctttctagacataacctgttttgtcttgatatgttcggatactttagatgatttgtttacttttcgcaaatctattctgattcttttttttcttaattttggcctttgggtgaaccactatgcattgacgtcccgggtaggctaacgtgtcatgttgtagctgtacaggtaataaagcagcggaccaaggtggagttgcttttagggtggagttgcagatagtatcatgcaattgagcttttttggggttttgtttggcgatgacgttggcaacctcggtgggggtgatcggcaggtccatttggagtgcttgggacagctggtcgtgattcgcgtcaacatcctggggactggtgaggttcagtggctggaatagctccgcgaggtgaacaataaaaaaagatccatccatccaaccatcttttgcgtaaacgcctattctcagttaaaaggagcagaatctctctggtaatcgggattttagctgctgtgggcctatgcagtagtagccagtctggctgcagccttaataataagggtgagagtgtcaacagcttcgtctagttctctttctgagtttatcgccgtactcaggttcagagaggactcaatcatgatcatggaatcgttacaggacagagtgcctaccgattagtcgctccatcttgagataagctgtagctgttgcatctataagcggtaggtggtcggagctgagctcagcaacggaacgtatttcatcgtgcatatccagaatgcccttgctgacagcaaaatctatatagcctggggagcctctactgccgaacgggaatcttgtaggacctccggtggctagggagcttatatctaagcttaggaccagattcgctagctcacgccctcttcgattggatctccccgctccccatagccagtgggatgcagtccagtcgcccgcgacgaggagtttggaacattgttgattcagaatgcatttaaattcgctcgtattccatatgaacctcgtagggcagacgcgagttgctcctcgtcagtggctattggtgtaagaggaaagtggactaggccggatttgaccaggatcgctgcaacacctttggcgttaccgtcgctcaggtcgttggcagtgtaagactcaaatccaaatattttgggtgcctgtgcctccttgcaatgagtctcgctgagcagcagaatatcgatctcgtagcgccgcacaaattcctgctaaaattcacgatgcactatttcgtccatgtgcagccagttgcgtgcaagcctggcgcatgagtatcataaacggaattccgctcaacgtcttatgttaggtggatatactggatgtacactgctctcgattggagccaataagccagcactcctgcagcttcaattggcgttactccatttgcactttgcataggctttcgttgcgctttgcacaaaaaatagtctgcatcacgcgtgtttcggctgttttatactcgggaaccgcattaaagaagaatagtgtcattcacccaaaaatggcattcccttccctgtgttgcgaatactggttttatgccagagttgatagatccccaccaaacctctgttaaagtaataccaaagtagtaataccaagtaataccaaatcttaaccggaccaccacaaatgaatttgtctctcgaatttaaggatctgacgtttattgtattatttaaagcggctgcagcaaataaaatacactgacttacactttcctgtcatatctaatccattgcagccgtgagcacagcatccacaatcgcgcttgatccagttttataaatactatctctaacagcaaaattacacctaagcagaagaaatacctatacagttttggaataatttaataatatagatcagtacctgcagccaatgaaccaactccgagagcgataaaagcgccctgcagcattcgtagattaagcggactgataaccgtgctgtcatagctttcggttcgactgtaagcctcactgtttttcgcctgcacgctgcccttgtatattctcgtggcttctacctcctggtactgctttgcgtattcggcagcggtcatcttatctaggattccgctctcaaacaactgcatcaagctacaaaaatgtttaagatgctgttttttaaaacaataatttagtggactaatattaactatataattagatataacttccccgttcttatattctgtatggcgtattcgtatcccaagttatttgtaaaaaaaaaaacttaattataatgtataatgttgtggtataattgctgactggttggatctcttgctagttttgtaccactctaatttcagagcactattttatttactatctacaatatgtgcctcaatttttggaattattaaaagtgtttatcgcagaagataacacaagcattccacttatttattacggttttagcatgaaaacagatctctttactatgaaaatatgtgttatttgaggtaaacaataacgagcatccttattgttcatggccgtgcgattagatggcttaccatttaaatttttggaaaaatcactttacaatcctgctttcctgcggagctttttaaatgagagcgcacgtaagatatgatttaaaccatcatactccccacaattactcccccgattacgttacgtaaatttggtgggttacgtaatagccgcgcgaactaactagttcactacaatggataatgggccctaatattaaacggcgaggagagattgacgaatgaaatgacgaaatagatgaagatatctacgagtaatcgtccagtgtgaagtaggatgatgaagatcctaagagtaagggataagatataatcaaaattctttacattcacattgggtaccgattttgaagggtaggtccaccaccaaagtgcattgcgttgtgtcttgcaatggatcttttgatgggaccggaggatcccccagttgacaagttacaattgggagagtttgatgcttccgttttgaaggaaataagcaagcgaacaagaaatgttatctgtgcgattaagaaaagagctgtgctgctgctcagaagagaagaagaggaggaaatataaaggctagaaggttgagattcagtatacagattctagagacaaagacgaagtgcaagtttgttgagccatgttgccacgcccactccaaagcccacaaaccgcacaaaactgccactcccacacttttgaaccatttttcaaaattttttcataattttattagctatgtaaattttttatcgatttaaaaaaatgtttgccatgccaattaaaattttcacattattacaagacacttttttaattgcttatctttggtttgaaactgttcacgatctcgtcccgattcagagtaatcttctaaatcttaatcataatccactcaacctcggccagaagcttttctttaggattttcttgaactttgaaatatgtttaagataacagcttctgcaattatttcacagcattgtgaaattcaaatttgctgacttgtgtttactttaggtttggttatttatcgggtggctaagtgttggcgacaaaaacggacaaagggaatgctgctgagattaaagtttgaaatttgtttatcaactggggcagagttctatatttacgggttagataaattgcccactctaacgcccttaaaccgtacaaaactgccacgcccacaaatttgaatcatttttcgaattttttttcataattttattagtattgtaaatttcaattgatttgccaaaaaacgttttgccacgcccactcaaacgcccttaagacgccgaaccggtcacgcccattttctcataaatgatgaaatttcgcgttcgcattcacactggctgaattacgggtcggggaactcgatatattctcatattctctcttgtttgtggaatatgccagcaccctttttggtgattctgagtttttctcggtttcgagagttcaagcgacattctttcatggactttctacgcataaggatccctgacccgttggaactattaagatgatttaaaaaggatagatatggaaatttatggggaactgtgatggaaactttcctaataccctacattgcactctagggtagccaaatagtttgtgttgcgtgtgttgtccaatgtgtttattcactgtgcacttttggtctggcggtcacgagttaaaagaatagggccaagaaaaaattcttaatctctcaagaaattttgcaagaccgtacccgtgagcttaaaaaaaaccattcgaattgagggataagtccgataatttagagctgggcttactaagtggtgaatgttacaaaaaacttaatccgaacccatatgtaatatcggagatttaaagctagaaaggcgtatactttaagggttaaattcatattggataaatatatttgataattatagtagatatagtttaaatcaagcgttctacacctagttctgattttaggaaccgatcaacatcattctcaaagaagtctactgatctgtgcaggcttcaaaccgttgtgacttccggtatttccccgctgagccctgcaaactccatcctcgctcccacacttatggattgtgtgaattatgttatgttcctacaatttcgttctgcgaggtgacttctttataacgcccatctgcacataaatactagtgagtacgatccatcgcagcctgcaacctgccaggtcttcgctagtaaaaccagcagtggcgccgatgtccatcgtggtcttggtggccttcattccttctatgagcaatggcggaaagttgaggagcagcaatttgcgaaccctgcttgcccatttgaggctgttcgaaaaacgttccttttgggtgtccagcttttcgaattcgtcggccaacgtcatcagggcaagaagaagatctagcatattctggaggcttgcttcagaagattgccacgcccatttaaacgctcccaattttcccctagattgtttagcacaatttttttttgataaaaaccagagagaatgatatagtagagtttggcaactatcagatacctgtaactcaactaatgaaagtgcgaacgcgaaattgtattatttttctagcatatcgatagatataagaaataaaatgagaataaatttaaaaattgtttgaaggtgtaggcgcgacagttttgggcggtttgtgggcgtgtgtgccgaaaagttttttgcaaatccataaaaatttaccaaactaataaaaactaattagttcctgagatcgaggcggacgaacggacatgtccagatcgattcggctattgatcctgatcagaaatatatatactttatttggtcggaaaagctttattttacctgttacatacttttcaaccaatatggtataccctttaaatctacgagtaacgggtataaaaactttgacacatttcacaagccgcggatatcttgcagaacaagcttgttcatgcattacaagacgataacgatacagcactaagtgatgacgggttgaaaaaacttcgactagatgcaaagcaaaacgataatataatgccaaaaataagccaccgactatgtatgtatatgtcattatataatttttgtgggacatgagcctgccgccactattaataaaaagtatgttcattgttgaataagatttcgatcggcattaacgcgccacgcctaaaaaccatgacacacatagcatcctcttcaaaaaaaaaaaaacataaaaaatgtttgaaaatttaaatattaaaaaaaaatgtcttttacgtacatatgtatatacgaaggttgaagacaaaaaatgttattcttcctagcgcaaacaatgtcggacatttagtgtcctcctacttacaaagaaagcaactgtagaggagagatccctggtcagttccaaatgtatcaaattgctgtgaggcaaataaaagcacaaacattgaactgcaaaggagcgttattgcgcgcttcagacttgtggctttcgatatgatctttggatagttccgccatactgtggtcaaaagcgaaaacgttgtgcacaatttccaaagttgggatgctcacaacacttaactcttagaaatgaaatgaaaaaatggacaaagtaaaaaaactgaagaaaagagcaaagacaaaattatcaacatttaaaacgaagtcttcacagctgaatcccatacacctcttattccgattggaaattttgatattccaagataatttttccccagatgatattgggtataaatgtcaaaggaaaggaacaattccaggtcgcaacctttttaaatataatagttgcaataatgatgaaattgattttagtgctgtcagattgccgctcacagtcctctgttgaattttgtcgccagtgatataaaaacacgaaaacattaaaagtgttaaaaaaaaatatttgtctcataaaaaattttcggatgaaggagaaactcgaattaaaccagagcgcggcatttaacaaaaccataaaaaatttaaataatagtcagggcatacatttttaaataatattttataagatcataatgcaacgaatttggccaaacctctatatatgtaaattcgtacgcacacatatacaccagtgcattccgctttaagatttgtacgccagcggagagaaaggaattttgcaagaccaacgtatagcagttacgcatattgtgtttctaatgtctttgccacattcctgtcacacggagctacgctggtatagagttcgcctgttcatacctgttgacacacccatccatcggaggtgatttttgggacatcatgccgctgagtggccggtggcccacctgttgttccacacctttcgacggtgacatggcgtaaggtggtttgatcattccaccgggtcctattcgtggcaatcctggagatgggacgcagccgtgggatgcctgttgccgctgtggttgtggctattggtgctgatgggccggcatgccggccatcatattctgctggcctggttcctaggagcttattccgtagtcctacgctcttcggtaagacactggcatcctgcccctgaccctgaagtatttagaatttcgtgttggtcggtggaccaatgttgatttcctcaaactcaagttctacgagctcattgagaatttttctaaatgtttgttgaagcacttggatcagctccaaccttacatgaagaacgaagtcgttaaaggaaactaacgcaaaacttgacaaagaatccgctaatcgtcccacttgattataaattgtagttacctagcgctttaaaaatggcaccctgtttgcatcagcagtaacatttccagaattctcagcagtcatgacaaaagcaacaacaactagctattttgagaaatgaaaaacgtttcaaatcacataagagatttgatgattttaaacgataatttgttggttttagcgagcgagaatttgcttcgatgcgtatatgcgtaggtaacgaaagcgaatgataatgagcgccttaattgcagcgcgcaaatcagaacgctaacccaaaggtatagtgcgcgagtccaagagaaagcttgataggagagagcttagataacgaaagataatgtcacagccgtcacagttggcaaacgaataataaatttaggaattgctagcggctgcgtgatccgacaatattacttctttgaattttattttaaatttgagtttttttttgttatttgaaagcggaaaaggtggaagcagaatttttaacagattttggcggttttagggcgttacagtgggagtggcaaatttgctaatttgcaatagaaatctacaagactaacaaaaatgtgaaaaaatatcaacacgtttttcaaaaatgtgggcgtggcagtttcgtgcggtttttgggcgttagagtggggcgtggcaacatgggtcaacaaacttgcgctgcgtccttttctctagaatctgtatactgaatctcagccttctaccttttatggttcctgagatctcgacattcatacggagacggagacagacggacatggccagatcgactcggctattgatcctaaagaagaatatatgtacatgttaactttatatggtcggaaacgatttcttctgcctgttacttattttcaactagtatcgggtataaaaaaatagtgacattcttttggataccattgagtcttgggatagtgttggccgttcttcaatttagatagcgtataatgcaaaaagccgtacgattttcgttacgatggagaaaaatataatcactttacgacgacgttattatgaaatactttcagatatattatttgaaattcatttacttacacattattgaggctacctagaaagggacatccgatttgaacagccacagccgaataacgagtgtaaagtttttgactgagctgaaagttgtttgatccgtattgctgaacgttgaaaaacagtgtttcacgccctccgagtactgccttgtcctcgccgccctctgcaattagtttaattcccgcttccacagagtcaataaaaaatccttgagggtcattgatcacctgctgcctcatcagagcataaagctgacgaaacagttctgtcccattctccaacatctccaatgaactgctttccttctccacatatagccggtaaccgtcatgaatcatcgctgcttgcaggcgctgaagagtattgattggtggctcgcgagctggacgtgcaaattggctggtcagttgagctgaatatacatcggccaaaacataggtcgctgctatccaatacactatggtcaaaaacttggctcggtatccgttatgtagttcattgcatgctgtaaaaatcaaaacatgtttaaaagtcatttaaagtttgaatacgttcttcttagctgatactcccaaaatattacgaaaaatttgttcaaatattctagtcgagttcagcagtttttaaattgattaatttttaacattcctgtgcataatatctatctttatcttttatgctattctattctatattctatttatataatataatattctagttattctagtgtctttggtccagtaatcaaagtccaagatatttattttttctccacaagctgtcctggaagccagaaagccaaagctttcctttgggccaagattcagaatagactaagccagggtactaaggtgcttcgtgacggaccataaatgaaactttgttcaacgatttatttcttggtgctccggccattcaaaaagatctacagtatatcatcgccgcagatgtcactaaaatgaccgcaaatgcccccaaatgcagttttgaatatcaagtaacaagtaaacttatggaaaaaactataaaagtggcaattacagtgtctttaacgcggctgatcgcaggtcctcacgtcgaataccttgtattttcggtcgaggagaaattaatctggagaaaccagaccactatagtcattactatcttgatttgcgtaaaggggaccaaattctggttcgctttcacagtcgggttggaggtgttatggcatggtaatggtttccgtaaaaacatggattcaatgcgaaaatgttaaagttctggaatggccaccatactcccaggaccttaatacaacagaaaacgtgtgggtatggttgggtgggaaggtatacgagggtggtaaacaatataccactcaagaggaatcgatcaccggaataaaactcggttggtctacgattactttggattatctacaaaaaatatatgattcacatcccagacgaatgtgtgaagtccttggaaacaaaggaggatcaactcattattaattctctataaaaatattctaattaaaatatttaagttttaatcatctaattttttttcgaaatgaatcgaaaaaacttaaattatctgatgacgcaattttgacttacccatttattgattgtttttcttttttattgaaataaaaatctatagacaacaaactgcatcctatatacactttttatttatagagatgttcaacttttgagggaaaaaaatttccatagctctcgctcgaaccgttttccaaatatctcatatccaaaatttttgctcagggggcgctaacctacatcagtttaacaacatattctgcatctagataccgcttgagaacaaacttaaattagagggctaagagttaagaacaataatgttaagattagaacaataaatcccaatatttaagctacacctgtaagcttgccgtatgttaaatttgtaaaattatttcgactgagtatattatatattgtagatggcaaagaaactgtcaaaatattaattttaaaaaattaaatgttctgactcggaacacacctgtttttaaaattacggataacgcatcctttcctacgtggctgatggattcaaagcggagtacttaggaatgtaggtgaacctggatgtataaatgcaaaaagcttttgtatatgtgtagtgtcgtggtggaattcacaagagttgaaattcacgagatctgttgggaaatagcgatcataccgaggtgcaaacgattctggttgtgcgtacataggaaggaaaactgtcaacggaaaggaacgatcatttttggagaagatggttaagatagcggagctcaaggcagtagttgcgtttctgctaagagacaggaacttgggagttgcaggcttcagagcagaactattgcagagactagtggaacaagtgagttctgaaaaagtggacttgccagaagcagtttgaattatgagccaacacgaggaatcattcgcagccaggcggttgcgatttcacaactacaacagtagatgacaaatatgttagcgcagtttgtcagcaatatgccaacagctaatcggcagcagcaaaggaagatgagattgatatagacgagtttgtcaaacgtaacccaggagatcaagcgccgatcagccatggtaaataagcgtcggttaagagtattgcgaataccttacttataaccccggagatgagaatttgatcgccgtaaatcagttgatcgccgttgtcaacaaagtcgtagatgcgtattaaagctacgaaaaatgtgtaatttttgcaatgtatacgcaaagctgaagggtcctttcaaagtgtggcttgattcttggcagattttacacacaacatgaaacagttttacagcagcaatccgatagaaattcggaccagagcctgacgaggtataaatccattgtaaatgcaaccagaagatcgaaggaaaccgtaaaggagtattgtttccgtatgtctacaggtatacagcacagagagttgcaaaacaatactgcagccattaatttttcgtcgatgaaggagtttcgcgacgctaccgagtcatattttataaacagagggaggcacaatacaaataaggagtttttacccaaactcaatacttttgaggtaaggctaaaaaattatatgaaccaatcaaagccaagagaagctaggtttcttgccaccgatgaaatatgccaagccgcacaggtgatgcgtttgggcacatccaatcaggataagctgttcacacggatgatctacatcaacgataacggctataacgctttcattgatactggaaggtataattcgcaaatcagtataatcagtaaaattcgcaaatcgattgcggacgagatcgacaggagtgcctcataaaaatagtaggcatatgtggaggttcacgt

SEQ ID NO: 12599 - DNA, 2084 bp, DROSOPHILA
aactcacttgttccactagtctctgcaatagttctgctctgaagcctgcaactcccaagttcctgtctcttagcagaaacgcaactactgccttgagctccgctatcttaaccatcttctccaaaaatgatcgttcctttccgttgacagttttccttcctatgtacgcacaaccagaatcgtttgcacctcggtatgatcgctatttcccaacagatctcgtgaatttcaactcttgtgaattccaccacgacactacacatatacaaaagctttttgcatttatacatccagcatgcaatgaactacataacggataccgagccaagtttttgaccatagtgtattggatagcagcgacctatgttttggccgatgtatattcagctcaactgaccagccaatttgcacgtccagctcgcgagccaccaatcaatactcttcagcgcctgcaagcagcgatgattcatgacggttaccggctatatgtggagaaggaaagcagttcattggagatgttggagaatgggacagaactgtttcgtcagctttatgctctgatgaggcagcaggtgatcaatgaccctcaaggattttttattgactctgtggaagcgggaattaaactaattgcagagggcggcgaggacaaggcagtactcggagggcgtgaaacactgtttttcaacgttcagcaatacggatcaaacaactttcagctcagtcaaaaactttacactcgttattcggctgtggctgttcaaatcggatgtccctttctaggattgccacgaataggacccggtggaatgatcaaaccaccttacgccatgtcaccgtcgaaaggtgtggaacaacaggtgggccaccggccactcagcggcatgatgtcccaaaaatcacctccgatggatgggtgtgtcaacagcttgatgcagttgtttgagagcggaatcctagataagatgaccgctgccgaatacgcaaagcagtaccaggaggtagaagccacgagaatatacaagggcagcgtgcaggcgaaaaacagtgaggcttacagtcgaaccgaaagctatgacagcacggttatcagtccgcttaatctacgaatgctgcagggcgcttttatcgctctcggagttggttcattggctgcagccgctttaaataatacaataaacgtcagatccttaaattcgagagacaaattcatttgtggtggtccggttaagatttggtattacttggtattactactttggtattactttaacagaggtttggaatttgtgcggcgctacgagatcgatattctgctgctcagcgagactcattgcaaggaggcacaggcacccaaaatatttggatttgagtcttacactgccaacgacctgagcgacggtaacgccaaaggtgttgcagcgatcctggtcaaatccggcctagtccactttcctcttacaccaatagccactgacgaggagcaactcgcgtctgccctacgagatataagctccctagccaccggaggtcctacaagattcccgttcggcagtagaggctccccaggctatatagattttgctgtcagcaagggcattctggatatgcacgatgaaatacgttccgttgctgagctcagctccgaccacctaccgcttatagatgcaacagctacagcttatctcaagatggagcgactaatcgatggttggatggatggatctttttttattgttcacctcgcggagctattccagccactgaacctcaccagtccccaggatgttgacgcgaatcacgaccagctgtcccaagcactccaaatggacctgccgatcacccccaccgaggttgccaacgtcatcgccaaacaaaaccccaaaaaagctcaattgcatgatactatctgcaactccaccctaaaagcaactccaccttggtccgctgctttattacctgtacagctacaacatgacacgttagcctacccgggacgtcaatgcatagtggttcacccaaaggccaaaattaagaaaaaaaagaatcagaatagatttgcgaaaagtaaacaaatcatctaa

SEQ ID NO: 12600 - protein, 640 aa, DROSOPHILA
MYAQPESFAPRYDRYFPTDLVNFNSCEFHHDTTHIQKLFAFIHPACNELHNGYRAKFLTIVYWIAATYVLADVYSAQLTSQFARPAREPPINTLQRLQAAMIHDGYRLYVEKESSSLEMLENGTELFRQLYALMRQQVINDPQGFFIDSVEAGIKLIAEGGEDKAVLGGRETLFFNVQQYGSNNFQLSQKLYTRYSAVAVQIGCPFLGLPRIGPGGMIKPPYAMSPSKGVEQQVGHRPLSGMMSQKSPPMDGCVNSLMQLFESGILDKMTAAEYAKQYQEVEATRIYKGSVQAKNSEAYSRTESYDSTVISPLNLRMLQGAFIALGVGSLAAAALNNTINVRSLNSRDKFICGGPVKIWYYLVLLLWYYFNRGLEFVRRYEIDILLLSETHCKEAQAPKIFGFESYTANDLSDGNAKGVAAILVKSGLVHFPLTPIATDEEQLASALRDISSLATGGPTRFPFGSRGSPGYIDFAVSKGILDMHDEIRSVAELSSDHLPLIDATATAYLKMERLIDGWMDGSFFIVHLAELFQPLNLTSPQDVDANHDQLSQALQMDLPITPTEVANVIAKQNPKKAQLHDTICNSTLKATPPWSAALLPVQLQHDTLAYPGRQCIVVHPKAKIKKKKNQNRFAKSKQII

SEQ ID NO: 12601 - DNA, 8747 bp, DROSOPHILA
cctcccattagaaattcatagggaagacgtatggcgtatttcgttatatctttctaatcgtgaaagtcatccgaattgataaatatatatacttttgtatttacactaacatattttttataaatgggtagcatcgttaggcgtattgaaaagaaaaagtttcgcttaactttttttgggttttccactgacagccaaataataataatcgcagtagccgaaataaagctctttaaaaagttaattagagagttgctgctcttaaatttaacgcggtggttgttgttaattgtgtactttctgttgcatgcagttcataatttgttcaaaacttcgagcggccactttgtttgaaaggactttcgaaaaggggaaaagttttttttcctgtttcgatttatttctgggacagaaacgatttttggagccactcgagaccgaaagtccaaaagcctagccattttttttaattgtaacctaaacatttttccaagtgtcctaatacgtcgattatttaaacatttcatcaaaaacattacgctttctatttaattatattttgataaacagttgtttaattgatttttgtcaagttcgctttgcagtgaattcttaatcttaatcaaagcaacagtaataacaacttaagcgattaccgtggacataatatatggattatatatatggatataatacatatatattcgattaacttcaaaacaatgcttacaaacccatgaagaacttattccaaaccctttttataaacctttaatatgtattattggtttgatctctaaagcttagaactaaataaatatgcactcatttttaaaaactatgcaaaaacaatggacttcggcaaaaataaaaattaacgttatacacatttttaaattttgcgcactgctggagttgccagtcctaaaaaacaaacttctgacatatatggccacactgtcggcaaatgtcgatagacgccacgacctatcgatagctggacagtgtcatctctaacatttacgacgtgttgaccgggaaaaaatcaaaagaagccagcaattgcttttaaaccacgaaccgctgaacaagtacggagtttgtaaaatacttaatattagctaagtccgtgcgagcgtagccaaacaaggaaactaattccaacgctgccgtgacacaaacttccgtacgaaattgaaagtcaaatgaattctgtacaaaactgtgtgtgtgcgtgtaattcaagcgtcaatttgtcgatgataaaatttgcctgcgcctaatgtacacatgtctgcgtcttcgttgagcatatgagcctgtgaatgtgtgcgtatcggtgtgagcgtcgagcataagaaagcagcacaaaacaacaacaacggcagcagcagtaacaacaacagcaagaaggcaacgacgctaagagaaagagagaaggaagggaagagcagagcataatcggactccattttacaaggcgaaaaaaggagtaggaaagagcgcaccatggccagtttccagatccaccaagacatgagcaacaaggagaatccgggcattaagattccggccggagtgaagaacaccaagcagccgctggccgtaattgggggaaaagcggagaaaaatgcgcttgcgccgcgggccaatttcgccgtgctcaatggcaacaacaatgtgccgcgtccggccgggaaagttgtaagtaccgttgccgatttcccgtacatccagtgcctaattccaatgcagctgcctttttatatttttatggtggtgggatcgtcacaccactgcgaccgtgcgcatgtgtgagatctcctagtggtggtggtggttttctctcccttacctctcccctaccatcccatccttttcacttctccatcttacgttactctcttcttagaacgaccaatgcacttacttgcgcctaacctagaaccttaactaacctagaaaaagacacaggccttgcaattacgcgcctttttgatgatttgcaacaacaaagcgaagcaaggagggcaaaagcaattgcgacatgcaacgcacacatgcgtataggtgcacacatacacacacacacgagcaatacgggaagccagggaaaggcgcgcaacttaaagttggatcgatttatggggggggataatcattttatttcttttttgcttactatattaaggatgcatatgtaaaaggaattatctttgtgtttttacttttataatcccactgcaatattacctaatataaaattattacctaatatagtaagttgaccatattgttgaatttgtcttcttcgtcttctgttccttccagcaggtcttccgtgacgtcagaaatcttaatgttgatgagaatgtggagtacggcgccaagaaatcgaatgtggtgcccgtggtggagcaattcaagaccttctccgtgtatgaggacaacaacgatacccaggttgcgccatccggcaaatccctggcctccctagtcgacaaagagaaccatgacgtgaaattgtaagtttccatctgtcacttggtaagccgcaaacaaacttttgtttgttttttttttcactccattcagcggtgctgggcagaaggagctggtagactacgatctggattcaacacccatgtccgtgacggatgttcagtcccccatgtccgtggaccgctccattctcggtgtcatacagtccagtgatatcagcgtgggcactgaaacgggagtctcgccaactggaagagtcaaggagcttccgccgcgcaacgatcgccagcggttcctggaagtggttcagtaccagatggacattctggaatatttccgggagagcgaggtaagctaaaccagggacataaacataggcttcaatatgatattattagatgacttcctcacaaaaatatttcaaactcacaaactcgctttcatcgcgtaatcattgtcaaagacaatgatattttttaactagtaactgaagtggacaacttttatcaggtcgagttttccttgattatcttccagggtattgcagtcatgttttctggcataaatttggaattttttcccaaggtatcttgcgttttcaatgtgttactacttacttggccatgtgcattgtacttttctgtgcagacgcaggcagacgtaatttcttaggggaagtcggaccctgtcgcaccctccgttggcattcccttcacgcaacgctgcctctttatgggttcatgggtacacttattcccgctcgcgggcacatgtttgttgggcgggaagcgaaacgcttgtctgtctgcgtccgtctcatcctttgtcgttgttgttgactctctttttctcattcgtccaaagtcgtagaacactcggggtaccaatggaattcgacttgcagagggaggttgactactattgtagtttgtttcctacgttagtaaataaaagattaaaaattaaaataagtttaaaaactaaaaaaaaaattaaaaccaaaaaagttttaaaattgataaagaatttaaaaaactagaaaaccaaaacaaataaaaaaaatttaaaaatattttaaaatcgatagttaaattacaaaactcgaaaacaacattaaataatacaaaacaacaacacaaggattaggttttgtccagaatgggcgtattctttattttcccttgatatttcagtttttactagagatgggtttttgtctttttttttttttaaatttttaaatatttgaaatgctttgtttccaacatgaacattataatttcgtcgtgaagattcccaacaaagattgtatttttaaaatagtacaatgttctggacgcctatggaaagttgctgcacaagaaagtgaggcagctttctaatcgcatccagctcattattctcgaatcgtcttggttgggaacttcaatacaatcccactaacgtgagttcttgttgaactgatcgtaaaagtcatcggagacggcattggttaggcccacaagggcttccttgcgctggcgatcctgctccacggccaacttggaattcgcccgcatcagctcatcgaattccgccttacgtcggcgatcatcctcgatttggtgaaggaccagggtgcggtccatattaatggagtattgctcccactgtttgtccatcatctgggcctccgtcttgcgctgaatagacaaacgaagctgctgatcttgtccaagacgaaacacgcgaagttcttcgggcgtcatgccgcgatacatgaaggcaatcttcttgttcggatcggtgcgcgattgagccacatccggattttcagttagcatatcgctggagagcatgttatagatctcggccatgtcatcctcgtacttttcacgcttttccctttcgcggtccaattgcttctgcttggccatgttgatattgaactgacgcactcgctggatgacttggttgcgcatctggtgatcagacttggccatctcctgcagatgcttgtctctgcaaccaacgttgtccatcaacacattatcggcctgcttgcgagcatcctccgccctcttacgctcctgcacttgctgatccagccaggctctttgctgctcccgctgccgctgctttctgtcagagttatagaggtcctcgccttgaaagatctgggcactggacacgcccagcgaaatgtcattgtcggcgactcttgttggacgtgccttcttcaagaaattcggatcatttaggtcgaattcgcggcgctgctccttgcgctgatagcggcagcgataatagttaagatccgagtccaccacacgctgttttttctccaactccatttcctgggccaggatcagacgcttctgcagctgctcctgttcttcaaatttcttgtcgcactccatctgggcggttcgctgcttctttttctcaagtatttggcgatccagcatttctaggtcgagctgtgaataggaatattcggcaatgaagctcacccagtctgcagatgcatacttaccccgtaaagacgctgtttggcattaaaaatgcgccgcttccgctcatcttcgtactgctcccgcttctgcagcttcatcgcctcgtcgagatcctgcttggtgcatataccgattttgagcgtcattgtgccggagttagttataaaagatgttcaactgtattcgaggtcgatatgtctgtctcttcttgttagtaggatgtggatatatgcctgagttgactttgtttgcccggttgctgggtgctttgtttattgtttgcctctactactacctctgtaacctactagttacagactatttacatatatctataataatttcatgggagttaactgccttaatataaaacaaatgctgatgtatgtacatatattcatgtcaatcgaattctttaatttttgcagctcgagtcgcttgacggttccaataatcgttaaagcgaccataaaataatcacctaatgtacatattgcccatatatatgtacatatatgtaggtgtttggcaaagaaatttaagttcgaactgggaatttcgatgcgactcacgtactacgaaataaccaataaataaataaaaatcggttaactccctcccccagctgttgtttgccacttctcctatggtatttatacgcttgatttgatgactgtacggctttttctcccgtgaaatttgtacatttttgacaccttcttaagatgaaactgggaacgggtagttggttgccagattagagtgtagaaaaggcataagctatatatatgcgaatcctaacctaaagtattaaaagtttggcttagtaatttttgttaggccgggtaatctaatcggtttctaatcatttgtttgcatgtgtttgcatcttccagaagaaacatcgccccaagccactctatatgcgcagacagaaggacattagccacaatatgcgctccatccttattgattggctggttgaggtttccgaggagtacaaactggacacggagacgctctatctctcggtcttttatctagatcgatttttgagccaaatggcggtggtgcgctccaagttacagctggtgggcacggcagctatgtatattgccgcgtaagtattcttgatagtccggtaataatggtgtgtgtattcatggggtttatttttttatttttcagaaaatacgaggaaatctatcccccagaggtcggtgagtttgtcttcctcaccgacgacagttacaccaaggcgcaggtgctacgcatggagcaggttatcttgaagattctctccttcgatctgtgcacaccgactgcttacgtcttcatcaacacctatgctgtactttgcgacatgcctgagaagctgaagtacatgacgctggtaagctattgccaatacaaaagaaaaaagaaacaaagccgaaacttaacttaatgtttacctgacacagtatatttccgagttgtcgctcatggagggagaaacgtacttgcaatatttgccatcacttatgtcatccgcttcagtcgcactggcgcgtcacattttgggcatggagatgtggacgccaaggctggaggagatcacgacttacaagctggaggacctaaaaacggttgtgttgcatctgtgtcacacccacaaaacggcaaaggagctcaacacgcaggccatgcgggaaaagtacaatagagacacgtaagtcgcaaacactagatagccgaagaatgagcccgtgttgaccaaatgtatttcttaacagttacaagaaggtggctatgatggaatccgttgagatgagcaaggacgacttcgatcagctctgtgaggcttacaattgcaagcagaaagaggatgagcaccagcagccggatattaatactaaatcgaacgtgaatttgttttataagttttaagtgttttgagccgctgtcatggccaaattgtatattagtttagtgtttccatgtaacattatgtagttttagttataagtgtacacaatggatcaattgcagttcggtcgcagtcagccagtcgtataaaagcttcgcattggttggccgattgacaagctcccgttgcaagtgccggacaattttatatgtaagccatataaaagatagttgccaaaatatacgcgcttaacaacattcgcgtctgtccacggtgagagcttgtcatgccaagcgggagcagtaagaacttcggcagtcttaaaaactatccgattagccaattgaaattggaggaagccaccggacacaacatattagtgctgcttatgctaacgatattttatatttcaacctctttatgttaagtatgtatgttttcgtgtttataaattgaaccatactaacgtatacaatgtgtctaaagcagaaacagctagcttcgagaattattttaccatatttatatattactatttactccgtaaatgttctgtgaactccaaaacaaatatatacacaattttaacaaaagacaccaaccgcccagccaggacggaataaaaaactcacactgatcgtgctcagaacggcaggcagccgtggaatgttgctaaactcttgttcttgtaatcttgtaatcttatacgcttactaaatgtttactaaacttagtctagaccatcttgcgaccacatatgtagctagaatagagcgctgccgaaatgcgtacagccagatgatgggtcttactttacacttaggtttatgctaactaatccatttagtttgataattccattgaccatcgcatcgagtgttttgtgctcgccagccgaatattacctaaatatccaatattaagaattcaataaaactttgaaagatgcaagcaaaagaggtggttgtacttgtaccattatttgtgtgtcacgtcgttgggtcaaacaaaataaataaataaacccagaagtaatattcgttatttcaattgtatacattacatttttgaaagaattattaaccatagccgctctaaccatttgattttttatagctgcgtcacaagtacatgcgggagctggccaagggagactccgattggcaaagaatggtggagatgcggtttttggctccgtacctgtgccacaagtaagggagtctgagtggtcattattattattagaaaaccttctagctcttatagtttctgagatctcgacgtggacatggttagatcaactcggctattgatcctgaccaataatatatgtatatactttatcggaaacacttccttcttagatagattacttttcaaggaatctattatgtgtatccttttactctacgaggcacgggaattttatatctcggaatttaggcaacgcgcgagctccccagtggaggtgcatgagctgactgctgcgtttgaagagataagcatggtgcccccaggcagcccaattaatcaaccgattgactcgaatcccctgccagtggaccatataagccccgctacgtcgttccaggaatgcctgagggcgacttttcgcttcttgcagagcacggtgtataagaaagagttggattcggccttgctgggtttggaacaacaatatatactgagattaggaaaaagcgcaaaacaacaacaacagcagcagcaacaacaacagcaaggaggcaacgaaatttcatgatttttgtgggatatcaatagatattggttcccaataattgaagtataaaataagacaaaatccttaaattgttaatttt

SEQ ID NO: 12602 - DNA, 2803 bp, DROSOPHILA
gacagtgtcatctctaacatttacgacgtgttgaccgggaaaaaatcaaaagaagccagcaattgcttttaaaccacgaaccgctgaacaagtacggagtttgtaaaatacttaatattagctaagtccgtgcgagcgtagccaaacaaggaaactaattccaacgctgccgtgacacaaacttccgtacgaaattgaaagtcaaatgaattctgtacaaaactgtgtgtgtgcgtgtaattcaagcgtcaatttgtcgatgataaaatttgcctgcgcctaatgtacacatgtctgcgtcttcgttgagcatatgagcctgtgaatgtgtgcgtatcggtgtgagcgtcgagcataagaaagcagcacaaaacaacaacaacggcagcagcagtaacaacaacagcaagaaggcaacgacgctaagagaaagagagaaggaagggaagagcagagcataatcggactccattttacaaggcgaaaaaaggagtaggaaagagcgcaccatggccagtttccagatccaccaagacatgagcaacaaggagaatccgggcattaagattccggccggagtgaagaacaccaagcagccgctggccgtaattgggggaaaagcggagaaaaatgcgcttgcgccgcgggccaatttcgccgtgctcaatggcaacaacaatgtgccgcgtccggccgggaaagttgtcttccgtgacgtcagaaatcttaatgttgatgagaatgtggagtacggcgccaagaaatcgaatgtggtgcccgtggtggagcaattcaagaccttctccgtgtatgaggacaacaacgatacccaggttgcgccatccggcaaatccctggcctccctagtcgacaaagagaaccatgacgtgaaattcggtgctgggcagaaggagctggtagactacgatctggattcaacacccatgtccgtgacggatgttcagtcccccatgtccgtggaccgctccattctcggtgtcatacagtccagtgatatcagcgtgggcactgaaacgggagtctcgccaactggaagagtcaaggagcttccgccgcgcaacgatcgccagcggttcctggaagtggttcagtaccagatggacattctggaatatttccgggagagcgagaagaaacatcgccccaagccactctatatgcgcagacagaaggacattagccacaatatgcgctccatccttattgattggctggttgaggtttccgaggagtacaaactggacacggagacgctctatctctcggtcttttatctagatcgatttttgagccaaatggcggtggtgcgctccaagttacagctggtgggcacggcagctatgtatattgccgcaaaatacgaggaaatctatcccccagaggtcggtgagtttgtcttcctcaccgacgacagttacaccaaggcgcaggtgctacgcatggagcaggttatcttgaagattctctccttcgatctgtgcacaccgactgcttacgtcttcatcaacacctatgctgtactttgcgacatgcctgagaagctgaagtacatgacgctgtatatttccgagttgtcgctcatggagggagaaacgtacttgcaatatttgccatcacttatgtcatccgcttcagtcgcactggcgcgtcacattttgggcatggagatgtggacgccaaggctggaggagatcacgacttacaagctggaggacctaaaaacggttgtgttgcatctgtgtcacacccacaaaacggcaaaggagctcaacacgcaggccatgcgggaaaagtacaatagagacacttacaagaaggtggctatgatggaatccgttgagatgagcaaggacgacttcgatcagctctgtgaggcttacaattgcaagcagaaagaggatgagcaccagcagccggatattaatactaaatcgaacgtgaatttgttttataagttttaagtgttttgagccgctgtcatggccaaattgtatattagtttagtgtttccatgtaacattatgtagttttagttataagtgtacacaatggatcaattgcagttcggtcgcagtcagccagtcgtataaaagcttcgcattggttggccgattgacaagctcccgttgcaagtgccggacaattttatatgtaagccatataaaagatagttgccaaaatatacgcgcttaacaacattcgcgtctgtccacggtgagagcttgtcatgccaagcgggagcagtaagaacttcggcagtcttaaaaactatccgattagccaattgaaattggaggaagccaccggacacaacatattagtgctgcttatgctaacgatattttatatttcaacctctttatgttaagtatgtatgttttcgtgtttataaattgaaccatactaacgtatacaatgtgtctaaagcagaaacagctagcttcgagaattattttaccatatttatatattactatttactccgtaaatgttctgtgaactccaaaacaaatatatacacaattttaacaaaagacaccaaccgcccagccaggacggaataaaaaactcacactgatcgtgctcagaacggcaggcagccgtggaatgttgctaaactcttgttcttgtaatcttgtaatcttatacgcttactaaatgtttactaaacttagtctagaccatcttgcgaccacatatgtagctagaatagagcgctgccgaaatgcgtacagccagatgatgggtcttactttacacttaggtttatgctaactaatcc

SEQ ID NO: 12603 - protein, 490 aa, DROSOPHILA
MASFQIHQDMSNKENPGIKIPAGVKNTKQPLAVIGGKAEKNALAPRANFAVLNGNNNVPRPAGKVVFRDVRNLNVDENVEYGAKKSNVVPVVEQFKTFSVYEDNNDTQVAPSGKSLASLVDKENHDVKFGAGQKELVDYDLDSTPMSVTDVQSPMSVDRSILGVIQSSDISVGTETGVSPTGRVKELPPRNDRQRFLEVVQYQMDILEYFRESEKKHRPKPLYMRRQKDISHNMRSILIDWLVEVSEEYKLDTETLYLSVFYLDRFLSQMAVVRSKLQLVGTAAMYIAAKYEEIYPPEVGEFVFLTDDSYTKAQVLRMEQVILKILSFDLCTPTAYVFINTYAVLCDMPEKLKYMTLYISELSLMEGETYLQYLPSLMSSASVALARHILGMEMWTPRLEEITTYKLEDLKTVVLHLCHTHKTAKELNTQAMREKYNRDTYKKVAMMESVEMSKDDFDQLCEAYNCKQKEDEHQQPDINTKSNVNLFYKF

SEQ ID NO: 12604 - DNA, 4903 bp, DROSOPHILA
cgggagcagcgcgcagctcgctgatggtgggcacgctcctcggtatgtacttgtgcagatcctcgctaacgtaatctttgatcagacgcatggcgttatgaagcttcaatctaaagtaagaggagtcatttctgggatctcggcggttattatctcaaactgactcactttttgaacaaagcaaacaatgtttgcaccgtgtgattgtactgaccgccccaaatgttgaggaactcattggaggctgagcggccacgctgcttctggctgcttatctgctccacctggtcgggatagagttttacggccgtggccagctgttgccatacgtctagggcatccaagtgggcacatagctgggctcgcacgggcaacggcagcagtcggatggccattgtgttgtccaagtgggaacgcgacctggtcctgttgccattcgcttggttttgggcctgcgcctcggcttcggcggtctggacgccactcatctttcacttatgggcgggcggttcaaccggttgcgactgattcatgcggctccggatgcaagagtgcccgttggatgaggggttggcggcgctggtaacctgttgcagcgaaacgaaaatcgcttttgggtaaattcccaacgcgattcgatgaaaacctgtggatgacttgttaacagcggcgcaacaagtgataaagcagcttaacagagcgaagcagtctggcaacgctgccaatgtctagcaaataatacactcgaaaaagtggtagatgcttaggagccactgtttaaaattcagaagtaaaaagaaagcagagtaattattaaaaaggtatttgctgtatgaaaatattaaatagattttaaataacctccacatattttatgtaatttgcacagtattttgtatactaaaatatcttaaaaaataccaaaggcaattagtgtatgaccaaatgagccttgcagtttggcggacatgcgtcgttttcaagtgccccgcaggtggccacactgctgacaccgtcacgaacgcatcgctatcgctaattcttcgcttcgcccatttataattcagcaaatacgtcaattagccccaccagcgaacggaaaagcctcaagctggcggagaaaaaggtccaaatggcgctatgccagacatcggtggtgagtgtgcggctggatccccgagatccggtaattgtgtcagcggcggtggctccattgcattcgacatatggaaggcatcctaccaaggagtttctccatttcctccagcttcacctccttccgccgcccacgcgggaaagtgaaagctttcccagtggtcatggtagttactacaaaacgatagttacaactgctgaaatccgagataccaaaactgcaaacctctcgggtgtggatgtgtgtgcatgcgagtgcgtgtctgtctggatgtcgctgtgttagtgcgttcgttgccttgcagttttgtatgtttcttgccctctggattttccgattttcggcttttccgcgtagtacttcaaactcccatggggggttatatttagcagtaatacacgctgcgtagcttgtgctattatctacaagtcggggcctccttccttatcgtccgctgataacgcaaaacaaactattaataaaacaagcaactggcataccggtgtatatatatgtacaatgtacatatatatatataccagcatatgcatggtatctatgtacatatgtgcactgcgacattcttcgcaaacaaataatttacatactttatttgcgttttgcatattcacattacagctgcgtctgaattttaatgggagctcaaaaaggctcaccacatactgtgcgccacattttcaacttctatagcgtcttgccctttacttgcttcgtggattttttgcgcaatccctattgttttacccccaactgtttaggccctaatagcgtgaagttgagccgcgataatataatgagtgtttaagtcaacacaagcccagatttgtcgtgcatttcaaatttaattatacacaattaaccgcatcccctctcgcccgcagctgaaggtgtaccatgccgtgatcgaggacgtcatcacaaatgtgcgggacgcgttcctggacgagggcgtcgacgaacaggtgctgcaggagatgaagcaggtctggcgcaacaagttgcttgctagcaaggccgtcgagctgagcccggactccggcgatggctcccatccgccacccatcgtggccaacaatccaaaggtaagcgaaacggagcccttgggtggatattctcatcgcgaatccttgtgtctgtctaacttaacgtagaagtccatacaaattgtgatatcttcatcccaaaaaaaatttccaactaagatatcttgctttatctttcttatgctccaccacttgaaccactacaatgcaacgcgcctcaccaacaacatcgactaatgcgctgctctttgcacatcatcaaaatccattcaaaaacccattcatttccatgcgcccttacatccaaccgcacgtttcgaatgcagagccacaaggtaaagccatctgtctgcgggagaatttccaaaatcaagttcactaatcctctattcattttcaggcagcgaatgccaaggccaagaaggccgccgccgcaaccgcggtcacatcacaccaacatatcggcggcaacagctccatgtcctcgctggtggggcttaagtcgtccgctggaatggccgccggcagcggcataaggaacgggctggtgcccatcaagcaggaagtcaactcacagaatccaccgccactgcatcctacctcggctgcaagcatgatgcagaaacagcagcaggcggcgagcagtggacagggttccattccaattgtggccacgctggaccccaatcgcattatgcctgttaacgtgagttaaatgtagatttctacatgcggatggagtttaaattgctaattgacttcacagatcacgctgccatcgccagccggctctgccagttcggaatctcgagtgctcaccatacaagtgcctgcctccgcgctgcaggagaatcagttgacccaaattctgacggcccacctgatttcatccatcatgtccttgcccaccacgttggcctcgtctgtgcttcagcagcacgtaaacgcagcgctaagcagcgccaatcaccagagtaagcagactcaaatcctttccagccgccccctacttataacaactattctgtgatattagaaactcttgccgccgccaagcaattggacggtgccctggactcctccgatgaggatgaaagcgaggagagcgacgacaacatcgacaacgatgacgacgatgacctagacaaggacgatgacgaggatgcggagcacgaggatgctgccgaggaggagccgctcaacagcgaagacgatgtcaccgacgaagactctgccgaaatgtttgacacagataacgtgattgtttgtcagtacgataaggtgagttcgcagattcgttttaatgagttgtagtttatatgtattttgaacccttctccgcagatcaccaggtcgcgaaacaaatggaaattctatctcaaagatggcatcatgaacatgcggggcaaggactacgtgttccagaaatcgaatggcgacgccgagtggtaatggatggcagttgagcgaacagcggcggcagtgtgaatatatatattaacaaaagacatcaaacaaaaagcctcatcgaatgcgccttcagccctggacgacaatggctaaccagaccggactctgcatcactgggcaacatgaccaagcaacaccgtctgcacagaaagcaacgtactcgggccgacactgtatcttattttagttccatctgttttgtattacgatagcttaagggtgtgttgcaaccaaccatctcgattaaatgtattagagtgccgcataacttttgtgtcaataaacaaaaacatttgtgaaagttacaagcttgcgaatttcaattgggtcttgcatatttttcttgtatttcttgtatactacagatataatgcgaagagcttaaactaaatggggaaatattcaagtttcgggcaaataaaaaccatatggattcattgaaagtatgtatgtatttatatatagacatgtacatgcacttcgatcttgcagttaaagtgtacagcattttacaattcaacacttacaacaacagcgcggctaattgttaaggttcgcatcctatgtacagcccacattgtacacgggaatctggtcatccatcgtcaatctatgtacatacatacatgcacttatccgcatccgcatccgcttatccggtcgggcaccacatcgcacttggcttatgtcttatcgcctaaacaatctaagtaatgactaaagatgcctggttgtctggcttacgatcttaccatcctaaaactaatgaaaatgtctcgcgtgtctacatgagtgtgcgtttgtatgtgagtgggtgttaagtttagttgtgtatattgctgcttggatttttttgattcctagattaagtttagtcaatcgaaagtgagatgtgcttggttggcgttcacattttatacaaggtcacctccatcagcgttatcgcaactagagacaatcgaaatatgcgtacaaataagtttaaaacaatttataatatagcacaactctcgctccttggttagtccaatttggttttgcccgcaaacaaacatgtgctaagcaccaagccgaagaatcgtcctccgggtgtcattgcaggacaagccgtgcacgtacacaatgatataactgcctaactaaacattaagtcgttagtagcgctatgttgatttccttgaccattttgacgcggtgcagcatccgctgcagt

SEQ ID NO: 12605 - DNA, 1455 bp, DROSOPHILA
acactgctgacaccgtcacgaacgcatcgctatcgctaattcttcgcttcgcccatttataattcagcaaatacgtcaattagccccaccagcgaacggaaaagcctcaagctggcggagaaaaaggtccaaatggcgctatgccagacatcggtgctgaaggtgtaccatgccgtgatcgaggacgtcatcacaaatgtgcgggacgcgttcctggacgagggcgtcgacgaacaggtgctgcaggagatgaagcaggtctggcgcaacaagttgcttgctagcaaggccgtcgagctgagcccggactccggcgatggctcccatccgccacccatcgtggccaacaatccaaaggcagcgaatgccaaggccaagaaggccgccgccgcaaccgcggtcacatcacaccaacatatcggcggcaacagctccatgtcctcgctggtggggcttaagtcgtccgctggaatggccgccggcagcggcataaggaacgggctggtgcccatcaagcaggaagtcaactcacagaatccaccgccactgcatcctacctcggctgcaagcatgatgcagaaacagcagcaggcggcgagcagtggacagggttccattccaattgtggccacgctggaccccaatcgcattatgcctgttaacatcacgctgccatcgccagccggctctgccagttcggaatctcgagtgctcaccatacaagtgcctgcctccgcgctgcaggagaatcagttgacccaaattctgacggcccacctgatttcatccatcatgtccttgcccaccacgttggcctcgtctgtgcttcagcagcacgtaaacgcagcgctaagcagcgccaatcaccagaaaactcttgccgccgccaagcaattggacggtgccctggactcctccgatgaggatgaaagcgaggagagcgacgacaacatcgacaacgatgacgacgatgacctagacaaggacgatgacgaggatgcggagcacgaggatgctgccgaggaggagccgctcaacagcgaagacgatgtcaccgacgaagactctgccgaaatgtttgacacagataacgtgattgtttgtcagtacgataagatcaccaggtcgcgaaacaaatggaaattctatctcaaagatggcatcatgaacatgcggggcaaggactacgtgttccagaaatcgaatggcgacgccgagtggtaatggatggcagttgagcgaacagcggcggcagtgtgaatatatatattaacaaaagacatcaaacaaaaagcctcatcgaatgcgccttcagccctggacgacaatggctaaccagaccggactctgcatcactgggcaacatgaccaagcaacaccgtctgcacagaaagcaacgtactcgggccgacactgtatcttattttagttccatctgttttgtattacgatagc

SEQ ID NO: 12606 - protein, 363 aa, DROSOPHILA
MALCQTSVLKVYHAVIEDVITNVRDAFLDEGVDEQVLQEMKQVWRNKLLASKAVELSPDSGDGSHPPPIVANNPKAANAKAKKAAAATAVTSHQHIGGNSSMSSLVGLKSSAGMAAGSGIRNGLVPIKQEVNSQNPPPLHPTSAASMMQKQQQAASSGQGSIPIVATLDPNRIMPVNITLPSPAGSASSESRVLTIQVPASALQENQLTQILTAHLISSIMSLPTTLASSVLQQHVNAALSSANHQKTLAAAKQLDGALDSSDEDESEESDDNIDNDDDDDLDKDDDEDAEHEDAAEEEPLNSEDDVTDEDSAEMFDTDNVIVCQYDKITRSRNKWKFYLKDGIMNMRGKDYVFQKSNGDAEW

SEQ ID NO: 12607 - DNA, 3957 bp, DROSOPHILA
aatctgttgcggattagacagctccttctcctcggctgctagcgactcggaatcggatttggattcggaacggactcggaagctgctgctgcttgtgctgcagctttggatcgcgtcgaaagtgccgcgaacgaaccgtcatgctccagagtaaaagtgcgaatgtcgcgttataaatctggccccagttcagctgcctcactctcgctctctcttctctctctgtcaccctctctgtatcacgacccaacaataacaatgtgtgcaaatgctatgtgcacacacacacatagacgagattttcgcaaatccccacttctgtgtacgcgcgtgtgactgtgtttgagtgcgcgcacttaatgctttgctctctcttgcgcgcataaacaaaaaagaaaacgccacgaatttcggggagcaggcaaaaggcggcactcgctctatttctcttcagcactcgcgcgcgtttttatcgcgagtcgatcacaggttaaactgattgggttattatttacgattggagcggttttcatcaaatatttatgcgtttcggcacgttttatttggcaaaatgttgcggagcagctatgttgcagcttccgctttttgcgatggggagcggagcagtgtggccagagcggattccttgaaaatatcaactgggcggtgcgggtaaaatcgtatataccaatcaataaataactgtgtgtggtccaatagatcatacaaattagaataagaaatataatgggggcacagcaatgttaatactttcaacgttttttaattttaattttgaataccagcctacttccaacactggcccttttaacgttcttgatggtaatttaaaatttacttgtgtaaaatgtataagtagattaccttagtttagtattttaatgtaacgtgtttacctgcaatgtgaacacggtcacactgcgagcctttgtaaaaaaaatttcattgtttaccaaaggccggcagcgttttataaacaatggcagatgcgtgggacataaaatcactcaagacaaagcggaacacgctccgcgagaagctggaaaagcgcaagaaggagcgcattgagattctctcggacattcaggaggatctgacgaatcccaaaaaggaactcggtgagcaccggcaatggcaacaagttggagccacaaaaatgaatatatttttgcatttccagttgaggctgacttggaagtacagaaggaggtgctgcaggccctcagttcctgctccctggccctgcccattgtctccacacaggtggtggaaaagattgccggcagcagcctggagatggtgaactttattctaggcaaactggccaaccagggtgcaattgtgatccggaacgtgaccatcggcaccgaggccggctgcgaaatcatctctgtgcagcccaaggagctgaaggagatcctggaagacaccaacgatacgtgtcagcaaaaggaggaggaggccaagagaaagtgtgggtctcacagaaattactactctcataagtctaataattataataatttgctgttgattttacagtggaagtcgacgatgttgatcagccacaggagaagacaataaaactggagtccactgtagcgcggaaagagtccacaagcctggatgctccggacgatattatgatgctgctatccatgccttccacccgcgaaaaacagagtaagcaggtgggcgaggagattcttgagctgcttactaagcctacggccaaagagcgatccgtggctgagaagtttaagtcccacggcggagcgcaggtcatggagttttgctcccacggcacaaaagtcgagtgcctgaaggctcaacaagccaccgccgagatggcggccaaaaagaaacaagaaagaagagacgaaaaggagcttcgcccggatgttgatgcgggcgaaaacgtcaccggtaaggtacccaagacagaatcggcagccgaggatggagaaatcattgcggaggttataaacaattgcgaagccgagtcgcaggaatccaccgatggcagcgatacctgcagcagtgagacaacagacaagtgcaccaaactgcatttcaaaaagatcatccaggctcacacggacgaatctctgggggactgcagtttcctaaacacctgcttccacatggccacctgcaagtacgtgcactatgaggtggacaccctgccgcatataaacacaaacaagcccacggatgtgaaaaccaaattgagcctcaagcgcagcgtagactccagttgcacgctctatccgccgcaatggattcaatgcgacctacgcttcttggacatgacggtcctgggaaagttcgctgtggtgatggccgatcctccctgggatatccacatggaattgccctacggcacaatgtcggacgatgaaatgagagcactgggcgtgccggcacttcaggatgacggcttgatctttctgtgggtcactggacgagccatggaacttggccgcgactgcctcaagttgtggggctatgagcgcgtggacgaactcatctgggtaaagaccaaccaactgcagcgaattattcgcactgggcgcactggtcattggctaaaccacggcaaggagcactgtttggtgggcatgaaaggcaatcccacaaacctgaaccgcggactcgattgcgatgtgatcgttgcggaggtgcgggccacctctcacaagccggatgagatttatggtattatcgagcgtctaagcccgggtactcgcaagatcgagctctttgggcgtccgcacaacatccaaccgaactggataaccctgggaaaccaactggatggcattcgactggtggatccggagctaattacgcagttccagaagcgttatccagatggtaactgcatgtcgccagcttctgccaatgcggcgtcgatcaatggaatacaaaagtaggattaaaatagtatttgctgtatgaattgagacctcgacaagccagagctgtgtacagactcaattatagtaagataaattattattaaagcttttacaaaccgaaatggcttatgtggaacatttaataatgaatgaaggcaagtccatcatgcagactaaagttaaatttgcccttttgggaattgaaatgacttaaacatcaaatgccattaaatatcactatatgttaatccacacatatagataggtttattgctcatactaggggatttgcgcgtatttacaaaagtgcgatatcaccgaacccggtgattctctagatgtcgtatatattggtttatatagaacgcagtacgtgtacatatcactatcagctatgcacgatattggttgtttcgttactcgaatatgctggtaacaatagcttatttgacttatcagagagaacatggtttatgtaagttaatatacgattagaaatgcagcgtacacaatgtgctcgactggccactgctccagcccaattcctgctagtgtacttgatgagtgtatttacaagtcaggaatgagagcatcggcatgtgtccgttcatagtttgctttagttttcgtaacaataaatttggatttacagtaccaagcaattaaataattaataagatacatgaatttgtcaaacttcaacgtgtccgtggtaatcgtgtgttaagcccgtccccttatcctagtgaattcccctaacgggtgtgggctccggcagcacttatcgttttcagcactataaatcccagcatggtagctgcggccactcctagtcccgcctttaaccacagcttggggtcctccgtcatcaggccgaattgcctcaggtgactgcatgtgggagaaaagaatcgagttagaattggaaaagcagaggcaggattttacaaggtatcgtaacgataaaactaagaactacaggatgctgccgcacaccaaattaattaagcggtta

SEQ ID NO: 12608 - DNA, 1827 bp, DROSOPHILA
atggcagatgcgtgggacataaaatcactcaagacaaagcggaacacgctccgcgagaagctggaaaagcgcaagaaggagcgcattgagattctctcggacattcaggaggatctgacgaatcccaaaaaggaactcgttgaggctgacttggaagtacagaaggaggtgctgcaggccctcagttcctgctccctggccctgcccattgtctccacacaggtggtggaaaagattgccggcagcagcctggagatggtgaactttattctaggcaaactggccaaccagggtgcaattgtgatccggaacgtgaccatcggcaccgaggccggctgcgaaatcatctctgtgcagcccaaggagctgaaggagatcctggaagacaccaacgatacgtgtcagcaaaaggaggaggaggccaagagaaagttggaagtcgacgatgttgatcagccacaggagaagacaataaaactggagtccactgtagcgcggaaagagtccacaagcctggatgctccggacgatattatgatgctgctatccatgccttccacccgcgaaaaacagagtaagcaggtgggcgaggagattcttgagctgcttactaagcctacggccaaagagcgatccgtggctgagaagtttaagtcccacggcggagcgcaggtcatggagttttgctcccacggcacaaaagtcgagtgcctgaaggctcaacaagccaccgccgagatggcggccaaaaagaaacaagaaagaagagacgaaaaggagcttcgcccggatgttgatgcgggcgaaaacgtcaccggtaaggtacccaagacagaatcggcagccgaggatggagaaatcattgcggaggttataaacaattgcgaagccgagtcgcaggaatccaccgatggcagcgatacctgcagcagtgagacaacagacaagtgcaccaaactgcatttcaaaaagatcatccaggctcacacggacgaatctctgggggactgcagtttcctaaacacctgcttccacatggccacctgcaagtacgtgcactatgaggtggacaccctgccgcatataaacacaaacaagcccacggatgtgaaaaccaaattgagcctcaagcgcagcgtagactccagttgcacgctctatccgccgcaatggattcaatgcgacctacgcttcttggacatgacggtcctgggaaagttcgctgtggtgatggccgatcctccctgggatatccacatggaattgccctacggcacaatgtcggacgatgaaatgagagcactgggcgtgccggcacttcaggatgacggcttgatctttctgtgggtcactggacgagccatggaacttggccgcgactgcctcaagttgtggggctatgagcgcgtggacgaactcatctgggtaaagaccaaccaactgcagcgaattattcgcactgggcgcactggtcattggctaaaccacggcaaggagcactgtttggtgggcatgaaaggcaatcccacaaacctgaaccgcggactcgattgcgatgtgatcgttgcggaggtgcgggccacctctcacaagccggatgagatttatggtattatcgagcgtctaagcccgggtactcgcaagatcgagctctttgggcgtccgcacaacatccaaccgaactggataaccctgggaaaccaactggatggcattcgactggtggatccggagctaattacgcagttccagaagcgttatccagatggtaactgcatgtcgccagcttctgccaatgcggcgtcgatcaatggaatacaaaagtag

SEQ ID NO: 12609 - protein, 608 aa, DROSOPHILA
MADAWDIKSLKTKRNTLREKLEKRKKERIEILSDIQEDLTNPKKELVEADLEVQKEVLQALSSCSLALPIVSTQVVEKIAGSSLEMVNFILGKLANQGAIVIRNVTIGTEAGCEIISVQPKELKEILEDTNDTCQQKEEEAKRKLEVDDVDQPQEKTIKLESTVARKESTSLDAPDDIMMLLSMPSTREKQSKQVGEEILELLTKPTAKERSVAEKFKSHGGAQVMEFCSHGTKVECLKAQQATAEMAAKKKQERRDEKELRPDVDAGENVTGKVPKTESAAEDGEIIAEVINNCEAESQESTDGSDTCSSETTDKCTKLHFKKIIQAHTDESLGDCSFLNTCFHMATCKYVHYEVDTLPHINTNKPTDVKTKLSLKRSVDSSCTLYPPQWIQCDLRFLDMTVLGKFAVVMADPPWDIHMELPYGTMSDDEMRALGVPALQDDGLIFLWVTGRAMELGRDCLKLWGYERVDELIWVKTNQLQRIIRTGRTGHWLNHGKEHCLVGMKGNPTNLNRGLDCDVIVAEVRATSHKPDEIYGIIERLSPGTRKIELFGRPHNIQPNWITLGNQLDGIRLVDPELITQFQKRYPDGNCMSPASANAASINGIQK

SEQ ID NO: 12610 - DNA, 3821 bp, DROSOPHILA
cagaaagtgtagggaatgtagggaaatgcaaagcgagaccctttggctgctcactgactgaaatatcaccagactcggctcggttctgccgctcaagtggcagtaaataaaagttgtgaggagccttggcggcatgagtaataatgaccgaaatcagagcaccatcaccatcaccaaccatcgctaccaccgcccaacgcgttgctcattttattaaaataacaaaaatattttgccgctcgcagcctttttacgatgccgaaccgactggcggcccatttgttatttggcggtcattgccaccaaatggtgtcctgtcgctctttctcgtcctcgtcctcgtccttgtccgttccactgggccaactcgtgtgtcgtgtgtgttttgaccagagttatgcagctgcggatgggcaaaaatgttttattgccagctggggaatgccaaagtggcaagaggcagattgcccgatcttagctgtttaaataaatttaagagagagagagagagagagagatctggcacgaagcactccatcactggtccagcgatccgttaagccatcgagggtccttcgaatgaaatgccagcgctgacaaggcaaacactggagatttgtataataaggggtgggtggttgtgccgaaatttggcactgataggcaggacacttgtcaggcttggcgcaaacaaaactgacatttatattgatgtgtccctgtacccaattagatgcccatcattatgagagcaggctatctctgctctcgtgtccttcccccttctattttgcgcccgggaagtcatatatcgaacattaggctctgtttgtgtgcagagcaatttggcgggaagtggcagcaggaggacgcacatgatattagtaataatgtaattatatggtcataaacaaaataataaatcaataaacaacacacacgcacacgcaggcggcacacgagtaaaagttatcacgggggggaaaaaaatgaaggaaaaatgggaggcagagcagaggaagtgaagaaaagggaaccggaaaggaaagccattcatttggccccgcgactcaagtgccgttgtctacgtttgcgaatgtgtgtggttgtgtgcgtggcaggacttcctgttgccacatggacggaaacggcgccataattatgccataaacccaaccataaaggacatttttatagatgtgcccgagttaatccctttgttgttccactcgctaccgcacccatctctcatgtcctttttatccgcacatcctttcagcttactccaccgccgccctgctggccatcgtgttcgccattcccttcggtatccgcatgctggtccacaaggatcgaggacagtgggaggagttcggcccagccttctacaccgcccacctggagctttatctgggcaacggctgtttgggtgagtctaggattttggatttgcaacaggaggagctttcaagggtcgaagctcttctaaaaggttcaaaagttggactcagctttaagttcactcggatatactaaaaatatatataaaacaacacgttatgaaactgtttatgtaccataaatggagcgtaatgtgcttgatttaaaggaacagatgtcaacagtgcttaaattgtaataaaaagctatttgttttaggagctagccagacattattagtatggactgataagcatatgttagaagataatatttcatacatttagatacgcctataatttcataataataaatcataaaatttattccgttgggatcatttaatccttgaacagatatctgttatttgataatatttacaaggaatattatcccatttgcactcctaggcgttggcgtaatgatgttactagtgctgaccattgaacgttacgtgtccgtttgccatccaggatttgctcgaccagtgatgggaccacctgggtaagtcgcattgaaagtctgtagatggtctatttaattgatccaacctagcgttgtggtattcctcacctgcttggccacggtaatcgtctatctaccgagcatctttcgtggcgaactgatcaaatgcatccttggatcgagtgacgtatatgtatatttgcgacgcgacaacactatctaccagcagaccatcttctatcgcgtctacaagatcatgctggaggtgatctttaaactggtgcccactttggtgatcggtggcctcaacatgcgcatcatgatggtctacaggcggacctgcgagcgccgccgcaagatggtgctcagtcgtccgcatgcccagggacatggtcacggacatgggcacggacatggtcatggacatggacatgcacatggacacggctatttgaaggacgacgatccgcgaaagttcgccgaggagcggcgcttgttcctgctgctcggcagcacatcgattttgttcctggtctgcgtctcgccgatggccattctccacatgacgatcgcctcggaggtctatccgagcttccccttccaggtgttccgtgccagcgccaatctgctggagttgattaactactcgctgaccttctacatctactgcctgttcagcgaggatttccgcaacaccctggtgaggacgatcaagtggccctggttgaagggcaagttctgccaccaggccgagcacgaggtgagtgccagtccaccggccacagccggaaccgtagcggtagccggaaccggaaatggccacgtttctatttttcatccggcaataccggcgctgactctcacacccgcagaacccgacgaacggccccggtgtgccaatggcgtgcttcactaaggtggacaggggccatcaaaagcaccacataactaccacctcgggcctgggacgatcgagtagcatttagacaatgcctaccacccaacaacaacaccaccacaacccatccgctactcgagatccgaactccgaacaccgagaaccctcccagcccagagtaaccccaccaccaccacccaactccaaaaccgtcatcaccacttccacttaccccccaggtcgtcgaggttaaagggtgccctttctctcgcttgagatcctgcgacatttgaacgtgttcaagtatcgatgaacgaaaaatgatatacgataaacaactaacgattaacgataattgatattcagcgccacgcattgcgtatataagtgtctgtgtgtgttccttaaacatatatatttaaatatatggataaacatttttttttttttagcactagaattaggtacttaaaaaccaaacttaatcgaaaacacatccgtaattggtgaaataattgatatcgataggtaaaaccagttcgactttcgatcagcatttgcgccgaatgatttcaccacaatgtagcttgcggaatgtgtatgtcgcaggatcaagatcctcaagccacacgtatagatgcagatatgatagttttatcaatggatagattgcttgccgtattgataaccaaagagctcgtttactctagcattagatgcagacagaaacaggaacagcgacaggacaacgacagacagacatattgacatatagacaggtatagacaggtgagatggaacaatagcgagagagagagagaaagagttttacgatgataatatgcagacatacaatacttatatatacacttgcatatgcctatatgtgaatgatatttatgtaaacgacgtatttatgtatacacgcgtaactttaagcgaatatatttatatatgcatatatgtatctattgattatagcatttaagtgcgcgcaagaggaatccggattccaacc

SEQ ID NO: 12611 - DNA, 1158 bp, DROSOPHILA
atgggaggcagagcagaggaagtgaagaaaagggaaccggaaaggaaagccattcatttggccccgcgactcaagtgccgttgtctaccttactccaccgccgccctgctggccatcgtgttcgccattcccttcggtatccgcatgctggtccacaaggatcgaggacagtgggaggagttcggcccagccttctacaccgcccacctggagctttatctgggcaacggctgtttgggcgttggcgtaatgatgttactagtgctgaccattgaacgttacgtgtccgtttgccatccaggatttgctcgaccagtgatgggaccacctggcgttgtggtattcctcacctgcttggccacggtaatcgtctatctaccgagcatctttcgtggcgaactgatcaaatgcatccttggatcgagtgacgtatatgtatatttgcgacgcgacaacactatctaccagcagaccatcttctatcgcgtctacaagatcatgctggaggtgatctttaaactggtgcccactttggtgatcggtggcctcaacatgcgcatcatgatggtctacaggcggacctgcgagcgccgccgcaagatggtgctcagtcgtccgcatgcccagggacatggtcacggacatgggcacggacatggtcatggacatggacatgcacatggacacggctatttgaaggacgacgatccgcgaaagttcgccgaggagcggcgcttgttcctgctgctcggcagcacatcgattttgttcctggtctgcgtctcgccgatggccattctccacatgacgatcgcctcggaggtctatccgagcttccccttccaggtgttccgtgccagcgccaatctgctggagttgattaactactcgctgaccttctacatctactgcctgttcagcgaggatttccgcaacaccctggtgaggacgatcaagtggccctggttgaagggcaagttctgccaccaggccgagcacgaggtgagtgccagtccaccggccacagccggaaccgtagcggtagccggaaccggaaatggccacgtttctatttttcatccggcaataccggcgctgactctcacacccgcagaacccgacgaacggccccggtgtgccaatggcgtgcttcactaa

SEQ ID NO: 12612 - protein, 385 aa, DROSOPHILA
MGGRAEEVKKREPERKAIHLAPRLKCRCLPYSTAALLAIVFAIPFGIRMLVHKDRGQWEEFGPAFYTAHLELYLGNGCLGVGVMMLLVLTIERYVSVCHPGFARPVMGPPGVVVFLTCLATVIVYLPSIFRGELIKCILGSSDVYVYLRRDNTIYQQTIFYRVYKIMLEVIFKLVPTLVIGGLNMRIMMVYRRTCERRRKMVLSRPHAQGHGHGHGHGHGHGHGHAHGHGYLKDDDPRKFAEERRLFLLLGSTSILFLVCVSPMAILHMTIASEVYPSFPFQVFRASANLLELINYSLTFYIYCLFSEDFRNTLVRTIKWPWLKGKFCHQAEHEVSASPPATAGTVAVAGTGNGHVSIFHPAIPALTLTPAEPDERPRCANGVLH

SEQ ID NO: 12613 - DNA, 9245 bp, DROSOPHILA
gtggattaatgggcggcactgattttgtgttagttaacattcgctataagtttacataggttacactcttaataaatatatttatatatgtatatttatatatatgtatatatatatataatttactgattttagggcgggacaggtgctcgctgatacatctttacaatattagaagtcgaaaagtgctgggaaaggggggggggcgtggttgcgggctaaacgggagaaggaggaatgggggcggggacgtgcaggggctaagtgtgagaaagtcttgactaaatgtaatgtacaggactacgttgtctacgcttcatcgtcatcttcatcctctaatcacaagatgatatcctacatatctgatatccttgcaatgcatcgacattgttgtactttcgatagatttgcttttttgtgctggcatgttgagcttttactttgaaatggtttgcctgctgtgctgggagctgcgggcgagagggacaaatggagagtctgcgaatagtgtgaccaacgttgctagtaaggcatagcaattatttttaaagaagtttgttatatggtatacaatgtgcgaagaaaacaacgaagagttagaagataatactgatactgatagcgctgaggtacagatattttagagtttactggaatatatccatttacacaccacaaatatatatgtaggaataggtaacaagaacaacacggacaacactttcacattttagggcacagctaaggacacagccattgcccattgatatacttgtgatatatagttggccgcactgaagcatcaaccctccaccgacggagagagacagatatagagagtgagacagagagagcatgagatgcagacgtagctgtaaattagccattcgggagcgggaggaggattacgttcggaggacttctggaaggaggaggaaggatccattagtaggggcaggggctgcgcctacagatcaaaataaaactcaacaagcatggcctaaaactgattgaccttcagctcgttgccctgcagctggactagacggaaggcctcgcgaatagtcggggtcattaggagcttgaggttctcctcggcttccccgggaagcgatcgaagaagctccatggaggccaccactagctgggcgagcgcagccctcttgtagttggagtctttgagaatgctgctggctcgctgctgctcaatttccggcgaaattgactccgcctccgaggacttggcctgccgattggtgtcgaacgggttgctacggcacttgggctgaaactcgctgatcaacgtggtcattgtcacattctcctcctcctgcagctggacgcacttgctgggcgaggtgctgctgccggatccggaaccagagcccgtgtctgtcatctcggcatctccattgccgttgagggagatgcacatgggcttggtctgcggatggtggagcagttgtggtggcttctggcgcagcttgcccgaaccactttcgatctcatgaagggcagagttactcaagtacagctcacataccagattccaggcatcctgcaggcaaaacagatatcgcacaaaattctccttcttcttcaccgtggtggtgttcaggcgggagcaggactccagaataaagttcagatcctccggtcccagattgtacactacaatgtcgttgagatgcgagtcgaccagcgcaatatagtagatcatccacgaggaggtcatctgcttatacagattcgcggcgtactcgatgttcgacaccttctgcatgaggaacttgaggccgggtcgcgaatcgaactccagggcggacatcaggtactgcttgacacagcgcagcaggatctccttggagcgaaagtccaggtcgtagtcgtgactgggtgaagccgccgaagcagcatagttgtcgaagatgcaggtggacaccgcctggggcacacacttcaaccgcgacaggagcaacttggccaccagctgaagcaacatctggttagccagcagcccgaccaccaggttcttgaacggaatccggatcacaaagttatccaggttcgagttgaagccattgttaagcgggtacaagagaaacgagtagctccggtcgtctgacaacttgcactgcgaggcactgggcgtgggagcctgattctgacctggttcccgctgattgtcggacaggaagacctgctgcgccaacgcatatatcctggccagctcctccaggctgctatcacgtcgagcagccaccttcacgttagcgcagtccccgtagaaactattcgacttctcgtggaaagcgaacgagagctgacgcagcggagcaattgtcacggtgcatgcgcgatggattgcagagcaggcgatcatccactgggattcattgaagagcatgccggtggagaggatcacatgctttaagcaggaaaccgatatcctagcgatcgcctcctgcgactgagcagcacactcgattaggaccagcagcaattgcttcaaggccagcgtggccgaacccgagatcttggtgggcgattctattaggttcgatccgcctcctccgacacctcctccgtttttctgctgctcctcgctagcggagctggagctgctgtcgtactgctgagtgtagccacaaccgtgatcctgcacagagggcgattgctgctgctgctgctctctttctattctttccgtcacgaacttcagcttggagtacagaagattgtctgccggatgaactatctgcgccaatcgcgtcttggtacccgctcctagacgccgttgctccggcaccgatttctctatgaactctactaccaggtcagtggtcatgcagcagcagtgtttaaagttcttctctacaagctgccaggaggagcccgttttgttgatgtaccttagccaatcctgaatcattggcaccagcaggtggttgatgcagtagaaaccgaaatcgatgcccggactggccagcaggttcttgaatagcttgaagatcgtttgcaggattggcgcctggtgggagtagggacagacgatcagcgagtttgtgagcccatcgagcagcagaaaccaaactttgagcacacccgacggcttgtccatctcatcaatcttgacaatggtgtccttatcgatgtgcagagatctgtaggatatcatgtactgctcattccgcgtctgtagataatcgttcccgaagtatgtaaagttctccatcgaactgggaatattcgcgtcgatgatgtgcgtgtaggagatgcccttgatcttgtacgtcgagtggaagttgggacacttgggcatactgtgcatgaaaccaaggatgctggagcaacgctcaaggaagcgaagagtctcgtggagaaagtccgtgggccggaaggtgttatcctcctcctgctggccaccattcgatgcagttcctcccgctgcacttccactcccaccggaacaggcattgttattccctcctccggaaatctccagataggacagcaagcacaggatgcagtccaatccggcgttggcaaacaccagcgtgttgtccgagtcgaggaacactcggaagatatcgatgatgttgctcatgttcagcatccggcttcgagcattccgaagcgtaccgaacagtggtcgccatccggatcggatctctgtgcggtgcgcctccaccacctcgtatagacaggccacaatctgatcctgcacatccacatccgtatccatgctcagaagattctcgaagggcttcagcagtgcctcgttgaagtggaagtacggcagctctgactgctccacaagaagcgcagtgatgatgtcgtggatatactcaattgcccgcttcgaaatcatccgatcccggtggcaggcagccttgaataagataaaaacatacaatataaatttaaatagtaaacaatcctaaacagggattactcacatccatcagatgcggtcctgtgatggcccaaactttgagcacgtgcagcagcgggcgggagctgcggaacaccttcagcgtgacatctccaatacggtgaaggagcagcgacatgggcaacgagtctagcttcttccagcccttgctgggccaccagatgcgactgcccttgcgcgccacctggctcttgtacagctgatccctggaggcgcggcacaaatgtttgaggaactgacacagcgagggcaaactaagtctttcggcggcgtctccgaacagattttccgcctgatgggacagggcgcagagtaccttggaggtgtcgctctgactcagcagcaccgtctcattcgttccggagtagacctttaagatggatgtgatgttcgtgttgggactctgcatcggtgcctgcaggaagctgtacacgtccacactgaagaggaaattgaatcagtatctaattgaaaaagtggggaacatatgaactagctcttaccaggtctcatcatcatcgatgggaatcgaggacagattgagcttatcctgggcattgccgttgcttagcttttcccccgtctccaagtcgcgccgactgctgcccggtgatgcggaaatagccggattttgcatgctgaagatttcatgctccaactggctgacatgacggcaaacggcgaaaatgcttggccaacaatctgcactgtagctgcccaaattcagaccaccggtgagcaccacgtccatggacatggcctggctggcggagattcgcggtccggaggtctggcagacgtttgaggccagcaggttgagtatctttccagccaaatgctgcagattcaaactgttgctgagcgtggcggcctacaaatacaggaaataagtattcaataaatattataaaagccgaatatgagttgaatatattccttaccgaatgcaaaccatccaaacacatagcatacagggcctctccatttgatttattcgccttggccttcaccctaagtgttcgcttagatagggccacgagtttgttggaggcggagctggtctgcagatcgcctaagccggagctcagcacgatgaccatcgagtcccagcagcaggtgagcagacggcggcatagcttcttggctgcctctcggcgcttatcgtgcagctgctcctcctccttgtgcttcacattggccgtctgcaggcgctgccactccgacagcatctgggtggcacccagtccaccggcatcgcacagcatgtcgacgagggcgcagcgcggtcccatgccttccaattgctggcgtggcatggcctccagtacattgcaaacggtcaccgattgatagagctcgcacaaccacggcgaggagagatagacaagaacacccgtgttctggaccgaagtcacaaattgctgctccgacatgggcaccaggatatccttgtgggacatgccctgggccacctgctcatagaagccggcccgcattagctgcaggctgagcagcagcgaggagtagatggccaggtagatcccgtccgcattgatggcggtcaggttgtagtcaaagtccgagaagttcatgctgttctcctggcaaacggcggatgcgaactcctgcatcgcctcgtccagctccacgcagctgcgcagtcgtaaaagtttcgggaccagatcctgtctcaaggcccgagcgaaatcgcgagcgtgctgccgatcattatcgctatcggttcgtatgggcatcacgggcgcctccagatgcgagtatggccagcggttctccacacgagacgtttcatcgctggagctgcttgggtcgtcgtcctcgggtccttctgtgtccccggaaccattggaggcagcatcctgctcgtgctgcggctcaccctcgctctccgatcccgatgaagtttcgaaaacggtctgccggaactcaactatggcatctcgatacggagctggaaggcgggccatactctgataggtgagtggaccggagtagtccgcatccttaagcaggtcgtgccgcccgttgaccacctggacgatctggtcgctgatcatggactcggtgagctctccgctgcaaagaacttgcaagctgtccaacagggccaccatgcactccacgctggcctgcagactggcctccgtggcggaacccccgccgctggcaccataggcgcactcttccatggcgtccaccaaactgaaaatagttttatatacattatgtatttcaatgcacaatgcactccataatataacttacagtcggaataacgccatttcatcgctgcatccttgagcggtgttcttgtcgacataaagaatcaccgccaggtcgatcagacgctccgggctcttgaagatctctctaacgcatcgaagtggctctgtgcgattttggggagccggcagtagaagcattcgatggaaaagggcctccagcatgggccgcagtgatccgtgggctccggcaatccggagtaactgtatggcggtcaaatagacgcagcgtgcttgcggaccatccaaacctgggccagtgaagaagccacgagcctcgttctcaatcatgtgtagcgcatccctgagataatgtatatttggtgattcgatatttttatttttatttccttttactaacttgtaagtaaacttcttgtccagatttattcttcctggggatcccagtgccgccgccaaagtcgggcagaacttctgccagagaaacgaggtgaagtgcggattggcatgtacattccggggcaaagcggaactcagcgtgaggatgcattcggtgaggtacagcgagctgtggttctcgcacttcttgttcggcgaagcattcacgttgggctccaccagccggctgcagagccactgcatcaccgggatgacctcgttgtagacggcggaggcctgcgtctgcgtcatcaggccggcaggcgccgttttcttgacctcttcggcctcctcgatgagaaaggcgcaaaatgtacgcaggcactgggaggcggcggccaatgaggcagccttggtggcccgcgagcccatctcccagcactcgccgcacctggacaggatctcaatgaggaggcggccgttcagggtgcatgcgggcgagcaggccatcgccaagaagagtcggagcacgttgaccaccgtgtcctcgctgcttgtcgtaggcaggatgccgttggtggctctcaggagctgtgatggcagccacacagagtcgtcctccggctcgaggccgatgtagaatcgttcgtccttgatgacgcgctattgggatgataaagaacggaaaaacaggattagcaaggggcagtagtaaatatagatagtataaaaggagaactggaaaaccaaggataaatcgcaggaatctagaacaagtgaatggcaatggaaattaaataaccagagcaaatgggcaagcaaatccggaattattgattaccatgttgttaaccagtcataaacaaaagtcacatccgaccccggaggacactcagcaattagtcgattccgcccgttgcccaccaatgccccaatggcgcacatatgccaaatgctatacgcccatatgccacatgccacatgccatctcccatgtcccaaatcccattgcccgtgtcttttgttcggtgagcagtgtgtgcatatggaatgataaatccgttttgttcgccggaagttccggccggaaaatgtgtgtcagtggttgttatggccattgttagcccacagtcccattaccattttcccagtttactgccccttccgataatcgccgtttccggacggtgcacttacatggaggccgttgagtcccatcgtgatgaacttgggtcgctttgtgtccagcgccatctgcagagcggtaaagcaaacggagcgcagctcgtgcgacggatctcggtggattccatgctggcggtacagcttatctgcagggttaacaaaattgggtcattatttaggcggtattagtgacaagtatgtatgtatgtacatatgtatatgaaaaaataatgtctttatcaactgcaaatcgtaaattgtaatatcttctgctcttaatagcgcgagcaaaaagttacattcctattcggtggcaaatcggcgcgattaacgtttatcgccttgggcacacaagtatgtgtatgtagctactgcatgcagtaaaatctgtcccgataagcgaacggaaacggtgcggggagttccacgctccaccatccgcaaatcgttgcctactttcctgcatcgctgaccgcgaaatctcccacacatcgttacctactttcctgcaacaccacgcaggaaaacacaataagaggctacaaaaccgagctttcgaagaaatctaaataatattctgttatcccctttatgtgaaaatatatacaataattttatcaccataataaatttacgattttcaatttataatgcacttattattaatataacaacttatagatgtaatgtaatgaaaatccaaatctttgccgaaacttaagtgccgtgctgaagaggtgaagggcattgcacaaaggaagtggcaactaacggtaaacaacaaacattggcgggcaagggaaagcgagaaaggaagttagaaaatggcaataatctcgttcgttctctcgctctctgcctctctctttctttcccactttcaccgtgctaactgcaaacggagttcacacatattgcaaaaaggaaaagagcaagaaaactcaccgtaagcgatttgcgccgtttgccgcagcgcattgtgtttagtgcccgttgactccttgataatgagcaaaaagaggtcctccatattgcccgtctctttctaagcctctctgtagttgtgtgcgtttgtgtgggccaaatgtcgctctggtggtgtgcgtgcgtttatgtcgctgcttcaggcgattccgcttgctgtggttgttgcttcgcccttgcacgccatcattggtagtaacaacaacaacaactcaattagcgcctaaaaaattggtagtaaaatcaatacaaacgaagataataacaatagagcaacggtgaagaatgattgtatacatatgttatgttgccgccatatgtatgcacacacatacacatacgcactggcacttacacacataacggaaagtttcaatgtggcgttttcgcgtcacgtcacttttgcacttctcaaaaacttgtgcacactcattgcaattgtgcaccttcgaaaagttcaaacagtgtgtatccgttttcct

SEQ ID NO: 12614 - DNA, 6138 bp, DROSOPHILA
atgcaggaaaataagctgtaccgccagcatggaatccaccgagatccgtcgcacgagctgcgctccgtttgctttaccgctctgcagatggcgctggacacaaagcgacccaagttcatcacgatgggactcaacggcctccatcgcgtcatcaaggacgaacgattctacatcggcctcgagccggaggacgactctgtgtggctgccatcacagctcctgagagccaccaacggcatcctgcctacgacaagcagcgaggacacggtggtcaacgtgctccgactcttcttggcgatggcctgctcgcccgcatgcaccctgaacggccgcctcctcattgagatcctgtccaggtgcggcgagtgctgggagatgggctcgcgggccaccaaggctgcctcattggccgccgcctcccagtgcctgcgtacattttgcgcctttctcatcgaggaggccgaagaggtcaagaaaacggcgcctgccggcctgatgacgcagacgcaggcctccgccgtctacaacgaggtcatcccggtgatgcagtggctctgcagccggctggtggagcccaacgtgaatgcttcgccgaacaagaagtgcgagaaccacagctcgctgtacctcaccgaatgcatcctcacgctgagttccgctttgccccggaatgtacatgccaatccgcacttcacctcgtttctctggcagaagttctgcccgactttggcggcggcactgggatccccaggaagaataaatctggacaagaagtttacttacaagttagtaaaaggaaataaaaataaaaatatcgaatcaccaaatatacattatctcagggatgcgctacacatgattgagaacgaggctcgtggcttcttcactggcccaggtttggatggtccgcaagcacgctgcgtctatttgaccgccatacagttactccggattgccggagcccacggatcactgcggcccatgctggaggcccttttccatcgaatgcttctactgccggctccccaaaatcgcacagagccacttcgatgcgttagagagatcttcaagagcccggagcgtctgatcgacctggcggtgattctttatgtcgacaagaacaccgctcaaggatgcagcgatgaaatggcgttattccgacttttggtggacgccatggaagagtgcgcctatggtgccagcggcgggggttccgccacggaggccagtctgcaggccagcgtggagtgcatggtggccctgttggacagcttgcaagttctttgcagcggagagctcaccgagtccatgatcagcgaccagatcgtccaggtggtcaacgggcggcacgacctgcttaaggatgcggactactccggtccactcacctatcagagtatggcccgccttccagctccgtatcgagatgccatagttgagttccggcagaccgttttcgaaacttcatcgggatcggagagcgagggtgagccgcagcacgagcaggatgctgcctccaatggttccggggacacagaaggacccgaggacgacgacccaagcagctccagcgatgaaacgtctcgtgtggagaaccgctggccatactcgcatctggaggcgcccgtgatgcccatacgaaccgatagcgataatgatcggcagcacgctcgcgatttcgctcgggccttgagacaggatctggtcccgaaacttttacgactgcgcagctgcgtggagctggacgaggcgatgcaggagttcgcatccgccgtttgccaggagaacagcatgaacttctcggactttgactacaacctgaccgccatcaatgcggacgggatctacctggccatctactcctcgctgctgctcagcctgcagctaatgcgggccggcttctatgagcaggtggcccagggcatgtcccacaaggatatcctggtgcccatgtcggagcagcaatttgtgacttcggtccagaacacgggtgttcttgtctatctctcctcgccgtggttgtgcgagctctatcaatcggtgaccgtttgcaatgtactggaggccatgccacgccagcaattggaaggcatgggaccgcgctgcgccctcgtcgacatgctgtgcgatgccggtggactgggtgccacccagatgctgtcggagtggcagcgcctgcagacggccaatgtgaagcacaaggaggaggagcagctgcacgataagcgccgagaggcagccaagaagctatgccgccgtctgctcacctgctgctgggactcgatggtcatcgtgctgagctccggcttaggcgatctgcagaccagctccgcctccaacaaactcgtggccctatctaagcgaacacttagggtgaaggccaaggcgaataaatcaaatggagaggccctgtatgctatgtgtttggatggtttgcattcggccgccacgctcagcaacagtttgaatctgcagcatttggctggaaagatactcaacctgctggcctcaaacgtctgccagacctccggaccgcgaatctccgccagccaggccatgtccatggacgtggtgctcaccggtggtctgaatttgggcagctacagtgcagattgttggccaagcattttcgccgtttgccgtcatgtcagccagttggagcatgaaatcttcagcatgcaaaatccggctatttccgcatcaccgggcagcagtcggcgcgacttggagacgggggaaaagctaagcaacggcaatgcccaggataagctcaatctgtcctcgattcccatcgatgatgatgagacctgtgtggacgtgtacagcttcctgcaggcaccgatgcagagtcccaacacgaacatcacatccatcttaaaggtctactccggaacgaatgagacggtgctgctgagtcagagcgacacctccaaggtactctgcgccctgtcccatcaggcggaaaatctgttcggagacgccgccgaaagacttagtttgccctcgctgtgtcagttcctcaaacatttgtgccgcgcctccagggatcagctgtacaagagccaggtggcgcgcaagggcagtcgcatctggtggcccagcaagggctggaagaagctagactcgttgcccatgtcgctgctccttcaccgtattggagatgtcacgctgaaggtgttccgcagctcccgcccgctgctgcacgtgctcaaagtttgggccatcacaggaccgcatctgatggatgctgcctgccaccgggatcggatgatttcgaagcgggcaattgagtatatccacgacatcatcactgcgcttcttgtggagcagtcagagctgccgtacttccacttcaacgaggcactgctgaagcccttcgagaatcttctgagcatggatacggatgtggatgtgcaggatcagattgtggcctgtctatacgaggtggtggaggcgcaccgcacagagatccgatccggatggcgaccactgttcggtacgcttcggaatgctcgaagccggatgctgaacatgagcaacatcatcgatatcttccgagtgttcctcgactcggacaacacgctggtgtttgccaacgccggattggactgcatcctgtgcttgctgtcctatctggagatttccggaggagggaataacaatgcctgttccggtgggagtggaagtgcagcgggaggaactgcatcgaatggtggccagcaggaggaggataacaccttccggcccacggactttctccacgagactcttcgcttccttgagcgttgctccagcatccttggtttcatgcacagtatgcccaagtgtcccaacttccactcgacgtacaagatcaagggcatctcctacacgcacatcatcgacgcgaatattcccagttcgatggagaactttacatacttcgggaacgattatctacagacgcggaatgagcagtacatgatatcctacagatctctgcacatcgataaggacaccattgtcaagattgatgagatggacaagccgtcgggtgtgctcaaagtttggtttctgctgctcgatgggctcacaaactcgctgatcgtctgtccctactcccaccaggcgccaatcctgcaaacgatcttcaagctattcaagaacctgctggccagtccgggcatcgatttcggtttctactgcatcaaccacctgctggtgccaatgattcaggattggctaaggtacatcaacaaaacgggctcctcctggcagcttgtagagaagaactttaaacactgctgctgcatgaccactgacctggtagtagagttcatagagaaatcggtgccggagcaacggcgtctaggagcgggtaccaagacgcgattggcgcagatagttcatccggcagacaatcttctgtactccaagctgaagttcgtgacggaaagaatagaaagagagcagcagcagcagcaatcgccctctgtgcaggatcacggttgtggctacactcagcagtacgacagcagctccagctccgctagcgaggagcagcagaaaaacggaggaggtgtcggaggaggcggatcgaacctaatagaatcgcccaccaagatctcgggttcggccacgctggccttgaagcaattgctgctggtcctaatcgagtgtgctgctcagtcgcaggaggcgatcgctaggatatcggtttcctgcttaaagcatgtgatcctctccaccggcatgctcttcaatgaatcccagtggatgatcgcctgctctgcaatccatcgcgcatgcaccgtgacaattgctccgctgcgtcagctctcgttcgctttccacgagaagtcgaatagtttctacggggactgcgctaacgtgaaggtggctgctcgacgtgatagcagcctggaggagctggccaggatatatgcgttggcgcagcaggtcttcctgtccgacaatcagcgggaaccaggtcagaatcaggctcccacgcccagtgcctcgcagtgcaagttgtcagacgaccggagctactcgtttctcttgtacccgcttaacaatggcttcaactcgaacctggataactttgtgatccggattccgttcaagaacctggtggtcgggctgctggctaaccagatgttgcttcagctggtggccaagttgctcctgtcgcggttgaagtgtgtgccccaggcggtgtccacctgcatcttcgacaactatgctgcttcggcggcttcacccagtcacgactacgacctggactttcgctccaaggagatcctgctgcgctgtgtcaagcagtacctgatgtccgccctggagttcgattcgcgacccggcctcaagttcctcatgcagaaggtgtcgaacatcgagtacgccgcgaatctgtataagcagatgacctcctcgtggatgatctactatattgcgctggtcgactcgcatctcaacgacattgtagtgtacaatctgggaccggaggatctgaactttattctggagtcctgctcccgcctgaacaccaccacggtgaagaagaaggagaattttgtgcgatatctgttttgcctgcaggatgcctggaatctggtatgtgagctgtacttgagtaactctgcccttcatgagatcgaaagtggttcgggcaagctgcgccagaagccaccacaactgctccaccatccgcagaccaagcccatgtgcatctccctcaacggcaatggagatgccgagatgacagacacgggctctggttccggatccggcagcagcacctcgcccagcaagtgcgtccagctgcaggaggaggagaatgtgacaatgaccacgttgatcagcgagtttcagcccaagtgccgtagcaacccgttcgacaccaatcggcaggccaagtcctcggaggcggagtcaatttcgccggaaattgagcagcagcgagccagcagcattctcaaagactccaactacaagagggctgcgctcgcccagctagtggtggcctccatggagcttcttcgatcgcttcccggggaagccgaggagaacctcaagctcctaatgaccccgactattcgcgaggccttccgtctagtccagctgcagggcaacgagctgaaggtcaatcagttttag

SEQ ID NO: 12615 - protein, 2045 aa, DROSOPHILA
MQENKLYRQHGIHRDPSHELRSVCFTALQMALDTKRPKFITMGLNGLHRVIKDERFYIGLEPEDDSVWLPSQLLRATNGILPTTSSEDTVVNVLRLFLAMACSPACTLNGRLLIEILSRCGECWEMGSRATKAASLAAASQCLRTFCAFLIEEAEEVKKTAPAGLMTQTQASAVYNEVIPVMQWLCSRLVEPNVNASPNKKCENHSSLYLTECILTLSSALPRNVHANPHFTSFLWQKFCPTLAAALGSPGRINLDKKFTYKLVKGNKNKNIESPNIHYLRDALHMIENEARGFFTGPGLDGPQARCVYLTAIQLLRIAGAHGSLRPMLEALFHRMLLLPAPQNRTEPLRCVREIFKSPERLIDLAVILYVDKNTAQGCSDEMALFRLLVDAMEECAYGASGGGSATEASLQASVECMVALLDSLQVLCSGELTESMISDQIVQVVNGRHDLLKDADYSGPLTYQSMARLPAPYRDAIVEFRQTVFETSSGSESEGEPQHEQDAASNGSGDTEGPEDDDPSSSSDETSRVENRWPYSHLEAPVMPIRTDSDNDRQHARDFARALRQDLVPKLLRLRSCVELDEAMQEFASAVCQENSMNFSDFDYNLTAINADGIYLAIYSSLLLSLQLMRAGFYEQVAQGMSHKDILVPMSEQQFVTSVQNTGVLVYLSSPWLCELYQSVTVCNVLEAMPRQQLEGMGPRCALVDMLCDAGGLGATQMLSEWQRLQTANVKHKEEEQLHDKRREAAKKLCRRLLTCCWDSMVIVLSSGLGDLQTSSASNKLVALSKRTLRVKAKANKSNGEALYAMCLDGLHSAATLSNSLNLQHLAGKILNLLASNVCQTSGPRISASQAMSMDVVLTGGLNLGSYSADCWPSIFAVCRHVSQLEHEIFSMQNPAISASPGSSRRDLETGEKLSNGNAQDKLNLSSIPIDDDETCVDVYSFLQAPMQSPNTNITSILKVYSGTNETVLLSQSDTSKVLCALSHQAENLFGDAAERLSLPSLCQFLKHLCRASRDQLYKSQVARKGSRIWWPSKGWKKLDSLPMSLLLHRIGDVTLKVFRSSRPLLHVLKVWAITGPHLMDAACHRDRMISKRAIEYIHDIITALLVEQSELPYFHFNEALLKPFENLLSMDTDVDVQDQIVACLYEVVEAHRTEIRSGWRPLFGTLRNARSRMLNMSNIIDIFRVFLDSDNTLVFANAGLDCILCLLSYLEISGGGNNNACSGGSGSAAGGTASNGGQQEEDNTFRPTDFLHETLRFLERCSSILGFMHSMPKCPNFHSTYKIKGISYTHIIDANIPSSMENFTYFGNDYLQTRNEQYMISYRSLHIDKDTIVKIDEMDKPSGVLKVWFLLLDGLTNSLIVCPYSHQAPILQTIFKLFKNLLASPGIDFGFYCINHLLVPMIQDWLRYINKTGSSWQLVEKNFKHCCCMTTDLVVEFIEKSVPEQRRLGAGTKTRLAQIVHPADNLLYSKLKFVTERIEREQQQQQSPSVQDHGCGYTQQYDSSSSSASEEQQKNGGGVGGGGSNLIESPTKISGSATLALKQLLLVLIECAAQSQEAIARISVSCLKHVILSTGMLFNESQWMIACSAIHRACTVTIAPLRQLSFAFHEKSNSFYGDCANVKVAARRDSSLEELARIYALAQQVFLSDNQREPGQNQAPTPSASQCKLSDDRSYSFLLYPLNNGFNSNLDNFVIRIPFKNLVVGLLANQMLLQLVAKLLLSRLKCVPQAVSTCIFDNYAASAASPSHDYDLDFRSKEILLRCVKQYLMSALEFDSRPGLKFLMQKVSNIEYAANLYKQMTSSWMIYYIALVDSHLNDIVVYNLGPEDLNFILESCSRLNTTTVKKKENFVRYLFCLQDAWNLVCELYLSNSALHEIESGSGKLRQKPPQLLHHPQTKPMCISLNGNGDAEMTDTGSGSGSGSSTSPSKCVQLQEEENVTMTTLISEFQPKCRSNPFDTNRQAKSSEAESISPEIEQQRASSILKDSNYKRAALAQLVVASMELLRSLPGEAEENLKLLMTPTIREAFRLVQLQGNELKVNQF

SEQ ID NO: 12616 - DNA, 2589 bp, DROSOPHILA
gttcggatgaaccactggccagggaatttggtctagggcccatggaatgcgtcttcatttttcactttcagagagtctacaggttccgctgccaggatccaactgttgacttacccgcacgcgattcgtttttgcccgcggagcgaaatgaaatgtacagccgcggaggaggcggaaaccaggatatcgggatgctgttggcttgccgaacacggctggaatgatagaagttcagaaagtcaggtcgcgagtgtcgaaaggtgggccaggatatgtaggcttacctgctttaaccgtatgattcgattgaactgcagtttgttgctgcgagggtgttactgctcgttcgacctcgtaaatgcaggcaaaaacgaatggccagcgaaatcgggcggaaaatcttaacaatttaagcacatttttcaccaggtaagccaactaaagcagctcgaaacattacgcagtgccatcgaaacggaagcgttctgtcgttcaacaatattaaaaactgcaaaagcatgtgtgtattttaatttctatgatcgaacggctcaggtggcaactctggttgccgattcgtgtgcgcccgatgtcggttattttgaaaaggcggaaataaaatggtaaataaacgaagcctttcttgtttggtgttaactgttttggaaatacgctacttagcagccttaaatgcttaaattaatatcaagcgatggctttacatgtacctgatattgtaaaataagtgcagaggaaaatttcgcaatatccaacagagctttttaccttctcggaacaattttaacgaaaagagtttgtcctctgaatagttgtatatatttaaaaccgcacattaacttagcaactttatcaatatttaattgcttcaaagattacaaaatacagcttcttcttcttctccttaaacttctgttagtactggaaaacgccgctcatactaaacaacggcagcgccagcagctagtgttggccaacttcccaaagggtagttttattttcgtgtcaattgttaagagaaatttggcaaaagtgaatagagtttaagttttatagaataaagagtacccctgaacactgccagccatgtccctgttaaacaatgacgacagcattcccaacatggacgaggatccacagggtaagtgaaaactggagggagtgggtggagtcccgagtgatgatgttatcaattgctaatcccccccaaaaacgcagtggtcattccggacgacgagccaccggcgacgggacgaatgcccagtgggaggtccatggactcgttgcgttcatcgttcaccaaccgcagttccacgccagattcatcgcacaattcgctggaggccatggaaatggcccaggacgatcgggaggagaaggcccgcctcatcacacaggtcctggagctgcagaacaccctggacgacctgtcgcaacgcgtcgattccgtcaaggaggaaaatctgaagctgcgctccgagaaccaggtgctcggccagtacatcgagaacctgatgtcggcctcatcggtgttccagtccaccagtcccagtgcggccaaaaagaagtaatcttctatagtcaatcgacccaccggtactggaaaccaaaaaccttctcaaatatgccttctcgttcacgctagagctacatgtatattttaatctgtaacactcgaaattaagctattgcaatgttatttcagttgcccgattgtcgaatttgtatttgtttaggcttaagcttatggcgcgctatgtattttatacatagaagtaattaatttatatagataattaataaatcaataataccccacgcaatttaagaatttgaaaaggaaaacgggatggcagcactgccaatccagctgcttttagaggtcgctttactaaatagccatgatcgaattgcaaaacttacaacagagtgacatttttaattaaataataaaatgtatttatttgtataaatcttagcaattattagaaaaacacctgctcacattttatttgaaaattttgaactgcctacctacacaacggcctggcaactttggtcggccagctgttcgtcgtggtcgtgcaacaacaaattgagcagtgacttttcgtattcgaataacgtagaaagcgtgtataagtcgtagtctctgctcggaacattttaaaaccagtccaaaactataggaaaaacaagaaaagtgatcgtgcttacaccagaacagttgaacgtgcaacaaaagtgattgcgaaatacactgcaaggtgtgtgtgtgtgacttggtgctctagctgtgtgtgtgtggggaaaaacaaaacatttgcgctgtggtttttgcttttaacaatgtttgtttgagtaggaaattccaattttagtggccattaatggaacgcaaacatttagttggccttcctttgtatttgcagtttctattttgtatcttcccctcccgctcgcaattgtggataaaagcaacaacaaagtgcagacagagaccagtgttgtgaaagaccccccacacacacacacacatgcacatgcgttgcatttattgttttttaatat

SEQ ID NO: 12617 - DNA, 512 bp, DROSOPHILA
caaagggtagttttattttcgtgtcaattgttaagagaaatttggcaaaagtgaatagagtttaagttttatagaataaagagtacccctgaacactgccagccatgtccctgttaaacaatgacgacagcattcccaacatggacgaggatccacaggtggtcattccggacgacgagccaccggcgacgggacgaatgcccagtgggaggtccatggactcgttgcgttcatcgttcaccaaccgcagttccacgccagattcatcgcacaattcgctggaggccatggaaatggcccaggacgatcgggaggagaaggcccgcctcatcacacaggtcctggagctgcagaacaccctggacgacctgtcgcaacgcgtcgattccgtcaaggaggaaaatctgaagctgcgctccgagaaccaggtgctcggccagtacatcgagaacctgatgtcggcctcatcggtgttccagtccaccagtcccagtgcggccaaaaagaagtaa

SEQ ID NO: 12618 - protein, 135 aa, DROSOPHILA
MSLLNNDDSIPNMDEDPQVVIPDDEPPATGRMPSGRSMDSLRSSFTNRSSTPDSSHNSLEAMEMAQDDREEKARLITQVLELQNTLDDLSQRVDSVKEENLKLRSENQVLGQYIENLMSASSVFQSTSPSAAKKK

SEQ ID NO: 12619 - DNA, 8192 bp, DROSOPHILA
acagcagcaacagcctgtgcaacagcagcagcagcctgtgcagcagcagcagcaaactgtgcagcaacagcaaccagtacagcagcagcagcaaactgtgcagcaacagcaaccagtacagcagcagcagcaaactgcccaacagcaacccgtagcacaacaacagatccacaatcagagtcctccgcccgttctgaatcaacaggtgccagtgcagcagcaacagaaacagcatcaagaatcattaaatcaacaacactaagcattcccttgctaacgcatttcttttggggcatgcaagcaaagcattatacacttctggtaacgagaacacaatgtgattggactgaaatagctcactaaagtcaatatctcactatagttatgtagcaaatttacgatgaagtaactgattgtcacaacggctaccgcattgtcttttacattttatacttcattctttttatactctttttttcgcttttccagtagctctgcatttgcgtgatgtatttctctaacgaattttgtgtacatatgagtttatacctgaacatcaaaaacaaaataaatgaaatgaaacgaaacagtgctgggttttaattgagtcaaaaattaaacagagttgcttttagttaagtgacaaaatatttacacacttaaagttcttgtatgaaatcgattatggctgaccacaaagctccaaattggattataaagttgttgttgctgttgtggaaaaacttttcaatgctcaaaggccgcaaatgttatgtggtcagccttttctttttctttgccctcctgcctttactttgtatgtgcgcaaggcttataccgttactgaggaacaaaccaaaaattccggatccaataccaactgcggcgtttctttataatttaccgtaagtcctacatgctagtacttcctccattactagagatttaaattttttactatccttaaagctcatatatttacttcgctccccaaactaagttgatcgagtcgattgtggcagagctgaacgtaaataaaaccacaggatttgaaaactcgcacaaactttatgaagccttggttagtttttcgaaggaacaaagttctgtgattggtatcaaattttccgacccctggacagaatggcctgataagctgtctttcaccctccattctggcaagccagttgatttaaacgtggatattatgtacttagcagacggatcgtatccgttatataaaaccggcttcttagccgtacagcaggcattgagccaggtccatattaagcacaagtgtaaggaattcaataagacccagggggatatcaagtttccaccaattaaggaccttccttccccgccaatttttaagtcggacaactcatctaccttacaagatgtgggcataatgattattgtaatcattatcttctttgtggttgtcagcttgacaaaggtaacgaaattttagccgtgaaggttatattaattaatgattgtcatactctatgttacagtccatcgtcgaggaaaaggagctccagcttaaggtgacactgaacctgatgggtgtgggctcttgtctgcagtgggtggcgtggtacatccagaccttcataatattcttgatcggatcatcgataataacgttgttctggaaactcgtcctaccaaattctgagatatcctttatgcccttcacccactggtcgatggcactgttcgttctgctagtgctcagccactgcacgatctgctttagcttcctgatgagcagtctaatctctacaacatatcgcatctcgctggttacttttcttgccttgattgccacctatcttccctttttgattttgcactcaaagggatgttcggaaggattgaacgtgttcctcagccttttcttgttgtctggactgcaagtgttggtcgtcggcatttgcatgtgggaggactacggtgaaggtctacagtggggtaatctcttcgagacctcatggccgggaggcacgctgagcgttggctatatccttttggtcatgatattggctagctttctttccctgcttctatgcctataccttgagaaaatccggccaggcccttacggtgttccccaaccttggcatttcccctgcacccgctgctgctccacagaaagtctcttgccctatagccgtctctttaacagaatattcggcatatatagcgcggccccagatgaggaacgtcccgacctccaattgattgaaccagatcccgtggacaagatcgccggcgttcagatcagaggtcttagcaagactttcggcaagatggaggtcgtgaagaacgttagcttcgacatgttcgagggacagatcacggtgctaatgggacacaatggagcgggcaagaccacacttatcagtatgctggctggattcatttcgcccacttcggggacggctctgataaatggctttgacatccggcaggaacgaagacaggcccagagatgcattggtctgtgcccgcagcagaacgtcctctttaagcaccttagctcggttagtcacattcagctctttagccgccttcgaggactccggggcgcggaagtgaagtcggaggtgcaaaattacctgaagaagcttaatctgcaggagaagaagagattggctgctcggaatctctccggcggaacccagcggcgtctaagtgtcgcctgttctctttgtgggggagtcaaggtaaatcacttttgaaacggataaaacttatgcgattcattgcaagttttcgactttttcaatttttaacaaacacttcttttgttctaaaaggtctgattttttctagctttacgtttataaatttcttagttttcttactcgtccagtaggttctcatctgcgacgaacccagtaccggattggatcccagcgcccggcgggagctgtggagactaatactggaggcgaaggagggctgcaccatacttttgacaacgcaccagttggatgacggagaggtcctgggcgatcgggtggtcatcatcagcgatgggcagttgagatgcattggatcgttgccatttctcaagaaacaggtggatgccagctgcttgatcacctgcgaagccaggaagcgatgtgacctggagaagctgacttccctgatatctcgccatgtgggtacaattcaaccgttcagtattaagggcagagatgtctgctacaagctgccactcagcaagtcaaagtacttttcctcgctcttccgtgacttggagagccaaatgaacattttgggtgttcggggattcagcttaagctcagtgagtctggaagagattttcatgagctttggggcggaggacctcaattctcgccaatcggggggtgctgagaaaagagatgacgatgaccgtgacgatgatgaggaaaacgaggttcaggatggaaatgtgcgcagctgtaaaaagcaatggagagcaatgatgaccaagaaggttatggctctgtatgacaacaaggtaatatgaccataatgcaattgtgactttgatttattttaaattttgtgaaaaggtttacttcctgcttttgctgttgactcccattgtctactatataacgacactaatgatggccacaaagcctcatcattcgggcaggcccacgttcaacatcagcgattacggggtagataagttcacaattttgctttcagtgccggtaagcaagtcatatacggaagaacgtcgtgcagactctattgcgtcgttgatcaagggaaagttaaagttaatagtcgtatcggaacaaattaaggactacgtggatgacaaatggaagtcgagagagggcaggcgtgagattaactttgtgtcaatggctattgacactggtgatcggacgggtctgatcggttgggtcggacccagacactacgttcatgcggcgccgatgatccttaatcttgtctataatgccttggcccaggagctcattggaccgaaaatcagcatagaggttaccagcgttccatttacgctgagaaaaaaggaggattttctaattagcaataatggagatatcccaatatacgtcataggctatgtgagcatcgccatgattatattctcgagtgccgtaatccaagagagggtctcgcacatgaagatgctgcaggaggtatccgggctggagatgatcacctactggctgagtcaccttgccttcgacatggtggtcttttttatcttggtgctggccctgctgcttcccctgtacggatatgccccatggtaccttttgctgtgcgtgctcttcttcaccggattagcgggtctgatatttatctacttcttgatatcgatgctttcggccacatttctagccgtgtctatgatcctactatctggtataagatatctacgccctcaattcaattattccattcttaattcaatcttctaacctcctattagttattataggatccttaattttgatgattctgggagcattggcgctgatttttaaaatggtatatgtagctatatatgttgccaacatgcatccattgatagctggctataactgcatacaaaaatgctttcactacatgtctctgtgcgggtcctacatttcggaagcccaaaatccactctctgaaaatctaacttctgatgaaatgtattgcatcaaccccttggccttcttagaaccacgatgtgtgtgcgttagtgagtctagaagaacatagtactagcttacacaataatttaaattatttatatttatttatttataatagatcccatgacatggcctgatatgctggtcatgcttgggactgccatcatactctttctgttgataatgttttttgagtacggcagttgtgtttggtacagatgtaaggggtgttgcccatacagctcaaagggctcaattgaggatcccaaagtgtccagggaggctgagaaaatcagagctatggatgctgatcaaataggaactcgggcattggtcgtcaatggggtttcaaagaagtatggctgcgatcaactagccgtcaataacatatcctttgctctgaaaccgtgagtatactcaaacgcgtatagattacaatgtcatgctcttggccttaaaaacggaaacaggagtcattgcgtgggacttctcgggcccaatggagctggaaaaacaaccacgttcaaaatgattgttggcgagcattcgatcgacaaaggaaacatatatatctcaggctacagcatgaggatgaaacggaataaggcgatgaaggaactcggatactgccctcaatctgactcctttttcgagtttctcactggccgccagttgctaaaagtcttccttctgatatggggctttccaagcaaagacttgaataaacgatgtgaaaaactggccgatcagttcggtttcaggaaacacttggataaaaaggtatgtgaactagcaacatggctaacttggttaacaatagtatagatcaacgtgtttatgaccacctcagattacgtactacagtggaggaacgaagcggaaaatcaacgctgcagttgcctgtggagcaaactcacttatttgcttggatgagcccagcgcgggagttgatcccgcctcgcgacgtcacgtttggaccattatcaacgaggtggcccaacagggaaaggccgtcctgctcacctcccataacatggacgagataaacgccctttgctcgaaaagcgttatcctggtggatggcagcatatacgccatgggatcggttcagcacgtcaaaaacaaaatagccaagggaatgacgctcaagttggttgtaaatgtacaaccggataagtatgttataatttagacttgttcggcgtattttggcctatattacccctttcagtatggtggcaatgctcactaagattgaggatgacatctatatgacctatcccaacgcagaactaaagtaagtacaggtccaaaaaagtgcatatgtcggaatacgtaagaatatcatcattaaaccatttttccttagggaaaagtacgagtttagtggcaggttaacatttcaaatttccaaagacactagttggtcggagatttttgaatatgtcgagggcaatcgcagttcctggcacctggaagactattccctatcacagccatccttggaagatgcatttgaggagatcgcagaggaaagaaggaaaaagaagagcaaccaaagttaagatttgcaaaaatacaatttgtaattataaataagttttatttaattaagaaaatgaatggaataaaagcgaaaaaggctttgaaacatgaaagtggttttcagaaaaactggaactgtatagcgtttagagtttttttttgctttatctacacatggtcataaaaacgaggttgtcaaatatagagaatctctactgtttttccgctgtatatcaggtacgcactactcgtgcctaataattcctttattaaatttgttttagttgatatataaataatccaaagaaatttgatttgattaagtattaaggtaaagaagtgggtacacaagcaccaaactagacttcgattcaataaagcgtgtataaaaagtacatatttgtcttaatgtgtaccagactaacagtctgaatactatttgtttaatttaacacatcagttttcttcaactaaagaagcaaacaccgatcgttatttttacacattttgcgtttggataacaagtgttgtagttttccataccgtcgacgcaaaaagccagattattgttgccagcagtgctataaaatgcctaacaacacctttaaatggcacacaaatcttaacgttccacacgacaaacgtctttcaagatgaagctacttcttcctttgactttggcagtgattgccatttgctgcatgtcctttattgagtgcgcctcgtcgggcgacacagcaaccaaaactgggacaggcactggaactggaactggtaccggcaccggcaccggcaccggaacagccaccacatcgacaactgttgctccaacaaccacctctaccacgaccgcagaagcgaccgtgcaccacagaaggatacatcggcgcaggcgtcgcaacctaaggagactccgacacaggcgcgcagaggccgagcgaagacgccgattgggctagtcggtaaaaagtttaccttacatttttcaaagcctgcagacatgtaaatccacgcttttccgaaataaagtttctttaaaaaaatacaaagaattttgccatcactaaaagagggacaatgaaatagaatatttactgtgcatttttgaccgaataaaaagaaatttcttatttaacatgccttccgagtctttcaaattgaaacacacaatatatatactttgtcaatataaaaaaaatgtattcgacatttaattttaattaagatcttattgagtgcatccaatttattttagtttaattcctacatacatatatgtacaattatatctggtttggtgctttggaaaagtacatcgaaggaggaatttctcaattgcttaatgtggtaagtggtaagggaccctttttggtttatttattatatacaaggcttgcaaaattaagaagtgcgataaagaaattgtcgatagtagacggattctttggcacctttcgtgatacttgtttagaccagatgcggtgcccagagaaagccgatgatgagttgcactacatggtcaagtggcgcttccgccgcacggcatgaatacgttgtagataccataacccaaaaggactgggaatattcacaaggagcgccggctttcgcttgacgatgacccaatacgaaggcaacatgggtacacactcaggacgcttaacggctttcatttatggcgcagaatgaagaaggccgattcggcgaattccagtattttcgagttttagctccaccagaaggccttggcaatttgttttacaaaggagcactctctcaaatcgattctgtcagtcgcttttcatactcctgccgaggataacatgttggctatagctcagcctccagggctaacaactagccataatcgaaaacccacgtcgccgtgaagagttttaactgtcagcatccgcaggagtatgccagaacaattcggttgagttaaattcttgtttccca

SEQ ID NO: 12620 - DNA, 4599 bp, DROSOPHILA
ttgatcgagtcgattgtggcagagctgaacgtaaataaaaccacaggatttgaaaactcgcacaaactttatgaagccttggttagtttttcgaaggaacaaagttctgtgattggtatcaaattttccgacccctggacagaatggcctgataagctgtctttcaccctccattctggcaagccagttgatttaaacgtggatattatgtacttagcagacggatcgtatccgttatataaaaccggcttcttagccgtacagcaggcattgagccaggtccatattaagcacaagtgtaaggaattcaataagacccagggggatatcaagtttccaccaattaaggaccttccttccccgccaatttttaagtcggacaactcatctaccttacaagatgtgggcataatgattattgtaatcattatcttctttgtggttgtcagcttgacaaagtccatcgtcgaggaaaaggagctccagcttaaggtgacactgaacctgatgggtgtgggctcttgtctgcagtgggtggcgtggtacatccagaccttcataatattcttgatcggatcatcgataataacgttgttctggaaactcgtcctaccaaattctgagatatcctttatgcccttcacccactggtcgatggcactgttcgttctgctagtgctcagccactgcacgatctgctttagcttcctgatgagcagtctaatctctacaacatatcgcatctcgctggttacttttcttgccttgattgccacctatcttccctttttgattttgcactcaaagggatgttcggaaggattgaacgtgttcctcagccttttcttgttgtctggactgcaagtgttggtcgtcggcatttgcatgtgggaggactacggtgaaggtctacagtggggtaatctcttcgagacctcatggccgggaggcacgctgagcgttggctatatccttttggtcatgatattggctagctttctttccctgcttctatgcctataccttgagaaaatccggccaggcccttacggtgttccccaaccttggcatttcccctgcacccgctgctgctccacagaaagtctcttgccctatagccgtctctttaacagaatattcggcatatatagcgcggccccagatgaggaacgtcccgacctccaattgattgaaccagatcccgtggacaagatcgccggcgttcagatcagaggtcttagcaagactttcggcaagatggaggtcgtgaagaacgttagcttcgacatgttcgagggacagatcacggtgctaatgggacacaatggagcgggcaagaccacacttatcagtatgctggctggattcatttcgcccacttcggggacggctctgataaatggctttgacatccggcaggaacgaagacaggcccagagatgcattggtctgtgcccgcagcagaacgtcctctttaagcaccttagctcggttagtcacattcagctctttagccgccttcgaggactccggggcgcggaagtgaagtcggaggtgcaaaattacctgaagaagcttaatctgcaggagaagaagagattggctgctcggaatctctccggcggaacccagcggcgtctaagtgtcgcctgttctctttgtgggggagtcaaggttctcatctgcgacgaacccagtaccggattggatcccagcgcccggcgggagctgtggagactaatactggaggcgaaggagggctgcaccatacttttgacaacgcaccagttggatgacggagaggtcctgggcgatcgggtggtcatcatcagcgatgggcagttgagatgcattggatcgttgccatttctcaagaaacaggtggatgccagctgcttgatcacctgcgaagccaggaagcgatgtgacctggagaagctgacttccctgatatctcgccatgtgggtacaattcaaccgttcagtattaagggcagagatgtctgctacaagctgccactcagcaagtcaaagtacttttcctcgctcttccgtgacttggagagccaaatgaacattttgggtgttcggggattcagcttaagctcagtgagtctggaagagattttcatgagctttggggcggaggacctcaattctcgccaatcggggggtgctgagaaaagagatgacgatgaccgtgacgatgatgaggaaaacgaggttcaggatggaaatgtgcgcagctgtaaaaagcaatggagagcaatgatgaccaagaaggttatggctctgtatgacaacaaggtttacttcctgcttttgctgttgactcccattgtctactatataacgacactaatgatggccacaaagcctcatcattcgggcaggcccacgttcaacatcagcgattacggggtagataagttcacaattttgctttcagtgccggtaagcaagtcatatacggaagaacgtcgtgcagactctattgcgtcgttgatcaagggaaagttaaagttaatagtcgtatcggaacaaattaaggactacgtggatgacaaatggaagtcgagagagggcaggcgtgagattaactttgtgtcaatggctattgacactggtgatcggacgggtctgatcggttgggtcggacccagacactacgttcatgcggcgccgatgatccttaatcttgtctataatgccttggcccaggagctcattggaccgaaaatcagcatagaggttaccagcgttccatttacgctgagaaaaaaggaggattttctaattagcaataatggagatatcccaatatacgtcataggctatgtgagcatcgccatgattatattctcgagtgccgtaatccaagagagggtctcgcacatgaagatgctgcaggaggtatccgggctggagatgatcacctactggctgagtcaccttgccttcgacatggtggtcttttttatcttggtgctggccctgctgcttcccctgtacggatatgccccatggtaccttttgctgtgcgtgctcttcttcaccggattagcgggtctgatatttatctacttcttgatatcgatgctttcggccacatttctagccgtgtctatgatcctactatctgatcccatgacatggcctgatatgctggtcatgcttgggactgccatcatactctttctgttgataatgttttttgagtacggcagttgtgtttggtacagatgtaaggggtgttgcccatacagctcaaagggctcaattgaggatcccaaagtgtccagggaggctgagaaaatcagagctatggatgctgatcaaataggaactcgggcattggtcgtcaatggggtttcaaagaagtatggctgcgatcaactagccgtcaataacatatcctttgctctgaaaccgagtcattgcgtgggacttctcgggcccaatggagctggaaaaacaaccacgttcaaaatgattgttggcgagcattcgatcgacaaaggaaacatatatatctcaggctacagcatgaggatgaaacggaataaggcgatgaaggaactcggatactgccctcaatctgactcctttttcgagtttctcactggccgccagttgctaaaagtcttccttctgatatggggctttccaagcaaagacttgaataaacgatgtgaaaaactggccgatcagttcggtttcaggaaacacttggataaaaagattacgtactacagtggaggaacgaagcggaaaatcaacgctgcagttgcctgtggagcaaactcacttatttgcttggatgagcccagcgcgggagttgatcccgcctcgcgacgtcacgtttggaccattatcaacgaggtggcccaacagggaaaggccgtcctgctcacctcccataacatggacgagataaacgccctttgctcgaaaagcgttatcctggtggatggcagcatatacgccatgggatcggttcagcacgtcaaaaacaaaatagccaagggaatgacgctcaagttggttgtaaatgtacaaccggataatatggtggcaatgctcactaagattgaggatgacatctatatgacctatcccaacgcagaactaaaggaaaagtacgagtttagtggcaggttaacatttcaaatttccaaagacactagttggtcggagatttttgaatatgtcgagggcaatcgcagttcctggcacctggaagactattccctatcacagccatccttggaagatgcatttgaggagatcgcagaggaaagaaggaaaaagaagagcaaccaaatgattgccatttgctgcatgtcctttattgagtgcgcctcgtcgggcgacacagcaaccaaaactgggacaggcactggaactggaactggtaccggcaccggcaccggcaccggaacagccaccacatcgacaactgttgctccaacaaccacctctaccacgaccgcagaagcgaccgtgcaccacagaaggatacatcggcgcaggcgtcgcaacctaaggagactccgacacaggcgcgcagaggccgagcgaagacgccgattgggctag

SEQ ID NO: 12621 - protein, 1463 aa, DROSOPHILA
MYLADGSYPLYKTGFLAVQQALSQVHIKHKCKEFNKTQGDIKFPPIKDLPSPPIFKSDNSSTLQDVGIMIIVIIIFFVVVSLTKSIVEEKELQLKVTLNLMGVGSCLQWVAWYIQTFIIFLIGSSIITLFWKLVLPNSEISFMPFTHWSMALFVLLVLSHCTICFSFLMSSLISTTYRISLVTFLALIATYLPFLILHSKGCSEGLNVFLSLFLLSGLQVLVVGICMWEDYGEGLQWGNLFETSWPGGTLSVGYILLVMILASFLSLLLCLYLEKIRPGPYGVPQPWHFPCTRCCSTESLLPYSRLFNRIFGIYSAAPDEERPDLQLIEPDPVDKIAGVQIRGLSKTFGKMEVVKNVSFDMFEGQITVLMGHNGAGKTTLISMLAGFISPTSGTALINGFDIRQERRQAQRCIGLCPQQNVLFKHLSSVSHIQLFSRLRGLRGAEVKSEVQNYLKKLNLQEKKRLAARNLSGGTQRRLSVACSLCGGVKVLICDEPSTGLDPSARRELWRLILEAKEGCTILLTTHQLDDGEVLGDRVVIISDGQLRCIGSLPFLKKQVDASCLITCEARKRCDLEKLTSLISRHVGTIQPFSIKGRDVCYKLPLSKSKYFSSLFRDLESQMNILGVRGFSLSSVSLEEIFMSFGAEDLNSRQSGGAEKRDDDDRDDDEENEVQDGNVRSCKKQWRAMMTKKVMALYDNKVYFLLLLLTPIVYYITTLMMATKPHHSGRPTFNISDYGVDKFTILLSVPVSKSYTEERRADSIASLIKGKLKLIVVSEQIKDYVDDKWKSREGRREINFVSMAIDTGDRTGLIGWVGPRHYVHAAPMILNLVYNALAQELIGPKISIEVTSVPFTLRKKEDFLISNNGDIPIYVIGYVSIAMIIFSSAVIQERVSHMKMLQEVSGLEMITYWLSHLAFDMVVFFILVLALLLPLYGYAPWYLLLCVLFFTGLAGLIFIYFLISMLSATFLAVSMILLSDPMTWPDMLVMLGTAIILFLLIMFFEYGSCVWYRCKGCCPYSSKGSIEDPKVSREAEKIRAMDADQIGTRALVVNGVSKKYGCDQLAVNNISFALKPSHCVGLLGPNGAGKTTTFKMIVGEHSIDKGNIYISGYSMRMKRNKAMKELGYCPQSDSFFEFLTGRQLLKVFLLIWGFPSKDLNKRCEKLADQFGFRKHLDKKITYYSGGTKRKINAAVACGANSLICLDEPSAGVDPASRRHVWTIINEVAQQGKAVLLTSHNMDEINALCSKSVILVDGSIYAMGSVQHVKNKIAKGMTLKLVVNVQPDNMVAMLTKIEDDIYMTYPNAELKEKYEFSGRLTFQISKDTSWSEIFEYVEGNRSSWHLEDYSLSQPSLEDAFEEIAEERRKKKSNQMIAICCMSFIECASSGDTATKTGTGTGTGTGTGTGTGTGTATTSTTVAPTTTSTTTAEATVHHRRIHRRRRRNLRRLRHRRAEAERRRRLG

SEQ ID NO: 12622 - DNA, 6192 bp, DROSOPHILA
tgtgtgtgggccaaagcgaagggcaggaggaagtcttgccactacaatggctactgttacttcctggctggtgttgcttttggctttaagtgaaataaagttcacttcgctctcttttttatgcactcgcggctattatttaatttgcccagctgggcgtaaatgggcgacggctacggctatcgcgttggctatgacgatggagatggctttgacatggcctggacacgaaggctcttggaatgccaaagttcagttttcagcgcccaacgtttctgcatttcagcatttcattatgggccacctcatgcgatgccatggcaaatcattggatccgaatgtggcccaaagcggttgccgggcacgcagctattgaccaaagaccctgggcctgccaaatatcgaatggaaatgcaacatttttgcagatatcaaagttgccgcagtgatttgcaaaaaccaagaaggacacatccttgccggacaaaggaggctgtctgcatccgtctgccggtggagaaagaaccgcaaccgggttttgggccatgtggaaagtgccaatcccaatgcggcgaactgtgggcttacgggggtgagcatttgctcctgcgaggccatctaatctgtaagcataaattccaatcattttgcaaatggaatgtgctggcgcaaaccaataaaaccacaaaacacaacacagcagatggccgagaagccggagcagcaggactcccgtcaaactgcatgcggttcctggaataagtgaaatttttgggaccgacattgatttccccacgtatcctgcatggggcacaatcctttcaacttctcttcacattttaagtggagatctacgtctgaaaactcctttgagacacagtgtctttgtggacaatatgaaatgaaagtggttaagctcatggtatttttaacaagacctagcattaacaaagctaggaaaactaattgtctaccactacagactttttggaagaaacatagccagcttattatctacactcattttcagttatcttacataaaacacaatcccaaaccatgagttttcccagaactaacagcaggaaatcgccgttaaaaagaaagcgacttagaccatgtcatcttgactatgctaacgaacgcctatgggaacacagttacttgagggtaagctatagtccactcttattcagcaaataaggttttcgtctataggaaaaatgcaaggagctaaatttggaggaggagtataggtactaccaggtccgtctgatggtcagcaacctcacaattttttacgtattgtttataattctggccatgagctttttgacaatcgagttgctttacgtacaggtgatattttacgcttgacccacaaatcgattttagctaaataaactattatgcagcactataacgccgtattctttaacttcgttatcagagtagtaagcactatcctggttttaaccgtgttgagcatcaatttttgcgaaaaatttgtcagtcgccaccgatgggtcatgatagccagctcagtgctatcggtatatctagtggtactcacaggtgagtttatcaagttatgcattcaaaaatatgtattcacctcacagactgttcattttcagatattgttatgatctcgtatcacttttacaagaacgactggccccttaatacctcattcgatgtcttcacactctgcatgatctacatgttcctgccaattccctcgatcaagggagctgcccttttggcatcctcagtcagtcttatatatgtggcattttttatgcactcgctcacttttaacgcggtgtacactgatcgcgatagtttcggctacgatgtgatatccactgatatattacacaacctgggttttaacatgatgggcatctttttccgcattatgaacgacaccatggtgcgcgcatccttcttggaccgccatcagttcatcatggaggagacttggttgcgtcatgccttgctacaggaatcgatactcttggacagcatactaccgcctcaaattgcgaaacccgttcaggaaaaaatcaagagcaaaataacccagtccgagaacagccccgaccgctttcaaatgggtccgcgaacgacagaatccttcatggccatacaaattcatcctgatgtctctatcctgtatgcagacgtggtgaactacactcacttgacaacgacattgaccgtgggaaacctggtgaaggtcctgcacgacctctacggcagattcgatatcgctgcctccaacttcaaagtgcagcgcatcaagttcctgggagattgctactactgtgtggcgggtttgactactccggatccagatcacgcgaagtgttgcgtgtctttgggcatatccatgatttccaacatccaggaagttcggtacgttggccattgagaatggagaataggctttctttacaatgttttccatcatttgacagggctgaacgtggattggatatcgacatgcgcataggtgttcattcgggctctcttctcgctggcatcatcggcgaggccaagctgcaatttgacatatggggtactcttggctagtaagaagtaattcatttgatacaatttgatcgatatctttgtcaggaacggacgtggagatcgccaatcatctggagtctactggggaaccaggttacgttcacgtaagtggacgcaccctaagtatgctaaatccagcggattatactatattaagtggtacgcaaaaggctcaaagcgatccagtgttgcagtacatacacacctatctacttactggccaagtggcccgcgagtcatttataacttcgattggtggagttagatccagttccgttcttgaagtaaagtccatcgatcggatccggtcaagcaggccaagtcaatcatcaatgaccgatgagttccgagaagagttccggaatatgccagttggtggcattaagtaagtgtaaattatacaataatttcttgtcagtgaacaataaaaacccgtatttaaagttaaatgagaagttaaacaattgttactgaaacgtttactttctatcgtagcttaaactcaccctgctgccgacgaactagattggacactcataagaaaacccagcgggagattggcattttttgtgcggcgttcaaggactcttccctggaatggaactacctgcaccagccggacttcatcttcaagtcctcaatgctgctggcctggggaatcgggtgctgcttgatctatatccagatagtgaccaacaacttttcgtgcactgcatgcattgtggtcgacttggtaactttcttctttctgacttccttgctgtgcctcgcgtggtacaaaaacgtttgttggtggaaaagtgggcgctacgagttcagaatctatggaaaatacagctgcatggcgtttcatatttttgaaaagatccaacacagtgtgtccctgcgcattactgtctatctggggatcttattttcctactatgctgtgatttccctgataatggtgagttttaaggagaattttatcagttgtaatgaatttaaaatttgtagttaaactgtgaccgcgacatgtatgagttgagttacattgagagcaagatctatcactacgaaatggatcgggatacatgtttccatccctgggtcttcacaaacatgatttccctgatcctgggcataagctacaccttcgcccgaattccatttggcctcaagatagtgatcagctgctgcgagacacttgcctacttgttaatcgtattcttccagttcgcattcattttccagcacagtgccaccacaactccctttatgaaggcggaactagctcattgtcttcgagtgtgcatgatgttactcacgatgtacgcaaaggagcgtcagtcagaatttaatactaaaatgaactataagtaagtagtatccatagatcgtgcccccaatcgactaaatgattgtgctgttaacaggcttaatgtggacttgcaaaacaagcaaaaagcggcagatttaacaaaccaatccatcataatcctgctcaataacatactcccttctcatgttggtctgttttacggaattattcccaaaatgatcatctgaacttgatttgcttgctatcttttacagttgacctctatctcaattcattggccaaacacgagctctactatgaaaactatcgaatggtatcagtcatgtttgccatgctcatcaattttcccatgaacttgccaagcctccgggtgcttaacgatatcataacacagttcgatagactggtgagcttcctttaccaaattctaatatgggtattctaatatttccaaacgatcgcagttgactgcttacagggaatattacgtagtcgagaagatcaaagtcgtgggctgcacttatatggcggcctgtggattggactttaacctggcgtcaaacatccgccaaacggaccactttcgcaatagttccctacatgttgagggtaagtgattaatcatgaattaagttttgcaatatctgttgctttaacattcctcagaaagtatagagatatacttcctaacttataactatcatcctatcctctcattccagtggaacacgcacgtaatcatcgtatgaccgacgaaaactacgacagcgatatgaacaatgatgaagtggtcttcataatgaccaccttcgccctggacctgatgcgaactctagcagcatgcaaccgggcgtactcaagctcatttttcgagcggtccttgtcccaggggaagatctgcatcggtatctccagcggtgagataatggccggcgtggtgggagcttctcagccgcactacgacatatggggaaaccctgtgaatatggcttctcgaatggaatcgacagggctgcctggacacatccaggtgacggaggagtcagcgaaaattcttcaggagtttgacattaaatgtatataccgcggcatgaccttcgtgaagggtcgtggtgacatacccacctattttgtgggcattgacgagaaccttaaatttatgtccgcaaaattggtaaatcgtagtttgtcaagacgtttctcagttatgtcttcactagatccggatagccttaggaagagttcgtctagtgatcaagaatctggcgaataacttggtatattttttcaaacatttccgaaaaaaaatatatatttttgatatgtaaccttatgcttttcaatcagtgtgtgtggaatatcattctatattaaatcgagatacaaaaaaatttttagaatcattagggacttttaagtagtagtataggctttattaataagagcgattttcaaaaaatccaaaatatgtacaaaaaaacagcgtatgcgccaaggaaatgttatctggactacactgatgagcgactgtgggaacggggctatttaaaggtgaaaaaatcccccaatcttcaggatacttaatggtttccttgcaggccaaatgtaaggaattgtgtctagaagaagagtataaaaaatatcagatccgccttatgatcagttacctcaccgtcttcttccctttgtttatatttgtggtcgtaggatgcgagctctgtccatggattttctctgaggtgagagttcaaacttgatccataatgcgtttctgataagtctagctaaaccttgcagcaaaaaaaactcatctactacgaatcattaacggctatagttgtattagttgccgttcctggcatattgagcattaatttctttgagagctttgtgcttcgccacaggtggattatggtgttttcttcaatattgtccgcgtatattgtggtattagttggtaagtttattagccatgaccccatctgttgatccttactgactttcattttcagatatatttcagatactagtgttccatttcaagtatcactggccacttaatacattatacgacgtcttcgtcctctgcatgatttacatgttcttgccaattccttcgatcaggggagcagccctgttggccacctctgtcagtctcatgtacattggattattcatttactttttaaagtctgacgatgaagatatttcagaggtagttcatgaccttgatacgatttgcgtcgacatatttcactatttgggtttcaatc

SEQ ID NO: 12623 - DNA, 3116 bp, DROSOPHILA
agccagcttattatctacactcattttcagttatcttacataaaacacaatcccaaaccatgagttttcccagaactaacagcaggaaatcgccgttaaaaagaaagcgacttagaccatgtcatcttgactatgctaacgaacgcctatgggaacacagttacttgagggaaaaatgcaaggagctaaatttggaggaggagtataggtactaccaggtccgtctgatggtcagcaacctcacaattttttacgtattgtttataattctggccatgagctttttgacaatcgagttgctttacgtacagcactataacgccgtattctttaacttcgttatcagagtagtaagcactatcctggttttaaccgtgttgagcatcaatttttgcgaaaaatttgtcagtcgccaccgatgggtcatgatagccagctcagtgctatcggtatatctagtggtactcacagatattgttatgatctcgtatcacttttacaagaacgactggccccttaatacctcattcgatgtcttcacactctgcatgatctacatgttcctgccaattccctcgatcaagggagctgcccttttggcatcctcagtcagtcttatatatgtggcattttttatgcactcgctcacttttaacgcggtgtacactgatcgcgatagtttcggctacgatgtgatatccactgatatattacacaacctgggttttaacatgatgggcatctttttccgcattatgaacgacaccatggtgcgcgcatccttcttggaccgccatcagttcatcatggaggagacttggttgcgtcatgccttgctacaggaatcgatactcttggacagcatactaccgcctcaaattgcgaaacccgttcaggaaaaaatcaagagcaaaataacccagtccgagaacagccccgaccgctttcaaatgggtccgcgaacgacagaatccttcatggccatacaaattcatcctgatgtctctatcctgtatgcagacgtggtgaactacactcacttgacaacgacattgaccgtgggaaacctggtgaaggtcctgcacgacctctacggcagattcgatatcgctgcctccaacttcaaagtgcagcgcatcaagttcctgggagattgctactactgtgtggcgggtttgactactccggatccagatcacgcgaagtgttgcgtgtctttgggcatatccatgatttccaacatccaggaagttcgggctgaacgtggattggatatcgacatgcgcataggtgttcattcgggctctcttctcgctggcatcatcggcgaggccaagctgcaatttgacatatggggaacggacgtggagatcgccaatcatctggagtctactggggaaccaggttacgttcacgtaagtggacgcaccctaagtatgctaaatccagcggattatactatattaagtggtacgcaaaaggctcaaagcgatccagtgttgcagtacatacacacctatctacttactggccaagtggcccgcgagtcatttataacttcgattggtggagttagatccagttccgttcttgaagtaaagtccatcgatcggatccggtcaagcaggccaagtcaatcatcaatgaccgatgagttccgagaagagttccggaatatgccagttggtggcattaacttaaactcaccctgctgccgacgaactagattggacactcataagaaaacccagcgggagattggcattttttgtgcggcgttcaaggactcttccctggaatggaactacctgcaccagccggacttcatcttcaagtcctcaatgctgctggcctggggaatcgggtgctgcttgatctatatccagatagtgaccaacaacttttcgtgcactgcatgcattgtggtcgacttgatccaacacagtgtgtccctgcgcattactgtctatctggggatcttattttcctactatgctgtgatttccctgataatgttaaactgtgaccgcgacatgtatgagttgagttacattgagagcaagatctatcactacgaaatggatcgggatacatgtttccatccctgggtcttcacaaacatgatttccctgatcctgggcataagctacaccttcgcccgaattccatttggcctcaagatagtgatcagctgctgcgagacacttgcctacttgttaatcgtattcttccagttcgcattcattttccagcacagtgccaccacaactccctttatgaaggcggaactagctcattgtcttcgagtgtgcatgatgttactcacgatgtacgcaaaggagcgtcagtcagaatttaatactaaaatgaactataacctccgggtgcttaacgatatcataacacagttcgatagactgttgactgcttacagggaatattacgtagtcgagaagatcaaagtcgtgggctgcacttatatggcggcctgtggattggactttaacctggcgtcaaacatccgccaaacggaccactttcgcaatagttccctacatgttgaggtggaacacgcacgtaatcatcgtatgaccgacgaaaactacgacagcgatatgaacaatgatgaagtggtcttcataatgaccaccttcgccctggacctgatgcgaactctagcagcatgcaaccgggcgtactcaagctcatttttcgagcggtccttgtcccaggggaagatctgcatcggtatctccagcggtgagataatggccggcgtggtgggagcttctcagccgcactacgacatatggggaaaccctgtgaatatggcttctcgaatggaatcgacagggctgcctggacacatccaggtgacggaggagtcagcgaaaattcttcaggagtttgacattaaatgtatataccgcggcatgaccttcgtgaagggtcgtggtgacatacccacctattttgtgggcattgacgagaaccttaaatttatgtccgcaaaattggtaaatcgtagtttgtcaagacgtttctcagttatgtcttcactagatccggatagccttaggaagagttcgtctagtgatcaagaatctggcgaataa

SEQ ID NO: 12624 - protein, 878 aa, DROSOPHILA
MISYHFYKNDWPLNTSFDVFTLCMIYMFLPIPSIKGAALLASSVSLIYVAFFMHSLTFNAVYTDRDSFGYDVISTDILHNLGFNMMGIFFRIMNDTMVRASFLDRHQFIMEETWLRHALLQESILLDSILPPQIAKPVQEKIKSKITQSENSPDRFQMGPRTTESFMAIQIHPDVSILYADVVNYTHLTTTLTVGNLVKVLHDLYGRFDIAASNFKVQRIKFLGDCYYCVAGLTTPDPDHAKCCVSLGISMISNIQEVRAERGLDIDMRIGVHSGSLLAGIIGEAKLQFDIWGTDVEIANHLESTGEPGYVHVSGRTLSMLNPADYTILSGTQKAQSDPVLQYIHTYLLTGQVARESFITSIGGVRSSSVLEVKSIDRIRSSRPSQSSMTDEFREEFRNMPVGGINLNSPCCRRTRLDTHKKTQREIGIFCAAFKDSSLEWNYLHQPDFIFKSSMLLAWGIGCCLIYIQIVTNNFSCTACIVVDLIQHSVSLRITVYLGILFSYYAVISLIMLNCDRDMYELSYIESKIYHYEMDRDTCFHPWVFTNMISLILGISYTFARIPFGLKIVISCCETLAYLLIVFFQFAFIFQHSATTTPFMKAELAHCLRVCMMLLTMYAKERQSEFNTKMNYNLRVLNDIITQFDRLLTAYREYYVVEKIKVVGCTYMAACGLDFNLASNIRQTDHFRNSSLHVEVEHARNHRMTDENYDSDMNNDEVVFIMTTFALDLMRTLAACNRAYSSSFFERSLSQGKICIGISSGEIMAGVVGASQPHYDIWGNPVNMASRMESTGLPGHIQVTEESAKILQEFDIKCIYRGMTFVKGRGDIPTYFVGIDENLKFMSAKLVNRSLSRRFSVMSSLDPDSLRKSSSSDQESGE

SEQ ID NO: 12625 - DNA, 3386 bp, DROSOPHILA
ttgacgaagggttgatgtcgctgctcgcccctgccgaaaggaatgataaaaaaaagaggaaaacatattggagaaggagcaggcatgtccaatgggtcgcaggacccagccagtgtccaacaccccgcatcctcagcccacgatggtaaccgagacttggcaagtctgttgtcggcgttgttgctgcattgacaagtcgacgttactaatgacccatcgctattcatgacccccgacaaagggaacgacgtatgacatggttgtttgtgtgtctggctgcacctgaagaaatgcctgctttaaaatggaacttagatcgataataagattcagatatagctaatattcagtgagcaacggtattgactttccaaaggaacaacaattaaagaacaaagtacgtctgtgattaaggagtaggaaggatatagaacttctgccaaaggaactcatttttcgcttagtgcaagcttgttgcagccttgttggctgcattcccccatccccttgtgcactgccacccccgacaacattcagcaaatgaggcattaatatccagccggggacctcctgaacccagaagccagagcccaaaagccacgcggcgaccccttttccttccgatggcctccgggcttcgcagctccggcttccatgttttcgagtatgtcagggcaaatattagtattccacttcagagtgagcattttgtaatggaaagtgttgtcgtcgcagctctcgtcctgctgcatatccatcaggcgagcaaccaagcgcaagtaatgtgtcacattacaaatgttgtttccgttcccagcgaagtacaccaccaccacccctcccgcatcactgcaccacgatgcagttcaataacaaaagtattaaccacgacacttgctgaaatcgacacaaccataaagcaataagcgccactttattaacttatcaagcagaagcagaaattatggatgggcttggtattgggggaatgttcgatggattagtgcagcagcagcagtgcatttgtgtagaagaccaaggccaaatcgcttatgtgctggctatcgccgtcgtcagccaatacatccatatccttcggcgagtccccctccagccagctgccaatttccattacgttgcgccagttgacaaactcattgtagccaaacaggccgcagatggtggctgcgatgtcagagatatgtggcaaggcaaagatatatgtcagcgatagcccaacaaggatagcccatagaacagcagtagctgcaacagcgatagcagcatcaccaccaccaccatcaccggcccactgaaccctgctcaccttgctccagatacagatcgcgatacacgactggcagccccaggctccggatggcgttctgctcgcgttccacctcatcgcactgactcttggccagcagttcgtaaacctgaggtgggctgaggtggggggcacatgcctgatgctccagcacgtagagcagcaggaccctagatggaaatatcgtctagctttagatgtcttaagcggtggatatatgtatatgtacgcttactgatgggttctctggtatccgtaggctggtgcatcactggccaaaagttccaaacattcgccggagagcagcttgcagtggggtggcttcagttccacaatgtcccggaggcagaggtctacacacaaaggtaaatcaaacgataggttcaatgaatgtattgttattatgatatatattatatatatgctatatataatatatgaactcaaactcaccggactgcgtcctgttcagctggccctcgttgaccactttcgggtagacctcggccagctgctcgtactccccattggcattcagttcgcccagtttcagcgagggaggcagcagcaacacattcgcctgaaaggcaatgctgagaactaaccagaaattagcataaacaataatacgtagttagttttgtagcaagcatactctccccctggacaccatgctccctggaaaccagacccgatccccttctgatgtgttccatcctgtgcagcagatggtagtagagctgacgttcgtaacgcgtaggcgccacgtaacgcagtttctctgcaatgcacggggcataaataaatacgcacatccgtcatccgtatcgcaagtgtacggttcattgggctcacgttttatcagaaactgcgagagcaacagggcgaatgtagagctggcactcaggcggcgtcctccggagaggcggtccagcagacggtagatgcggtgcggcaggacctggtcagtatccgatcctgatccatggattggcaccaggaaacagccggtaatggccagtagaagagcgtatttcaggcccaagagcaacatgttgtcggtttaccagcccggagtcgtctacaccacgtcttcatcctggccatctacaagtcacatcggaccgcgtctttgatttcgccacttcatgaagattaattgagccgcatttgtatcgccggctgtgcggaggctcttttattcgtccccgggggtgcggagtataaagtttctcatattaatcacaatttacagctgaatacatttcgcagattgaaggattggctttcagtttttgtgggaattcagcatttttctttgcgtgggcagctcatatcctttgagttctgatgtggcggcggcaagttttgccgcctttcattttaaatttaacatgacttcaagcgagttaacagagctatatgtaacagctgcaactctatggaaagtaaatgctatccgattgtcagtgttttatttgtcgtccaaattaatcaatttccaatgagcataggttaaaaaatttaaaaaaaaaaatacatgaatatataaaaaggtttgaagaaatttatttcaaagtgccgttagcagcagtagcgctactgcgcataaatcgcttactctcaactggtcacactgactagccacttttttctttgtgtaattttttgtagtgaaaatcagtagagtttaaagaagagtttatcggccaaacaaagcgaaccacaagcgtttccaatgtcagagaacaaggacgaggccttgaccagttttcaggtaatgctcttcatagatctcaaccgaaaaacccgtcaatttcgctgcgcacattgcgatgcgtgtgcgtttttggtgtatgggtgactttggcagatagctccaatatcgaactatatggtactaaatgatctttatgctcatccgcagagcattacgggcatcgacgatgtgggcgaagccttttcccacttggaggccgccgactggaatcttgtggtgagtgtgcagattctttgttcagttgccctgctttggattccccaactccgcaaatatgcc

SEQ ID NO: 12626 - DNA, 950 bp, DROSOPHILA
acaacatgttgctcttgggcctgaaatacgctcttctactggccattaccggctgtttcctggtgccaatccatggatcaggatcggatactgaccaggtcctgccgcaccgcatctaccgtctgctggaccgcctctccggaggacgccgcctgagtgccagctctacattcgccctgttgctctcgcagtttctgataaaacagaaactgcgttacgtggcgcctacgcgttacgaacgtcagctctactaccatctgctgcacaggatggaacacatcagaaggggatcgggtctggtttccagggagcatggtgtccagggggagattctcagcattgcctttcaggcgaatgtgttgctgctgcctccctcgctgaaactgggcgaactgaatgccaatggggagtacgagcagctggccgaggtctacccgaaagtggtcaacgagggccagctgaacaggacgcagtccgacctctgcctccgggacattgtggaactgaagccaccccactgcaagctgctctccggcgaatgtttggaacttttggccagtgatgcaccagcctacggataccagagaacccatcaggtcctgctgctctacgtgctggagcatcaggcatgtgccccccacctcagcccacctcaggtttacgaactgctggccaagagtcagtgcgatgaggtggaacgcgagcagaacgccatccggagcctggggctgccagtcgtgtatcgcgatctgtatctggagcaagccaccatctgcggcctgtttggctacaatgagtttgtcaactggcgcaacgtaatggaaattggcagctggctggagggggactcgccgaaggatatggatgtattggctgacgacggcgatagccagcacataagcgatttggccttggtcttctacacaaatgcactgctgctgctgcactaa

SEQ ID NO: 12627 - protein, 314 aa, DROSOPHILA
MLLLGLKYALLLAITGCFLVPIHGSGSDTDQVLPHRIYRLLDRLSGGRRLSASSTFALLLSQFLIKQKLRYVAPTRYERQLYYHLLHRMEHIRRGSGLVSREHGVQGEILSIAFQANVLLLPPSLKLGELNANGEYEQLAEVYPKVVNEGQLNRTQSDLCLRDIVELKPPHCKLLSGECLELLASDAPAYGYQRTHQVLLLYVLEHQACAPHLSPPQVYELLAKSQCDEVEREQNAIRSLGLPVVYRDLYLEQATICGLFGYNEFVNWRNVMEIGSWLEGDSPKDMDVLADDGDSQHISDLALVFYTNALLLLH

SEQ ID NO: 12628 - DNA, 14768 bp, DROSOPHILA
agcacgaattgagattaggattaccattcttaaaggccaaatagatatatgtacgtagcctgcctaaagaaagaactattagctattttaagttaagttgtggatgcagatgtttcctatcttatcagctacaattataatggctttttggaaacccaaaaggcttactaaactacaaccgaaaatatgtcttctagatattaaataagacttgggtaatgccatcacaatactgctctcgtgtaaccaactcacctaatacttgtctgtccgcccaaatcccagacctggaacttgaggttcttgtaggtgacctgctccacgttgaagccgatggtgggtatcgtggtgaccacctcgcccacctgcagtctgtagaggatcgtggtcttgccggcgccgtccaggcccaggatcaagatgcgcatctcccgggagccgagcagtccgcgaaagtagctgagcaccccacctggaagaagaacgtatgatttttatgaccagacttcgtcaccgggtgtcgccggaacggggaggttccccacgtccatgctccgtgctgtacaaacccatgattacggctgaactttgtctagtgctggcgctgcctctaaatgcttaagtttagtaaacctagttaattgtatgtggtgctacaattaatacaaaatcgcagaagtcttgttttcacttttttttgggctggagaatggtttcgtttttgccattcgcaggtcacgcgaacatgacgtgtcacagcgtgcgttcagcacgaatatatttttgtaaaaaataacattttaataactttaaaaaaacgtttaatatcattaattaaatttaaataaataccattttaaggagtgcatacagattaattataaaaatattcacagtgacttgtgctgaacgcgcccacctttattgccggttcacagagttgccacccttgcgtgacttttgttatagagacggccgccattagagttttgccgtcgcgtcgcgttgtgaaaagagaagaaaaccttctgaaaacagtgctaataggtaatactttcggtgccaaatggagcaatccgattgcgttcttcgcgtgcgattagcgtgcagttgatttcggccgatttggcgtatctttagccgttattttgggtttgcaccgggctgcgcgaaaaagtgtgccaaaagaggcacacaaaacggtagctacgattacatatcgtggctatagcttctttaatgttggtaaatacagtgcattgacgtgtgttccatctgcagattaggctgcaccagttgctggatatcgctattggataaagtcaagaaaggagctgcaatatggcctcgccctctccggcgaacagtcccatgccaccgccacaggcgcccagtccgatggccccgccctcgcagagtcccgccccctcgccgcacagcccgtatccgcaccagcagccgggtccactgcaaggacctccgccacccggacatcccggtgcctacggacatcccatgcagcacggaccacccggccagggtccacccgggcatcatatgccaccgcaccaccaggggatgagtatgttcttaaacaacccaacaccaatcgctccagtcacacgtaattatccgtagttttctcaaaaggtccgcacatgggaatgcagatgccgccgacgggaccgaacatgtccccctaccaaacccacggaatgccacccaatgtaagtgacccccaagtctagccgtaggaatcaaaatagtaagcctacttagatgtctcagttctcaaatcaaatctatgccatctggacaaacagtagctcagtgcaaacattgaaaatatttccatcgatactttcaaaatttttataatcagtaattagcaagtttttaaaatacttaatacgtttgtaaaagatcctataaaatctacatagtattctaaacggtagattaaggatttctttaaatttctttatttactttactctatatacagatatgggtacataaatatctaaattccatgttagactaacatttttctgagggatgctatatgaaaaaggtataaacaatacgaaattcgtgaaactttgtgaataagtatagaaatactaaatttccaagtaggtaatctgtatattaagttgtttgccagctaaatgcttaaaattatggtatcatacggtgttgtttttcaaagtctcaagattgacgggctttcccgcctttttgacgtgtatcgtggaacagctgccggcgattaaagctggaatatatccgaaagctccccattagcagagcttcgagcgccaattggcagtgcagctgaccccaagcttttcaattaagatcgttgttgccttgcctaaattacttctgcaccggcttccctcccacggactcctcctggtctcccttacgcagaaggtcttcgatctccttgcgcaacttctctgtgccggcgcagattagatccggcttcattatgtcgaatggtccgccaaagggatgtgttaccacgcctcccgcctccttaaccaacagggagccggcggcacaatcccagggatacatgtcctcaatgtagaaggcatccagattgccagcggccaccatgcacagctcatccaccacacaggagtaggcaacaagtctgtggatttatgcaatattttgtaaggggtaatttctttttaaaaagctttaaaatctttttaattatcttcgagaacaaaaggcaattaaagcttttcatttagcagtgactggttaattgcttagtactcagatacttttgttttgttaatttcacagatttttacccactatatcaacgggatttagttttgcgaaatagattcaaatttataaatgatttacttaccgtctagcattcaatcccacatggtagatccttttgatatgcttgttggccaccgaatggacatgcagcagggacacttcgtaggccacattggcatccttaacgctctcgcagctgctcacgtggattggtttgccattgcaaaaggcgccttggcccagtttcgttgtgaagagctttttctggacaggattgttgattactcccactacgatttgtttgttgattgccaaaccgattgaaacgcaaacgtgtggaatctgcttgataaagttcgaagttccatcgatgggatctatgatccaggtgggagcattcgtcagctctccggacacgttgttgttcttagccgtctcctcctcgccgatgaacttgtgatccgggtatctggccaatattttctccatgagaaagtcctcaatcttgttgtcgtagtcggtgaccacgtcgtagaaatcgcctttgattgagacgtttttactggccatctcgtagccctccatgaggatctcgcccgctttgatggccaggggatggataaagttgtacaactcctcgatatcagcttgacttactcctgccatcttgcttctatgcgtattcctttgggcaaaaaacgatccgtcgctgctcagctcgcgatgtcaactaatcggagagattgcaccccactgggagaagctccacgctccggctgattttgtctagctggcgctggcgctggagaagtgcttgcggttcggttacaattcactcgttctatgattgtttgcctgcctcgcgtttttatgatcgctgcgacatcgccccataggggtgtactaaaaattggcagctcacctggctgcgtgcctctgttttatctcaattggtttgatgtacacaaatagacatactcttttttatctccacacagacagccagtcaaatagttgtaaaacccgtttttatcagcatttttcgacgctctcagactttattattggatgatttacacactcgagctgcaagtcataatactcagagaaaccttgcagatattatgttaaaattgatcgtaactgtattataaagatcaatcacttgtcttataatctttaaactttgcttttatgcttatcattaaacatattcgtattgtttcatacatccatcatttccaatctattgaatatagttgtttagacttcatgaatatatattaagctttatgatttatttaaaagtatagccgctaatttggtcggctccttctatcaattggattacacttttggccaattcttcagagctggtgcacacacagtcgggtttcatcacatcgaatcttgcaccgcttgtgtgatataccctgccaccggcttccctgaggattaccgcaccgccagccagatcccagggctttagattctccacatgataggcgtcacatctgccggcggctatatagcagagcgtgagagctgcgcatccaaagctgcgggtgctgatagcggaatgcagtgtagatgatggggaatagatcagagttctctgggtcactcacccagtggcactcgaggccagcttgtagagacgcttcacgttcttgtcccgccccttagacaccacgattagggagatctcatagcacaccaatgcttggtttatctgcaaatgttaccgaaaatgcttgtgtcacttacgcttgcgaacttcgtagcagataaagtactagaaaaaatatattgggttatatgtgattttaaagtcttagaaagaaaccaacttttaaactgagtttcattttttcaagtgatattttagctaaattacttaagacctttaaagtatagtacacatccagcttgttctttatggccactgagtgagtcttatcagcttcaaatctctaagataagccattatttcatcactttcgcgaaacctaccttcttagcgttggaaacctcaatgggttgtccatttaaataagctccgtggccttgccaagctgaatacaactcatttgcagatggattgtacacaatccccagcaccagctctttgtttatggccaagcccacggaaatacagcaatgggggatctttcgaacgtagttgttggtgccatcaatgggatctatgatccaagtgggggcatccgtcaactcaggcggcgttttggcgttggccatagcttcttcgcctattattttggattccggaaaggtctttagcaaaccatctgttagagtggcttctatttgcttgtcgtacacggtgaccaagtcatagaacgctgacttgacttcgtaatcggttttcggtttctggaaaccctccaaaaagagcggaccgcacttcctgaccagttccagggatacctggtaatatacttcaagtttttcctcgccgattcggtaactcatggctcgtctatcgactgatcagagtagaaactaatacttaatttagaaacacagctgacattatggtaaagctttcttcgcaagctcctgaaagttctgcgatacttatatgtacttaggtcgttttattgtactggaatatctgcgcgattagaatagtttacaagtgataaatgtggatactgtctttgcatactgagcctttaactgtctttacttaaatgtgtactctgtaatctgaccggcctcttcgataagactaatcacattcttggccaactccggcgtggcggcgcacacgcaatccggtttcatcacatcgaatttggatccgctggtatggcacacagtgccgccagcttcggtcagaatgatggctccggcagcaatgtcccacggtttcagatcctccacatgataggcatcgcactggcccgtggccacgtagcacagggtcagggcggcacttccgaaacacctggttcccgtggcattcgaggccatcttgtacagtcgcttcacattcttgtccctcactccggcggcgtggatcagggagatctcgtaggcaatcactgcttgcttgatctggaaaggggtacattagttgtgagagtaattgtatatgcgcttaattttggagagctatttttgtttggtggtatacgaatgaatgatatcggtgcaccgaaaaaaatgttagcagattgtatttttccattccaaaaagttgttataacaattgtatgggaattttgttataaagcggttataataaattattttatcacatttatcaaatttctcaaacattcctatcgaaatgcaaatttaagtttagccaaccttttttttttttttttgctgtgcaccgataaacctgtttgcaggaataatgtcatgcacggttatttgtcaaatttcgtttatctggtttgtcgctatacatagtattgttgctcccgggttatataagcacactcttaccgtcgtcactttggatgtgtggatgggttcgccattcagataggctccgtgtcccttgtaggcggagaatagttcattcgccggtggattgtagataatgcccacgaccagctccttgttgatggccaggcccacggagatgcagcagtgcgggatgcggtgaatgaagtttgtggtgccgtcgatgggatctatgatccacgtgggtgcatcagtcagctccgcctggcgctgtgaaactgccgactcctcctcgccaatgatcagggattcgggaaaggcggccaccaatccctcggtcaaaatatcctcgatttgcttatcgtacacggtcaccaggtcgtagaagtccgccttgaccttgtattccgtctttgccttctgatagccctcctgcatcagaggcccgcacttgaggaccagtttcagggccacatcgtagtactccttgagcttggactcgctgaccgcggaactcattgctatttctgttggtttccgactgagcagcagaactatatagacgcgagtcagctgtggaatgttggcgacgccagaggaaagctttctgccgaagctttcattgatgcaatagaactttggacatttaggagagcgcgatagagttgcttacgaaccgttgttccaagtttatggatgtgatattactacactagtcagccaagaatcagaaaatactattattgttaacatttaaaaatccatgaatgcataggaaattctttttactatttaagataattttattattttaataaaattgagtataaattggtatagaatttaaagaaaaccatttttatcttcatagcctgtagtatattttctgatatacgaatttaatactacataactgcaataggatataggatatatcccaatctatcttctactattacctatcatacataggatatattttcataatacattgcgtattttaaagatgtaaaggtgtgtttccttgaagttgtatgatggttattagagactatcttgtgtgttataaattcacaattcgtgagtggatgaactgagctgatatgagcagttcatgtgcagaggaaaaagacaaaagagacatcgtttaaataagattctgttttatgttgatcattaaacttttatttgttgacaaaagctctttgcgtgtggcttacaaatctcactctcctcccacatgcttctcctgatcagccttccgaataagatgctctatctcagctctcagtgtctccgttccggcgcagattagatctggcttcatgatatcgaagggtccgccgtagggatgcgtgacaactccgccggcctcacggatgagcaaatagccagctgcacaatcccagggatacatgtcttcaatatgaaaggcatccaagttgcctgcggccaccatgcaaagggaatccactacagcggaatatgccaggagtctgaaaaggattcaaaactttaatagttgtataattaataggctaccaccacctgaccttctggcattggatcccacatggtagattcttttgatgtgcttgttccggatctttggagcgtgcagcaagcaaacctcgtatgccacattagcatcgttgagatgttcacagctgctcacctgaattggtttcccattgcaaaaggcaccctggcccaatttcgcggtatataacttattctgtgcgggattgttaactacacccagcacgatctgtttcttaatggacaatccaattgaaaccgagacatgtggaatttgtttgataaagttcgaggttccatcgatgggatctatgatccaagttggagcatccgtcagctctttcgttacattgtcattcttgtgggtatcctcttccccaatgaatttgtgatccgggtagcgcgccagtattttctccacgagaaactcctctatctggttatcataggcagtgactacattatagaactccccgtccttgagggccaccgccttgccagcattttgatagccttccaacaggatttccccagctctcactgcgagcggatagataaagtcgtacagctcctcgatctgggacttactggctgccatctcagttacttctccaatttgcttatctacctatctgtgtatcttgcaatgcttttgcgatatattgcacctgttccgacttcgtgtcgagtgaataaagcactgaacaagttttcacagttcagtaactcggttcactgtgtggcattcgctaactgagattctgggcgagtgggagcttttattaatttatttgcacttaagtcagcttttgtgcaaaatggaatttgtagtacgttcattataatatttacaaaattccattccttcttttacaaaattaaaatagttaatttaatttaacattacgttgaatgtaattgatgaagtcgttattaatctaaattcccttctctttcaggcacccacacaaccctgcatagtgtcacctggtggcccacctggaggcccgccacctccggagcgctcgagccaggagaacctgcacgcgcttcaacgcgccattgattcaatggaggaaaagggcttgcaagaggatcctcgctactcgcagctgctggcaatgcgagcaacctcgaagcatcagcaccttaatggcaatcaggttaacttgttgcgcacacagatcaccgcctatcggttgctggcgcggaacaagcccatatccatgcagatgcagcaggcgttgcaggccgcacagcaacagccaccgccaggacctccaattgggccacctggagcaccaggcggaccgccaccagggagccagcatgcaggacaaccgcccgtgccgccgcaacaacagcaacaaccgccaccttcagcaggaactccaccccagtgctccacgccgcccgcaagcaatccttatggaccgccagttcctggccagaaaatgcaggtagcgccaccaccgccacacatgcaacagggacagccattgccaccacaaccgccacaagtgggtggacccccgcctatacaacagcagcaaccacctcagcagcagcaacaacagtcgcagcccccgccaccggagccacatcagcaccagttgccaaacggaggcaaacccctgagtatggggccatctggcgggcaaccactaataccttcatcacccatgcagccacaagtgagagggacactgccaggaatgccgccaggtagtcaggttccgcaaccaggaggaggtcctcagcgacaggtaccacctgcgggcatgccgatgcccaagcccaatcgcattacaacggtggccaaacccgtcggtctggatcccataacattgctgcaggaaagggagaataggatagcagccaggatatcattgcgcatgcaggagttgcagcgactgccggccacgatgtccgaggatctgcgtctgcaagcggctatcgagttgagggccctaagggtcttgaacttccagcgacagctgcgtatggagtttgttcagtgcacgagacgagataccactttggaaacagcgttaaacattaagctctacaagaggaccaagaggcagggcctgcgggaggcacgtgccaccgagaagctagagaagcaacagaagctagaggctgaacgaaagcgtcgccaaaagcatctggagttcttggctgctgtgcttcagcacggcaaggatctaagggagttccacagaaataataaggcccagcttgcaaggatgaacaaggccgtgatgaatcaccacgccaatgccgagcgtgaacagaagaaggaacaagagcgcatcgaaaaggaacgtatgcgacgtctgatggccgaggatgaggagggttaccgcaagctgattgatcaaaagaaggacaagagattggctttcctactgtcgcagacagatgagtatattagcaacctaactcagatggtgaaacagcacaaggacgaccagatgaagaaaaaggaggaggagggcaagcggctgatacagttcaaaaaggagctgctgatgagcggagagtacattggcattgatgagggcagcattgttgccgatatgcgggtacatgtggtggaacagtgcacgggtaagaaactcaccggcgatgatgcacccatgctgaagcacttgcaccgctggctgaatatgcatcctggctgggattggatcgacgacgaggaggacagctgtgggagcaacgacgatcataaacccaaggtggaggagcaaccaacggcaacagaagatgccaccgacaaagcgcaggcgacgggcaacgatgaggatgccaaggatctaattaccaaggccaaggtggaggacgatgagtacaggacggaggaacagacgtactacagcatcgctcataccattcatgaaaaggttgtggagcaggccagcatcatggttaatggtacgctcaaggaataccagatcaaaggcttggagtggttggtttcgctgtacaataacaatctaaatggtattttggccgatgaaatgggtttgggtaaaaccattcaaaccatttcgctggtaacctaccttatggatcgaaagaaggttatgggtccttacttgattattgtaccactctccaccctgcccaattgggtgctggaattcgagaagtgggcgccagccgtgggtgtagtcagctacaagggcagtccgcagggaaggcgattgctgcaaaatcaaatgagagcaaccaagttcaatgtgctgttaaccacatatgagtacgtgattaaggacaaggcggtgctggccaagatccagtggaaatacatgattatcgacgagggtcaccgcatgaagaaccatcactgcaaactcacccaggtgctgaacacccactacattgccccctatcggttacttctcacgggtacacctctgcaaaacaagcttcccgagttgtgggcgctacttaatttcctgctgccctcgatctttaagtcctgctccacatttgaacagtggttcaatgcgccatttgccaccactggcgagaaggtcgagctaaacgaggaggagaccatccttatcattcgtcgtctgcacaaggttcttcgtcctttcctgttgcgtcgcctcaaaaaggaggtagagcaccagctgcccgacaaggtcgagtacatcatcaagtgcgacatgtccgcgctgcaacgcgttctctacaagcacatgcagagcaagggtgtcctgctcaccgatggttccgagaagggcaagcacggcaagggaggcgctaaggcgctgatgaacacgatcgtacagctgcgcaagctgtgcaaccatccgtttatgttccagcacatagaagagaagtactgcgatcacactggcggccacggagttgtatccggtaagtttatcttgttaattttttggtatatttatatttacattggtataatctaatctttttcaaattaaaggaccggatctgtatcgtgtctctggcaaattcgagctgcttgatcgcatcctgcccaagctgaaggcgaccaatcatcgcgtgctgctcttctgtcagatgacccaatgcatgaccatcatcgaagactacctgggatggcgccaattcggctaccttcgactcgacggtaccacgaaggccgaggatcgtggcgaactactgcgaaaattcaacgccaaaggctcggatgtatttgtctttttgctatctacccgagctggtggtttgggtcttaatctgcagaccgccgatactgtagtaatcttcgactccgattggaatccccatcaggatctgcaagcccaggatcgtgcccatcgtattggtcaacgtaacgaggtgcgcgtcctgcgactaatgacagtcaactcggtggaagagcgcatcttggcagcagccaggtacaagctgaacatggacgagaaggtcatccaggctggtatgttcgatcagaagtcaacgggtagcgagcgacagcagttcctacaaacgattctgcaccaggatgacaacgaagaggaggaggaaaatgaggtgcccgatgacgaaatgatcaacatgatgatcgcccgcagcgaggaggagattgaaatatttaagcgcatggatgctgagcgcaagaaggaggatgaggagatccatccgggtagggaacgtctgatcgatgagtccgagctacccgactggttgacaaaggatgatgacgaagtagagcgtttccactatcagtacgacgaggataccattctaggtgagttacactgctcgctgttatttaaacatttttcttacgataactattccgccttaggtcgaggctcccggcagcgaaaggaagtagactacaccgatagtttgactgaaaaggagtggctgaaagccatcgacgatggcgctgagttcgacgaggaagaggaggaagacgattcgaagcgcaagcgacgaaagcgtaagaatcggaaggaagagtccgacgatgattcgttgatcctaaaacggcgacgacgccaaaatctggacaagcggtccaagaagcagatgcacaagattatgagtgcggttatcaagcacaaccaagatggacgaaccctgtccgaaccgttcatgaagttgccttcgcggcagaggttgcccgactactacgagatcattaagcggccagttgatattaagaaaatcctgcagcgcattgaggactgcaagtatgccgatctcaacgagctggagaaggactttatgcagctatgccagaatgcacagatctacaacgaagaggcgtctctgatttacctggactcgattgccctgcaaaaggtattcgttggggccaggcagaggataacagctgcagcggatgcagccgcagtggcagccggagataacacgggtgaagcgcacggcaatggaggttcggataattcggacaacgacgacgacgatggtggcgatgacggctccgacgacgaggagattgcaaccacttcagcggcggctgtcaaaatgaagctgaaactgaacaaatctctggctagtgcgcccgctacgcccacgcaatcatcgtcgaatgtgagcagcggagcggctaccacatccaagaagcagacgcgtcgcaagcgctcccaaaagaagtacactatttcagacgatgacgacgatgacatggactagctaccgttgggagtgatcttcaagcgcggatcgtcggatgtcgaaggcatgggcaattgattattaattagtttaagttttactttcaaggacgatgcttaccaaaaccctagcctacgggtttttttaaccatctaacctatcatgctatcacttttatctatactaattttctagttgtaggttctcgattaagtttcctattcaattattttcgcacacaccatttatttctcccaattctattgattgtataattatgtgctttaaaataaatgcatacctaacataaagtaaatcgaaaaacttgtcattaatggacggcggattgctccttgagagattgttcaacctagaccaggctggaattagtaacaaagatcttatttaaatcggtacctaaatgaatacatcgctgctagcgtataaaggaaatggttttaaatatatcaaaatgggaaaattatgatgtttcgtttaattaataagttgtattttaggaagtcttacagtaattaaaattagcttcagcatttctacttattacatttataactaagctccttcaaataaatgcatacttaaacatattgatatgcttggtaagactaaagcaggtagtggaagtactcgtcgcacatctcgtggacactagcggtgtgctcctcgtcgccgctatcactgcttcgcaacgtgattttgtgtgcattggcgtacaagtcgtcctcatcaacagccgcatcgtcggtttctattaattgaaattgcaaaagtgatgtggcagaaatgatagtggacgtaacttcgtgacctcacctcggtacttttgtttgcgcctcaaccgttgcttggagcttgagagcactgcttcgtcgcccagatccaattcgttttcgcgggagttccgggagtaacgaattggcggtgccaggaaccagtaggattgcatgatgcctttgagacccggcatttgacgcagttcggccaatttgagcggctgcctggacaatgcttggaaagatcgcagctgcagtgtgactggttgcgaagtgcagttgatcagcctaattacggacttcgcggctgtggagcagaccatgggatatattttgacatccggatccgtcgggacattggtgtaggccactcccagcgatctgcggttcaaatagaactccaagtgcccacgcgttcgatccaaacagacaccaatcaagcagccctgcgagaacttctggccgtagggcagtaactcgccacagtgctgaatccttccggaatacgaaaagccccag

SEQ ID NO: 12629 - DNA, 5553 bp, DROSOPHILA
tcgcgttgtgaaaagagaagaaaaccttctgaaaacagtgctaataggtaatactttcggtgccaaatggagcaatccgattgcgttcttcgcgtgcgattagcgtgcagttgatttcggccgatttggcgtatctttagccgttattttgggtttgcaccgggctgcgcgaaaaagtgtgccaaaagaggcacacaaaacggtagctacgattacatatcgtggctatagcttctttaatgttggtaaatacagtgcattgacgtgtgttccatctgcagattaggctgcaccagttgctggatatcgctattggataaagtcaagaaaggagctgcaatatggcctcgccctctccggcgaacagtcccatgccaccgccacaggcgcccagtccgatggccccgccctcgcagagtcccgccccctcgccgcacagcccgtatccgcaccagcagccgggtccactgcaaggacctccgccacccggacatcccggtgcctacggacatcccatgcagcacggaccacccggccagggtccacccgggcatcatatgccaccgcaccaccaggggatgattttctcaaaaggtccgcacatgggaatgcagatgccgccgacgggaccgaacatgtccccctaccaaacccacggaatgccacccaatgcacccacacaaccctgcatagtgtcacctggtggcccacctggaggcccgccacctccggagcgctcgagccaggagaacctgcacgcgcttcaacgcgccattgattcaatggaggaaaagggcttgcaagaggatcctcgctactcgcagctgctggcaatgcgagcaacctcgaagcatcagcaccttaatggcaatcaggttaacttgttgcgcacacagatcaccgcctatcggttgctggcgcggaacaagcccatatccatgcagatgcagcaggcgttgcaggccgcacagcaacagccaccgccaggacctccaattgggccacctggagcaccaggcggaccgccaccagggagccagcatgcaggacaaccgcccgtgccgccgcaacaacagcaacaaccgccaccttcagcaggaactccaccccagtgctccacgccgcccgcaagcaatccttatggaccgccagttcctggccagaaaatgcaggtagcgccaccaccgccacacatgcaacagggacagccattgccaccacaaccgccacaagtgggtggacccccgcctatacaacagcagcaaccacctcagcagcagcaacaacagtcgcagcccccgccaccggagccacatcagcaccagttgccaaacggaggcaaacccctgagtatggggccatctggcgggcaaccactaataccttcatcacccatgcagccacaagtgagagggacactgccaggaatgccgccaggtagtcaggttccgcaaccaggaggaggtcctcagcgacaggtaccacctgcgggcatgccgatgcccaagcccaatcgcattacaacggtggccaaacccgtcggtctggatcccataacattgctgcaggaaagggagaataggatagcagccaggatatcattgcgcatgcaggagttgcagcgactgccggccacgatgtccgaggatctgcgtctgcaagcggctatcgagttgagggccctaagggtcttgaacttccagcgacagctgcgtatggagtttgttcagtgcacgagacgagataccactttggaaacagcgttaaacattaagctctacaagaggaccaagaggcagggcctgcgggaggcacgtgccaccgagaagctagagaagcaacagaagctagaggctgaacgaaagcgtcgccaaaagcatctggagttcttggctgctgtgcttcagcacggcaaggatctaagggagttccacagaaataataaggcccagcttgcaaggatgaacaaggccgtgatgaatcaccacgccaatgccgagcgtgaacagaagaaggaacaagagcgcatcgaaaaggaacgtatgcgacgtctgatggccgaggatgaggagggttaccgcaagctgattgatcaaaagaaggacaagagattggctttcctactgtcgcagacagatgagtatattagcaacctaactcagatggtgaaacagcacaaggacgaccagatgaagaaaaaggaggaggagggcaagcggctgatacagttcaaaaaggagctgctgatgagcggagagtacattggcattgatgagggcagcattgttgccgatatgcgggtacatgtggtggaacagtgcacgggtaagaaactcaccggcgatgatgcacccatgctgaagcacttgcaccgctggctgaatatgcatcctggctgggattggatcgacgacgaggaggacagctgtgggagcaacgacgatcataaacccaaggtggaggagcaaccaacggcaacagaagatgccaccgacaaagcgcaggcgacgggcaacgatgaggatgccaaggatctaattaccaaggccaaggtggaggacgatgagtacaggacggaggaacagacgtactacagcatcgctcataccattcatgaaaaggttgtggagcaggccagcatcatggttaatggtacgctcaaggaataccagatcaaaggcttggagtggttggtttcgctgtacaataacaatctaaatggtattttggccgatgaaatgggtttgggtaaaaccattcaaaccatttcgctggtaacctaccttatggatcgaaagaaggttatgggtccttacttgattattgtaccactctccaccctgcccaattgggtgctggaattcgagaagtgggcgccagccgtgggtgtagtcagctacaagggcagtccgcagggaaggcgattgctgcaaaatcaaatgagagcaaccaagttcaatgtgctgttaaccacatatgagtacgtgattaaggacaaggcggtgctggccaagatccagtggaaatacatgattatcgacgagggtcaccgcatgaagaaccatcactgcaaactcacccaggtgctgaacacccactacattgccccctatcggttacttctcacgggtacacctctgcaaaacaagcttcccgagttgtgggcgctacttaatttcctgctgccctcgatctttaagtcctgctccacatttgaacagtggttcaatgcgccatttgccaccactggcgagaaggtcgagctaaacgaggaggagaccatccttatcattcgtcgtctgcacaaggttcttcgtcctttcctgttgcgtcgcctcaaaaaggaggtagagcaccagctgcccgacaaggtcgagtacatcatcaagtgcgacatgtccgcgctgcaacgcgttctctacaagcacatgcagagcaagggtgtcctgctcaccgatggttccgagaagggcaagcacggcaagggaggcgctaaggcgctgatgaacacgatcgtacagctgcgcaagctgtgcaaccatccgtttatgttccagcacatagaagagaagtactgcgatcacactggcggccacggagttgtatccggaccggatctgtatcgtgtctctggcaaattcgagctgcttgatcgcatcctgcccaagctgaaggcgaccaatcatcgcgtgctgctcttctgtcagatgacccaatgcatgaccatcatcgaagactacctgggatggcgccaattcggctaccttcgactcgacggtaccacgaaggccgaggatcgtggcgaactactgcgaaaattcaacgccaaaggctcggatgtatttgtctttttgctatctacccgagctggtggtttgggtcttaatctgcagaccgccgatactgtagtaatcttcgactccgattggaatccccatcaggatctgcaagcccaggatcgtgcccatcgtattggtcaacgtaacgaggtgcgcgtcctgcgactaatgacagtcaactcggtggaagagcgcatcttggcagcagccaggtacaagctgaacatggacgagaaggtcatccaggctggtatgttcgatcagaagtcaacgggtagcgagcgacagcagttcctacaaacgattctgcaccaggatgacaacgaagaggaggaggaaaatgaggtgcccgatgacgaaatgatcaacatgatgatcgcccgcagcgaggaggagattgaaatatttaagcgcatggatgctgagcgcaagaaggaggatgaggagatccatccgggtagggaacgtctgatcgatgagtccgagctacccgactggttgacaaaggatgatgacgaagtagagcgtttccactatcagtacgacgaggataccattctaggtcgaggctcccggcagcgaaaggaagtagactacaccgatagtttgactgaaaaggagtggctgaaagccatcgacgatggcgctgagttcgacgaggaagaggaggaagacgattcgaagcgcaagcgacgaaagcgtaagaatcggaaggaagagtccgacgatgattcgttgatcctaaaacggcgacgacgccaaaatctggacaagcggtccaagaagcagatgcacaagattatgagtgcggttatcaagcacaaccaagatggacgaaccctgtccgaaccgttcatgaagttgccttcgcggcagaggttgcccgactactacgagatcattaagcggccagttgatattaagaaaatcctgcagcgcattgaggactgcaagtatgccgatctcaacgagctggagaaggactttatgcagctatgccagaatgcacagatctacaacgaagaggcgtctctgatttacctggactcgattgccctgcaaaaggtattcgttggggccaggcagaggataacagctgcagcggatgcagccgcagtggcagccggagataacacgggtgaagcgcacggcaatggaggttcggataattcggacaacgacgacgacgatggtggcgatgacggctccgacgacgaggagattgcaaccacttcagcggcggctgtcaaaatgaagctgaaactgaacaaatctctggctagtgcgcccgctacgcccacgcaatcatcgtcgaatgtgagcagcggagcggctaccacatccaagaagcagacgcgtcgcaagcgctcccaaaagaagtacactatttcagacgatgacgacgatgacatggactagctaccgttgggagtgatcttcaagcgcggatcgtcggatgtcgaaggcatgggcaattgattattaattagtttaagttttactttcaaggacgatgcttaccaaaaccctagcctacgggtttttttaaccatctaacctatcatgctatcacttttatctatactaattttctagttgtaggttctcgattaagtttcctattcaattattttcgcacacaccatttatttctcccaattctattgattgtataattatgtgctttaaaataaatgcatacctaacataaagt

SEQ ID NO: 12630 - protein, 1638 aa, DROSOPHILA
MASPSPANSPMPPPQAPSPMAPPSQSPAPSPHSPYPHQQPGPLQGPPPPGHPGAYGHPMQHGPPGQGPPGHHMPPHHQGMIFSKGPHMGMQMPPTGPNMSPYQTHGMPPNAPTQPCIVSPGGPPGGPPPPERSSQENLHALQRAIDSMEEKGLQEDPRYSQLLAMRATSKHQHLNGNQVNLLRTQITAYRLLARNKPISMQMQQALQAAQQQPPPGPPIGPPGAPGGPPPGSQHAGQPPVPPQQQQQPPPSAGTPPQCSTPPASNPYGPPVPGQKMQVAPPPPHMQQGQPLPPQPPQVGGPPPIQQQQPPQQQQQQSQPPPPEPHQHQLPNGGKPLSMGPSGGQPLIPSSPMQPQVRGTLPGMPPGSQVPQPGGGPQRQVPPAGMPMPKPNRITTVAKPVGLDPITLLQERENRIAARISLRMQELQRLPATMSEDLRLQAAIELRALRVLNFQRQLRMEFVQCTRRDTTLETALNIKLYKRTKRQGLREARATEKLEKQQKLEAERKRRQKHLEFLAAVLQHGKDLREFHRNNKAQLARMNKAVMNHHANAEREQKKEQERIEKERMRRLMAEDEEGYRKLIDQKKDKRLAFLLSQTDEYISNLTQMVKQHKDDQMKKKEEEGKRLIQFKKELLMSGEYIGIDEGSIVADMRVHVVEQCTGKKLTGDDAPMLKHLHRWLNMHPGWDWIDDEEDSCGSNDDHKPKVEEQPTATEDATDKAQATGNDEDAKDLITKAKVEDDEYRTEEQTYYSIAHTIHEKVVEQASIMVNGTLKEYQIKGLEWLVSLYNNNLNGILADEMGLGKTIQTISLVTYLMDRKKVMGPYLIIVPLSTLPNWVLEFEKWAPAVGVVSYKGSPQGRRLLQNQMRATKFNVLLTTYEYVIKDKAVLAKIQWKYMIIDEGHRMKNHHCKLTQVLNTHYIAPYRLLLTGTPLQNKLPELWALLNFLLPSIFKSCSTFEQWFNAPFATTGEKVELNEEETILIIRRLHKVLRPFLLRRLKKEVEHQLPDKVEYIIKCDMSALQRVLYKHMQSKGVLLTDGSEKGKHGKGGAKALMNTIVQLRKLCNHPFMFQHIEEKYCDHTGGHGVVSGPDLYRVSGKFELLDRILPKLKATNHRVLLFCQMTQCMTIIEDYLGWRQFGYLRLDGTTKAEDRGELLRKFNAKGSDVFVFLLSTRAGGLGLNLQTADTVVIFDSDWNPHQDLQAQDRAHRIGQRNEVRVLRLMTVNSVEERILAAARYKLNMDEKVIQAGMFDQKSTGSERQQFLQTILHQDDNEEEEENEVPDDEMINMMIARSEEEIEIFKRMDAERKKEDEEIHPGRERLIDESELPDWLTKDDDEVERFHYQYDEDTILGRGSRQRKEVDYTDSLTEKEWLKAIDDGAEFDEEEEEDDSKRKRRKRKNRKEESDDDSLILKRRRRQNLDKRSKKQMHKIMSAVIKHNQDGRTLSEPFMKLPSRQRLPDYYEIIKRPVDIKKILQRIEDCKYADLNELEKDFMQLCQNAQIYNEEASLIYLDSIALQKVFVGARQRITAAADAAAVAAGDNTGEAHGNGGSDNSDNDDDDGGDDGSDDEEIATTSAAAVKMKLKLNKSLASAPATPTQSSSNVSSGAATTSKKQTRRKRSQKKYTISDDDDDDMD

SEQ ID NO: 12631 - DNA, 3132 bp, DROSOPHILA
ctggaaaccaaaaaccttctcaaatatgccttctcgttcacgctagagctacatgtatattttaatctgtaacactcgaaattaagctattgcaatgttatttcagttgcccgattgtcgaatttgtatttgtttaggcttaagcttatggcgcgctatgtattttatacatagaagtaattaatttatatagataattaataaatcaataataccccacgcaatttaagaatttgaaaaggaaaacgggatggcagcactgccaatccagctgcttttagaggtcgctttactaaatagccatgatcgaattgcaaaacttacaacagagtgacatttttaattaaataataaaatgtatttatttgtataaatcttagcaattattagaaaaacacctgctcacattttatttgaaaattttgaactgcctacctacacaacggcctggcaactttggtcggccagctgttcgtcgtggtcgtgcaacaacaaattgagcagtgacttttcgtattcgaataacgtagaaagcgtgtataagtcgtagtctctgctcggaacattttaaaaccagtccaaaactataggaaaaacaagaaaagtgatcgtgcttacaccagaacagttgaacgtgcaacaaaagtgattgcgaaatacactgcaaggtgtgtgtgtgtgacttggtgctctagctgtgtgtgtgtggggaaaaacaaaacatttgcgctgtggtttttgcttttaacaatgtttgtttgagtaggaaattccaattttagtggccattaatggaacgcaaacatttagttggccttcctttgtatttgcagtttctattttgtatcttcccctcccgctcgcaattgtggataaaagcaacaacaaagtgcagacagagaccagtgttgtgaaagaccccccacacacacacacacatgcacatgcgttgcatttattgttttttaatatgcactttattttgaatgccactcaccaacgccccgccatccgccgaccgcttcgcccacgcatttgcgtcaacagaggaggccagacgtcataatcgcatcactgggaagcgcgacagacgtcgacattttatggcggaagcagcagtgtcaatctgcgattgaaggacagctctaaaggaacacccaggatccccgccagcgacggcagacagcaacatgttttgacctcccactcggtacagctggagcgtccgctgctcttctctgttccccttggtcacctagtcatccgttctcaccacatcgccccatcagccctccataataagcacggccaaccatgtccttctccgacttcgacgccatctacgaggatgagcagctggacgagctggagcacttccaggaccaaacggtggcgccggtccaggagcccatcatcatacgcggcgcgggcaacatgacggtgtaagtgggtctatgcactgagtgataagcgggaaaacagatagctggagtagttaagggtataacctcattcagtaagacaacaccattatcagcacaattgaaggcaaagtaagaacttttaacgccatagtaatctttagtgaaacaatgaactacgtatttcattttataaagggtaggttgccacagagatcctttagattatctgcatatagaatatctatcttatagaatattatacagatacagaaatgataggtgtatgctttcagcattgtctgtaacattgtctgcatgaacgaacctatttaaaaagtagttcaaggttaacgccacccaatttcgatctaggccctgccctgctatttgaccccatttttgggggagaacgcctttgctgcccagcagtcaattacaggaaggttgcataagaaatgagtcagggcagaataattgcacttgcactgcacacgaattgtaactttttcacacgcacacttgcagatttgggctaagcaaccgcttcaacgcggagtttccctgcggtctgctgtcgcgcgtggctcccgaggagttcaaggcgacggtgggccggatcaacggagtgctgaagaaatccctgcccgtcaacgtcaaatggctcttctgcggctgcgtctgctgttgctgcacgctcggttgttccctctggcccgtcatctgtctcagcaaacgcgtaagccttagattaatctagaaaatcggtcatgagcctagcctaaatcctttttcaattttgtagacacaactcacactggacaagctgttcgaatgggagaacaatcatctatatcataagctgggcctgcactggcgactgcataagcaacaatgtgattccaattccatgatggagtatgttattttaattgaatttatacccaaaacgcccatctaccggcccgactaagtgccgtcgtggaggaggaggggcgtggtatcacagggtcgcggggttgtcgtaatggtaattgtaaaataaacactagctgctaacactttgctttaggcgtttacggatcgtgctaatcagcagagagtataggtacactaatccataggacaggacaggcgcaggcacagcacacacaatgggcattaactaatttagtgcactcgcagattgtcattttaagctagctactatttcatgttcggtttataacaaaattttgcaagaactctaggcggtaagtttgatttctcgtaactttagggcgctctactttttctgtttttcgtttagttgtaaattcttatttgtttcccaaactaatgcaatactatttaataaatttcgtgttaggaaatttacagtgatttcgaaaatgtgtttttctaactgcattcatagtaaatgaatatttttcaactaagaattcaaagcccactttcgatacccgaacaaattcacacatattctgttcatgtaatgtacaaggtacatatatattttgatatatatcatatggttacctaagtattttgtggtttcaataactttacagcactttggggcatagacggttgatgaacaataaatacattttaatttactttaggtttcatttatgtattaatgcttaaatataatcaagtcttttaacaatgcgcgggtctggctctaggaatatatatatatatatat

SEQ ID NO: 12632 - DNA, 1230 bp, DROSOPHILA
cgccccgccatccgccgaccgcttcgcccacgcatttgcgtcaacagaggaggccagacgtcataatcgcatcactgggaagcgcgacagacgtcgacattttatggcggaagcagcagtgtcaatctgcgattgaaggacagctctaaaggaacacccaggatccccgccagcgacggcagacagcaacatgttttgacctcccactcggtacagctggagcgtccgctgctcttctctgttccccttggtcacctagtcatccgttctcaccacatcgccccatcagccctccataataagcacggccaaccatgtccttctccgacttcgacgccatctacgaggatgagcagctggacgagctggagcacttccaggaccaaacggtggcgccggtccaggagcccatcatcatacgcggcgcgggcaacatgacggtatttgggctaagcaaccgcttcaacgcggagtttccctgcggtctgctgtcgcgcgtggctcccgaggagttcaaggcgacggtgggccggatcaacggagtgctgaagaaatccctgcccgtcaacgtcaaatggctcttctgcggctgcgtctgctgttgctgcacgctcggttgttccctctggcccgtcatctgtctcagcaaacgcacacaactcacactggacaagctgttcgaatgggagaacaatcatctatatcataagctgggcctgcactggcgactgcataagcaacaatgtgattccaattccatgatggagtatgttattttaattgaatttatacccaaaacgcccatctaccggcccgactaagtgccgtcgtggaggaggaggggcgtggtatcacagggtcgcggggttgtcgtaatggtaattgtaaaataaacactagctgctaacactttgctttaggcgtttacggatcgtgctaatcagcagagagtataggtacactaatccataggacaggacaggcgcaggcacagcacacacaatgggcattaactaatttagtgcactcgcagattgtcattttaagctagctactatttcatgttcggtttataacaaaattttgcaagaactctaggcggtaagtttgatttctcgtaactttagggcgctctactttttctgtttttcgtttagttgtaaattcttatttgtttcccaaactaatgcaatactatttaataaatttcgtgttaggaaatttacagtg

SEQ ID NO: 12633 - protein, 168 aa, DROSOPHILA
MSFSDFDAIYEDEQLDELEHFQDQTVAPVQEPIIIRGAGNMTVFGLSNRFNAEFPCGLLSRVAPEEFKATVGRINGVLKKSLPVNVKWLFCGCVCCCCTLGCSLWPVICLSKRTQLTLDKLFEWENNHLYHKLGLHWRLHKQQCDSNSMMEYVILIEFIPKTPIYRPD

SEQ ID NO: 12634 - DNA, 7407 bp, DROSOPHILA
gtgtctttagtatcttacgattttgatataaaagtttatataggcaggcgtgtgtttgtgagtgtgtttcgtgtgtgtgagtgtgccgacttacaagctaatacacgctacacatttattaacttaccacttaatatgtttgtttcctcatctcatcttatcccacttccacctacatatctcgatttatctcgtttccggtctttgattcgttcgtttttggactggaccttccaagaagtgccacatagtacagaatgtacagttatacagtttacagttcatagtttaaggtacagctatgcgaaaaacgaaagatttgccaatttgcatttataactgtgttagttcttctgtgcttgtagtgtgtgtgtgagagttgtcgttgtgtgtgtgtgtgtgtggtacaaaaagatggcagctctgcatataaagcgtaacggttcgttcaaaaaaagcgaccacacactaaagtatctcttacgccattcgttaatcgttaatcgtttgtcattaatttcgttaatttcgcaaatcgcgccaaatggacagttcggttactcagatttttccgatcttgtttcatattctatatgaactacgcctccgatataaatcctttgctaaagttatatataaactattccgatctgaagtattgacagtcacaggctctacaagaagcgtgccttggtttttcgaattgttttcctctgctttaaatatatatgtatatatatatgcccatttgtatatactcaatatgcgtgtatataatatgtagtatgtttcccatttagatttagttcgtctctcctccgtatcgtggtgtaaaaaaatgttcctcatcctaactctgcaatttcgatttctctctggtttttttttggttttaaaagcgtatttgtacaaacacaaatcgacgaaggacatttgtgtggtttaacatataaatttaaactagtcgatatcaaaagtcttgaggcgtgcgtgcagcgtttcataggaggcccgtctccacattgtgctccgttcccagcgtattaggatcgaagttcagtttcatttcgccggccaggacgatttccgagatgcagccgacgatgccactgaagtagcgctggtgcgtgaagtaaccaacatcgggcattccacctgtaacaaggacatctcttagtataccgtatagaactatcatatctcatagatactcacccacatacagaccggtgtccgtgttaagctggcggagtttaccaggcgcccgcaaagtgactgtctttctgccatccacctccagatagccctcttgagagtttctgaaagattagagatttggttagaattaataagtttaaagtatcaaaatcaacttcaaggattttatccctttagttcttagaacctataagatttagtgctcaccttatggctctcacgcgatgccacagaccatcgctgaccttggtgccattgaagcggatatcaacctcaccagatcccaagtcatagcggaagtgtaagtacctgttcggaatacatatcgtatataagtacgtgtggaatgtagatcccaccaccctcccactcacccctgttcgatgcccagcgagaggtagtcgtcgtgttcctccgtcgtaccctggcgtcccgtccacagaatcacgccgttctccgagtgcgtcttgatgcgcagattgagatcgatgctgtagctgatcacctggctcatggtgtccgcgtcattgtagtggaaatagctatcgctgccggcgaagcaagctccgaaattcttgcgtacgccctgaacctgcgactggtgctcggcggacaggtcgaacttcttcagaagactccagtcggtgtgggtctgcggtgtgctggaggtatgctgttccagcttgacttcctcaccgccttgcataactggcgtcaaaagctcatcatcgttgtagtcatcgctgtactgagaggtgtcttcgttggcggtaccaacttcttgactgccttgaggtggaaactggacctctgccttcttgtgactggagtgcgcatttgaatttgacatgatgcgcttcatatcctgggccagttgcttgcgctggtactcctccgttccatcggaagcgtcaaaaagcgactcatcgaacacaaaggcattctcatcatcttcgttgttgtcactagacctgggagtaccgggacttgcatcctcaaaggccaatggcacctgactggccgccatggcatcgccgtactcctgctgctgcagactggtcacccagtcattgttgtcctcgaaggtaaggatatcgctgtcggggttcgtctggaaactctcgtagtgggtgggcaggcgactcagcttgcgggtgaaggcagcattgggcttcagatggtgctcgtgcttgctggcatggtgcttccctgaaagcctgggctttgctttagatggaccactggatgtggttgaggtggctggggcagtagtagtcgtctgctggtgctgcttcttgagctccttctgctgctgttgttgctgcacaagacggaatatgatatcatcttcgatttcctcgttgcttagcgcccccgcagtggcttcctctgtcctctcagaaggagcttcagtggtcgtggtggtggttgaggtggtgcttgtggtcgtgctcgtggcaggggttggcttatgcaaattcctgtgctttttggaatgcttcttgtgcgccaagccagacaccttcttcgccgcctctccattgtccttcgtctcgaggaccttggacttgtggagagccagctcgggcagctgctcgggcggcacctcggcggccttgttgcagcgctcattgtggatgctgcagcggcactcgtagctctccatttgaggcacgcactccgccagggggccgcagggtcgtgccacacaagcgtgggggcagttgccgatgttgctgccacccaatgcctccgccacaatgcccagcgagtggccattgatgtcgatctgtgagtggtgaacaatggtagacaatgggattgaaagcggaaacgggatgtgtaccacttaccctctggatgcagccaacgaagaagggtttgtacttgaggtccaaaggcagacggtccacgtggttaacgccgcccacaaagagattctggtccagcgacaagtgccaaaagccgttcgatgaaatagtcaaaacctcctgatgtttatccacctaaggaatgggaaataaagaattgataaaggaagttagaggacagtaaggacttcctaccttgagcaccgccagacgagctgttcgagagatcttgatggtgtgccattgacccagactgagggaatgttcgctcctggaaaggaaaaatcgtatagctcaatacaagtgacttctcataaaagtgacctagtttggccgtaatgctcaccgcactaaagctggaccactgcccagatcgaaggcaaactccacaaatccgtcgttgaggtacagagctataaagtcacctctatgctctggacccgagtacagtatcaagccatctgcctgttcgggcttaagggtcacctttagctccaaccaaatgagggcactatcgcccagtggagcgtagcgcaagaaagatgagccattgaaggcgggaacctaagagatggcgagtacatgaataaccaaaaggcggtaagaactttcagagaacacctacctgtagatccattcgaatctcacacagatcaccaacaaatcctataggacataggcatatggcgccctgatctgagggcaaacacttgccaccatgctggcaaggatacctcacgcacttgtcggtggaacaatcctctgtgggaagttatcaatatattacgctgtttaaaactttattagtcacttcttacgtatatcgaatccattgatgacatcgcccaagggatgctctgtgaacttgtagtcatgttcgttggccacaaaacgacgaatgcagccggcgaaaccctcggccagaggaagacgcttggccaatccagttatgttgccaattccacccagaaaaactggctcccggaaagtgatgcgtgagaacaatccctgaaagattttaactcatttataaaaagttgtccttcctctgaacagcgaacttacattcgatcttccctggaccttggtgccatgattgagcaccagccaggcatcccatcgatgacggtagatgatcaccgagttccattcgtttagcagaatggtctcccgggatcgaacgctgcccacaccggaaccacaatcaaaccagaactccacgaagcccttgtttagtagcagggccataaagtcaccggtgaggtcatcgcgctctccgctcagcaggataatgccgtcaaaggactctggacggaattcgatgcgcaattggacgtgcttgtaggcgccatggagcgccggaaatgctagccaggatcgcttggcgaaacgcggaacatgggctcgaatatctacgcgtttataaagtaaccatgttcttaagttctctacgatttggtccttcgagcatccacttaccttcctgacagccattgcccgttttgccaaagggacaaagacaacgagaactggcggcagttgcctccaaggcacagattccatcggaaccgcaatccagattgcatgtaggagtgctcctgcagtggaataagttgattaaagtacattaaattagttttaaagtacttttcctgctttgacaaccatcatgtacgcatctgcatacctaagttggttcgacatgaccaacaaagaaatccttttcaaaaggccaaaggatttcgcccaaccaaattggatgaggaattcaccgccccctcaagcaatacgtttgtgtgacccacctgtctgttgtcatggctgctcccacgacagccggttccgctgctgatatgttctcaagtcggttggtctccctcgtgatatgcatttggaccttgttgctggttacgtttgggtacttcctgcggttcttggccgtgttggtattgcttgtctgctgatatgtttgcgatttgctgttgcgtcttaagtttaattgattattgttgacatcgtcgtagacggacatgtccgacttatagctgtagctatagtcatcgctgccatcaccctcgccatagtccacatccactcgctgcttgggcgccctggtaggggatcgccttgtggtcgtggtcgttgtggttgtgctggcggttgcccttgtcgtgcttctgctgggagtgggtggcactgagctgggcagcattgtgctggccgccttgaagtcggccacatcctgctgctcctggccctcggactccgaattgaagttgatgctctccgctgatatgtagtaatcgtttgaattgactttttgttgctgttgctgctgctgctgaagattcagcgatttctgcttctgttcctgtgtctccgagttgctgtcctccagctcgccgtaatcgtagctgtcgccctcggatccggactcatcctccccattttcgttgcccgccggcgatgcggattgcgcggcggatagggcgaacgtggacttggccatcgacttgccaccatcgtcgttcgccaatttggcgctgaacgaggcgcccttctggtagagcacatcctcgtccgacttgccacgcccatccaaactgttggatgtggcgttaattactggaaaatcgaaatggatccggttacgaaatgcaaccattttaattaaattcagcgagtgagctggccaaattaatgatatttaatactttaattcccctattaacaatgaaaaaaatccgcaaacaaaaattaaatattcccaactcaatagttacggataactgaaataaaaatgtgatctatattattttaaattagaacgccttgtacacaaataactgattgtatgccatgtaattttttcaacacattgtcaaaaactcacaaattacatgcaaaacatatacatatataaatatacggagtaacaacacaaaaatatcaatttgtctaccagccgggggccgaacaattgcaaaattgcaaattccccaaacaagtcgttgccaaaaataaataacacccagagtatggggcattccacatgtaatctgttggctcatcccgcccactttgcgatgccagtgccatccattacaggtgattttcaaataataaccgaaatgccaaatcacttttgtggcctggcggtagtaagctacatctatgcatgcatccacacatatgtatgtatctcccaactcccaaccccaagcccaatcccaatcccaatcccatcctgaacgcaccttgacagctgtaaccgttcttgttcagctcgtagccctcgatgcagtcgcactcgtacattccatcgtggatctcgtagcatagttgttcgcaggggctggtgtgtccacagtggcctgtttttcgtgggcggagcgggaagaggcagtgggattttagtgcgattgttcagttagcattgtggcatatagatgggcgtgataagggggctggcaataagggggagagataagggggccaaaaagggctagaaggggactaaaagggggctaaaagcggactaaaagggagcaataaggggcatggcaactttcggtcgagccgagtcgtttcagttcggttcataatttcagttcacttcagttgagtttagttgagtgtcccgtctgcctgtccacgtctacgtctacgtccatgtctcctccgtttatttccgtaacgaagagtgtgtgtgtgtgtgtgtgagtgttcctgggtgtgaccgacgtgtccgcaataaattctaataagctttaaggactttgggcctggtttcgtttccttacgtttcggtctgctcctgacttcggtcatacgttttccgtaatttactgctggccatggcagcatttcaaatgcaccatccccacctctccttcaccgcaaaaattcataatgactacttaaataactcggttggccgatagttctgcttggctgtttttagtcgacggtaatggaaaagttgttcgtacccagttcgatggcaatttaaatgcaaattccataggcaggcggaggtgaatcaaaatcacagcccatttgtgccggtgcattcttgggccgctcacttgacaccgaaattttgtgccagagcaaatttcctccaggaggaggaaatggttggaaaaacgaaaacattcgaaaagggaaaggagaaaagtaaaacattacaagcattacgcatacgcccgagtggcccggcacttacgtcacacattgtattaaatggaacgaacgcagtggcacattctgaagatggagacacgaacacgtcagctactctgttaaagtgccatca

SEQ ID NO: 12635 - DNA, 3897 bp, DROSOPHILA
atgtacgagtgcgactgcatcgagggctacgagctgaacaagaacggttacagctgtcaagtaattaacgccacatccaacagtttggatgggcgtggcaagtcggacgaggatgtgctctaccagaagggcgcctcgttcagcgccaaattggcgaacgacgatggtggcaagtcgatggccaagtccacgttcgccctatccgccgcgcaatccgcatcgccggcgggcaacgaaaatggggaggatgagtccggatccgagggcgacagctacgattacggcgagctggaggacagcaactcggagacacaggaacagaagcagaaatcgctgaatcttcagcagcagcagcaacagcaacaaaaagtcaattcaaacgattactacatatcagcggagagcatcaacttcaattcggagtccgagggccaggagcagcaggatgtggccgacttcaaggcggccagcacaatgctgcccagctcagtgccacccactcccagcagaagcacgacaagggcaaccgccagcacaaccacaacgaccacgaccacaaggcgatcccctaccagggcgcccaagcagcgagtggatgtggactatggcgagggtgatggcagcgatgactatagctacagctataagtcggacatgtccgtctacgacgatgtcaacaataatcaattaaacttaagacgcaacagcaaatcgcaaacatatcagcagacaagcaataccaacacggccaagaaccgcaggaagtacccaaacgtaaccagcaacaaggtccaaatgcatatcacgagggagaccaaccgacttgagaacatatcagcagcggaaccggctgtcgtgggagcagccatgacaacagacaggagcactcctacatgcaatctggattgcggttccgatggaatctgtgccttggaggcaactgccgccagttctcgttgtctttgtccctttggcaaaacgggcaatggctgtcaggaagatattcgagcccatgttccgcgtttcgccaagcgatcctggctagcatttccggcgctccatggcgcctacaagcacgtccaattgcgcatcgaattccgtccagagtcctttgacggcattatcctgctgagcggagagcgcgatgacctcaccggtgactttatggccctgctactaaacaagggcttcgtggagttctggtttgattgtggttccggtgtgggcagcgttcgatcccgggagaccattctgctaaacgaatggaactcggtgatcatctaccgtcatcgatgggatgcctggctggtgctcaatcatggcaccaaggtccagggaagatcgaatggattgttctcacgcatcactttccgggagccagtttttctgggtggaattggcaacataactggattggccaagcgtcttcctctggccgagggtttcgccggctgcattcgtcgttttgtggccaacgaacatgactacaagttcacagagcatcccttgggcgatgtcatcaatggattcgatatacaggattgttccaccgacaagtgcgtgaggtatccttgccagcatggtggcaagtgtttgccctcagatcagggcgccatatgcctatgtcctataggatttgttggtgatctgtgtgagattcgaatggatctacaggttcccgccttcaatggctcatctttcttgcgctacgctccactgggcgatagtgccctcatttggttggagctaaaggtgacccttaagcccgaacaggcagatggcttgatactgtactcgggtccagagcatagaggtgactttatagctctgtacctcaacgacggatttgtggagtttgccttcgatctgggcagtggtccagctttagtgcggagcgaacattccctcagtctgggtcaatggcacaccatcaagatctctcgaacagctcgtctggcggtgctcaaggtggataaacatcaggaggttttgactatttcatcgaacggcttttggcacttgtcgctggaccagaatctctttgtgggcggcgttaaccacgtggaccgtctgcctttggacctcaagtacaaacccttcttcgttggctgcatccagaggatcgacatcaatggccactcgctgggcattgtggcggaggcattgggtggcagcaacatcggcaactgcccccacgcttgtgtggcacgaccctgcggccccctggcggagtgcgtgcctcaaatggagagctacgagtgccgctgcagcatccacaatgagcgctgcaacaaggccgccgaggtgccgcccgagcagctgcccgagctggctctccacaagtccaaggtcctcgagacgaaggacaatggagaggcggcgaagaaggtgtctggcttggcgcacaagaagcattccaaaaagcacaggaatttgcataagccaacccctgccacgagcacgaccacaagcaccacctcaaccaccaccacgaccactgaagctccttctgagaggacagaggaagccactgcgggggcgctaagcaacgaggaaatcgaagatgatatcatattccgtcttgtgcagcaacaacagcagcagaaggagctcaagaagcagcaccagcagacgactactactgccccagccacctcaaccacatccagtggtccatctaaagcaaagcccaggctttcagggaagcaccatgccagcaagcacgagcaccatctgaagcccaatgctgccttcacccgcaagctgagtcgcctgcccacccactacgagagtttccagacgaaccccgacagcgatatccttaccttcgaggacaacaatgactgggtgaccagtctgcagcagcaggagtacggcgatgccatggcggccagtcaggtgccattggcctttgaggatgcaagtcccggtactcccaggtctagtgacaacaacgaagatgatgagaatgcctttgtgttcgatgagtcgctttttgacgcttccgatggaacggaggagtaccagcgcaagcaactggcccaggatatgaagcgcatcatgtcaaattcaaatgcgcactccagtcacaagaaggcagaggtccagtttccacctcaaggcagtcaagaagttggtaccgccaacgaagacacctctcagtacagcgatgactacaacgatgatgagcttttgacgccagttatgcaaggcggtgaggaagtcaagctggaacagcatacctccagcacaccgcagacccacaccgactggagtcttctgaagaagttcgacctgtccgccgagcaccagtcgcaggttcagggcgtacgcaagaatttcggagcttgcttcgccggcagcgatagctatttccactacaatgacgcggacaccatgagccaggtgatcagctacagcatcgatctcaatctgcgcatcaagacgcactcggagaacggcgtgattctgtggacgggacgccagggtacgacggaggaacacgacgactacctctcgctgggcatcgaacaggggtacttacacttccgctatgacttgggatctggtgaggttgatatccgcttcaatggcaccaaggtcagcgatggtctgtggcatcgcgtgagagccataagaaactctcaagagggctatctggaggtggatggcagaaagacagtcactttgcgggcgcctggtaaactccgccagcttaacacggacaccggtctgtatgtgggtggaatgcccgatgttggttacttcacgcaccagcgctacttcagtggcatcgtcggctgcatctcggaaatcgtcctggccggcgaaatgaaactgaacttcgatcctaatacgctgggaacggagcacaatgtggagacgggcctcctatga

SEQ ID NO: 12636 - protein, 1298 aa, DROSOPHILA
MYECDCIEGYELNKNGYSCQVINATSNSLDGRGKSDEDVLYQKGASFSAKLANDDGGKSMAKSTFALSAAQSASPAGNENGEDESGSEGDSYDYGELEDSNSETQEQKQKSLNLQQQQQQQQKVNSNDYYISAESINFNSESEGQEQQDVADFKAASTMLPSSVPPTPSRSTTRATASTTTTTTTTRRSPTRAPKQRVDVDYGEGDGSDDYSYSYKSDMSVYDDVNNNQLNLRRNSKSQTYQQTSNTNTAKNRRKYPNVTSNKVQMHITRETNRLENISAAEPAVVGAAMTTDRSTPTCNLDCGSDGICALEATAASSRCLCPFGKTGNGCQEDIRAHVPRFAKRSWLAFPALHGAYKHVQLRIEFRPESFDGIILLSGERDDLTGDFMALLLNKGFVEFWFDCGSGVGSVRSRETILLNEWNSVIIYRHRWDAWLVLNHGTKVQGRSNGLFSRITFREPVFLGGIGNITGLAKRLPLAEGFAGCIRRFVANEHDYKFTEHPLGDVINGFDIQDCSTDKCVRYPCQHGGKCLPSDQGAICLCPIGFVGDLCEIRMDLQVPAFNGSSFLRYAPLGDSALIWLELKVTLKPEQADGLILYSGPEHRGDFIALYLNDGFVEFAFDLGSGPALVRSEHSLSLGQWHTIKISRTARLAVLKVDKHQEVLTISSNGFWHLSLDQNLFVGGVNHVDRLPLDLKYKPFFVGCIQRIDINGHSLGIVAEALGGSNIGNCPHACVARPCGPLAECVPQMESYECRCSIHNERCNKAAEVPPEQLPELALHKSKVLETKDNGEAAKKVSGLAHKKHSKKHRNLHKPTPATSTTTSTTSTTTTTTEAPSERTEEATAGALSNEEIEDDIIFRLVQQQQQQKELKKQHQQTTTTAPATSTTSSGPSKAKPRLSGKHHASKHEHHLKPNAAFTRKLSRLPTHYESFQTNPDSDILTFEDNNDWVTSLQQQEYGDAMAASQVPLAFEDASPGTPRSSDNNEDDENAFVFDESLFDASDGTEEYQRKQLAQDMKRIMSNSNAHSSHKKAEVQFPPQGSQEVGTANEDTSQYSDDYNDDELLTPVMQGGEEVKLEQHTSSTPQTHTDWSLLKKFDLSAEHQSQVQGVRKNFGACFAGSDSYFHYNDADTMSQVISYSIDLNLRIKTHSENGVILWTGRQGTTEEHDDYLSLGIEQGYLHFRYDLGSGEVDIRFNGTKVSDGLWHRVRAIRNSQEGYLEVDGRKTVTLRAPGKLRQLNTDTGLYVGGMPDVGYFTHQRYFSGIVGCISEIVLAGEMKLNFDPNTLGTEHNVETGLL

SEQ ID NO: 12637 - DNA, 3070 bp, DROSOPHILA
tttttcgtttttcttcttgcctttccggggaaatatgcactgcacttgccgttggatgcgtcaaatgctgtgtgacgcgaaaggaaagcactttctccatttacggcggagtgcgccgtaccgttatcattgcgcatgcctgccagtcagctgttcgattgtaccgtttatcggtcagctgaaagtttggaaaaaccagggcggcgggcacagtttgaaagaagagcattacgccccatgaaaaacctatgtagtttctatacctcaagccgcatacccaattgcatatagaatgggaaaacttcacactcctattttacgtgcggcagtaaaagacgccacaaagtatgctatgttattcaagagtttgctatggttttacaatagatacccatacaaaaattacttagttccacgtattgcgaagctttatttcaataattttgaagtaaaactactaaaaattataatattacaaataataaattgtgtacatttagttataagctcttttttgtatacaatcttttcgtgtattcacaagtgcccggatatcaactataaccttgaaatgtttgtatgagttgttcgcagccctggcaaactttaagctacaggccttgtttcgttgctctttagactaatcaataaacaaaaggagtcacagttattcagtcactcttaaaataagagctaacagaatgaagaccgccaaacagaagactcaatgttcagtcatacctgccgaatccgattaaaatgctcaaatttagatccactggacacctttcacctggaccactggtctccacaggtggttggttttctttttcagtactctctctttcaatccctctctgctcgcttgaaatgccattaattatatttcgcaatgttttaaatagtttaactgacagagtaaaattagtagaaaaaaataataatcaggactcagttgcgtatatcaaaaaccattctttgctctcatgacatagaagactaaaaagtgcaagtgcagattcctatttcgcctacttcacgggcttcgacttccacaggccgtcgttgaggaagtggtacgtctcgataccgatgcctttgttcttcgccagactgtggaaaagtcaagagaaaagaaagatgttcatggtttattcaaatttaaaaaatatgcacacggctcagcaaattggtaacattgtccatttatgattattctttcacaatttgatttttccaagctcaagaatatttcaaagttacaaagctttaccatatttaacctagcaacaaactactacgtttgtattataaaacaatgtcaaagacgaacatttaaacacatttaagtaaactaaatgcaagcatataaattaatattcttagatattaactactaaagaagtggtagaagcacacttacatttcctgtgtggataacgtgaggagtccaacggccagggcgtgctccttgccctcagccatgatggccaccacggtgtccttgtcggccggcgtcatacaggcgcctggcgatgtgaggccgggacacatgacgttcgctccgctcaggacgaagcggatggcgcctttgtccacttgctgcatggtcacgaagtaggggaacttgtgcaggaggcgcagggtaggcatccaggggccatcgcggtggcgaaagaacacctggtcgccggctccgtttagcagcagttcgatgtggtcatggctggtggaggagtagggatcgggaatatgaatggagttatgtgctgtggcaagaactgagccatcctaccacttggcgatgcggtacgagtccttcttgggcaggatcaggtcgatgtgactctccaacttgggataggcctccagcaacttggcacgtatgcccttctgcacagacgacttcagctgctgaatgctggaaatgctgtccttctcttcgaatctgcacagatcgaattgctatggttagtctgatgtccccatctaactcatgccatacgtactttttgaacattttgcacgatttccttgcgttcttttttcgtggtcgacggtgctaatccgtcttcaatgtatgatagaaggtatcggttagaggtggagaaacatcgatgccaactcgatgtcatcgatgttttcgaaaaatcacaagcatcgatgtgtttcgaggaatcatcgatggttttccatcgatactgcgcatcggagataaaagtgtataaattgtacgtaaaaattaattttccataaacgtgtaagcgtgcacgtgctcgtatgtatactggcttacttatccattgaattggactaattagtatttttgttttatgggagcacttactggaccggcgacgtatgaaaagcaatattatgttagcaatattaaagaagaaaataattcttaagttgtaaacgactaagtctgccaaagatcgatgtttttcgccaaacacatcgaaaacattgagtccgccaacatcgatgtttctccacctctagtatcggttatagagcttggcccgctgtgcggtgtgaccagttctcagcggaatgccaactatcgcccctcaagtgtgcatgcgatatatggtattaacaattaacgtttaaataaaaatcaaacaatattaatagacttaacagattaaagtaatgtgatttttacaagtacaactaacgtaaagatttatcgggacaacagtagccgaattacaagtaggcgctgacccctgacccctcgagccgatagctagcgtcactttcaacactggccgatatggcatattaccaaaacattgttgtatcaacaacatagtgtccaagtcgaattgtatatattgtaaattatatttattttttataagcgcaatcgcatgaaaatacttgaaggaaatgagcgctccagaagaacatagtaagtggcaaaccaacggataacagctgtatgcgattgggctgatcaataggaatcgcatcgcatctcatccgcttgctttattttcagaggagacgcctttggaggtgatccatgagttcatcaatggcgtagatgatgggaccatac

SEQ ID NO: 12638 - DNA, 630 bp, DROSOPHILA
cggattagcaccgtcgaccacgaaaaaagaacgcaaggaaatcgtgcaaaatgttcaaaaaattcgaagagaaggacagcatttccagcattcagcagctgaagtcgtctgtgcagaagggcatacgtgccaagttgctggaggcctatcccaagttggagagtcacatcgacctgatcctgcccaagaaggactcgtaccgcatcgccaagtgccatgaccacatcgaactgctgctaaacggagccggcgaccaggtgttctttcgccaccgcgatggcccctggatgcctaccctgcgcctcctgcacaagttcccctacttcgtgaccatgcagcaagtggacaaaggcgccatccgcttcgtcctgagcggagcgaacgtcatgtgtcccggcctcacatcgccaggcgcctgtatgacgccggccgacaaggacaccgtggtggccatcatggctgagggcaaggagcacgccctggccgttggactcctcacgttatccacacaggaaattctggcgaagaacaaaggcatcggtatcgagacgtaccacttcctcaacgacggcctgtggaagtcgaagcccgtgaagtaggcgaaataggaatctgcacttgcacttttta

SEQ ID NO: 12639 - protein, 182 aa, DROSOPHILA
MFKKFEEKDSISSIQQLKSSVQKGIRAKLLEAYPKLESHIDLILPKKDSYRIAKCHDHIELLLNGAGDQVFFRHRDGPWMPTLRLLHKFPYFVTMQQVDKGAIRFVLSGANVMCPGLTSPGACMTPADKDTVVAIMAEGKEHALAVGLLTLSTQEILAKNKGIGIETYHFLNDGLWKSKPVK

SEQ ID NO: 12640 - DNA, 3609 bp, DROSOPHILA
aaaatgcagcagcaacagagagcaagtgagaagaaaacacacaaacacacgcgcacacatgcacagacgcacacacacactgggggaaaacagaacgtctttcaagcaggccgtaaatttagatgcccgaaaatctcttgttttgtttttagaaccatttgatacacattccaacaacaacatcagcaacatctcgcatgctgcacaacaaacacgaaaagcacgacaaattccacagtatctatggtttatgcccgttgaaagtgtattaatcgtcgccgtttcatcgctatttgttgttaaaccaacgcaattcgaccgagcgcagccattttgtggttactttgttttgtaaatatttgatttacttttcactgagttttccgtccgccgtgttgccgtgtttttcgtctcgctctttcgaacagtgtgaccgcactgaggcgacgtacgcagccgtcagtatggctgcacctaatttgcctaaatattaccaattgagtgttctaaatataccaaaaatatactggaagtagagtagacgtttggttgcacaccttgctaaaaaaatttagaacaccattttgtttgaattattttcgaatagaattacataattttaccaaatggcgaaaaatgcacattgcaaatatattcaaatgcaatttttacaaaaccctttttcagtggttataagaaacacataataatacatacatacacatacaatacatatactgaatattatattcttgtatagttataattaattataatagttttcaattttcagaaattacaatatttgtttgatatatgttctattcttttatagcaaaacttaattaatttttgcaaaatgttattaaatgttatttcagttgttaaacttgtggaaaactttaagtttactacttgcacatctaaactgtattttttgtaacgccaacattaatataaaatttcttaaattacatctagagcagagcatttacaaatgctaggtatgattatccatgaactgcagttccgaccacaggagcagggcgttcgggggcaaaggtcgcggctgcggcgaaagcaacatcactgcctgtctttccatatccacttcggttctgaggataatcaaataacaatcatatataactagtataatatctagtttaggttcagcagcacttacacgcaacaaaagccggccacattggtgccaatcacatcgtcctccacggactcggcaaagctgagggccagcacatgatggattagggcgggcgtgggtgtaaccgccaccaccttggtcttgttgtcctccgccttcattccaattggcatgcaggagtcgggcagcggcggtgcgccgatcttgtagagtcgcaggtcctggaacttcacctcgaagctgaacggatagaagggcgcccttgtattgccgtagaagtactccttgatgcgctgatccctcgcctcgtgtcgcagttccttgctgcgctcgacgacgccgccgctcttgggcagcagtaccacatgaactcccttgggaacatctcgaagcagctcgttgtatagtcgctcctggtccagaacaaagatggcacaggctccataggctttggccgcgtgcaacaggtgcgcgtagccggatccctttacccagccacaagtgtttataataatgccagagctttttgctgcaaaaagcagatgcagaaatttgcagtttatgaacgggaaaatgtattgaaaagtgcaaagatatgtgttacaccttcccaacttacttcgcttgttgctattcagagattgcagtgttacctctgccattttggaaaccacggcattgtacagcacgctgtttccgctgggagacttatggccaaagtgatagaccagcggcgctgtcttggcgaatccctcctcaacgttcgccggtcgctcgatgagaatggtggccacactcccggaaatggcaatcgagccctgtccaacatccaggtcggcgtacagcggtcgacgacccacgcgcacagcatagttaagcaggatgcggcacagagtgctcttgcccacgtccatgggaccgacgaccatggccactggtccgtagcgatccttctcctcggcctccatgcggaactgctccagtgccgcatgacagttgacgtactgcaccattggcgtctccttggagatgtagcacacgtccattttgccggagacgtggagtacacagccctggtacgtgaagatggccaccttggcgcccacgccgaactcgtactgctttttcttcaccagctccgtgccgaacagctccgcaaatccactgaccagctgaaatcaacaatttgattataaataacgaatttattgtaatccaaaaaggtttttgcactacttacggacaccagcactttggcatccttctgctcgatttcaaagcgcagctcggagtcggactccagtgtgtagtctttgccttggtcctccgacatggctgtatcttcagtgctctgctaatgagttttaatggcgaaatagggtaattatccaaaaatttaggaggtaaacaatttcacatcagctgtgcactaacgatgggaattgatcgatacctgtatagtagtaattaatcgatttctaggggtataaatgatcactgcaaaataagttaaagtactggacgtctttaaacaattaccatgtattcccattaatattaattgtcacataaataaacatattttaattctcaactgctagaaatatatttagttagtcagtgcccattcaaatcggtatcggtactgggcattatttgctttgctttatacggtcacactgttccaaaaaagcgggaattctttaaaaatattttaagcaaataccgaaaatttgaaaatgccacgacacagcagagccaagcgcgcacccaggccgtcggcgaacaactcaaagtcgccgaacgacgacgacacggccttccgctcgccggagccagaagacggcaccgactcggcctcgaattcaccaccagccaactgacgcttcaggacaacaatcggcgttcctcgacgttgcgcagggacgccggacggaggcagccggcagcgagagacagctccaccagtggcgaggaggaggaccaggagaatcgctatcccacaaccagatcgccgcagacgcgtcgaatgaccgtgcagcaggaaagcaaaacgcgagcagcagggccagttgctgcgcaaaaccagaccaggcggcgcaaagcggccaatcccatgagcagagccaagagaatggatcgtgagatccggcgactgcagcaccatcccggcacactgatacccaagctgccgttctcgcgtctagtgcgcgagttcatcgtgaagtacagcgacgacgagccgctaagggtcaccgaaggcgccctattggccatgcaggagtcgtgcgagatgtacttgacgcagcggctcgccgactcctacatgctaaccaagcatcgcaatcgcgtcacactggaggtgcgcgacatggcattgatggcctacatctgcgaccggggtcggcaattttagtccaaaagagaagtttaggcttagttta

SEQ ID NO: 12641 - DNA, 1383 bp, DROSOPHILA
aattcccatcgttagtgcacagctgatgtgaaattgtttacctcctaaatttttggataattaccctatttcgccattaaaactcattagcagagcactgaagatacagccatgtcggaggaccaaggcaaagactacacactggagtccgactccgagctgcgctttgaaatcgagcagaaggatgccaaagtgctggtgtccctggtcagtggatttgcggagctgttcggcacggagctggtgaagaaaaagcagtacgagttcggcgtgggcgccaaggtggccatcttcacgtaccagggctgtgtactccacgtctccggcaaaatggacgtgtgctacatctccaaggagacgccaatggtgcagtacgtcaactgtcatgcggcactggagcagttccgcatggaggccgaggagaaggatcgctacggaccagtggccatggtcgtcggtcccatggacgtgggcaagagcactctgtgccgcatcctgcttaactatgctgtgcgcgtgggtcgtcgaccgctgtacgccgacctggatgttggacagggctcgattgccatttccgggagtgtggccaccattctcatcgagcgaccggcgaacgttgaggagggattcgccaagacagcgccgctggtctatcactttggccataagtctcccagcggaaacagcgtgctgtacaatgccgtggtttccaaaatggcagaggtaacactgcaatctctgaatagcaacaagcgaacaaaaagctctggcattattataaacacttgtggctgggtaaagggatccggctacgcgcacctgttgcacgcggccaaagcctatggagcctgtgccatctttgttctggaccaggagcgactatacaacgagctgcttcgagatgttcccaagggagttcatgtggtactgctgcccaagagcggcggcgtcgtcgagcgcagcaaggaactgcgacacgaggcgagggatcagcgcatcaaggagtacttctacggcaatacaagggcgcccttctatccgttcagcttcgaggtgaagttccaggacctgcgactctacaagatcggcgcaccgccgctgcccgactcctgcatgccaattggaatgaaggcggaggacaacaagaccaaggtggtggcggttacacccacgcccgccctaatccatcatgtgctggccctcagctttgccgagtccgtggaggacgatgtgattggcaccaatgtggccggcttttgttgcgtaaccgaagtggatatggaaagacaggcagtgatgttgctttcgccgcagccgcgacctttgcccccgaacgccctgctcctgtggtcggaactgcagttcatggataatcatacctag

SEQ ID NO: 12642 - protein, 423 aa, DROSOPHILA
MSEDQGKDYTLESDSELRFEIEQKDAKVLVSLVSGFAELFGTELVKKKQYEFGVGAKVAIFTYQGCVLHVSGKMDVCYISKETPMVQYVNCHAALEQFRMEAEEKDRYGPVAMVVGPMDVGKSTLCRILLNYAVRVGRRPLYADLDVGQGSIAISGSVATILIERPANVEEGFAKTAPLVYHFGHKSPSGNSVLYNAVVSKMAEVTLQSLNSNKRTKSSGIIINTCGWVKGSGYAHLLHAAKAYGACAIFVLDQERLYNELLRDVPKGVHVVLLPKSGGVVERSKELRHEARDQRIKEYFYGNTRAPFYPFSFEVKFQDLRLYKIGAPPLPDSCMPIGMKAEDNKTKVVAVTPTPALIHHVLALSFAESVEDDVIGTNVAGFCCVTEVDMERQAVMLLSPQPRPLPPNALLLWSELQFMDNHT

SEQ ID NO: 12643 - DNA, 13655 bp, DROSOPHILA
ttcttttttttttttttttggccaacaacaggcaaacgttcaacggcaatttctcatgaatattcacagtgtgtttcctttgtgatggcttttttcggcccgttttttttcttctttttttttgtgttaaaatgatgtttcgacaaacaaaatatattacagttgacaatcctatggtattccataaagctaaagcaaagagcttgggcaaacagtagaagcatcagtggaggcatcggcttgggcttcggatcgggtttggttatcggccggaagggctgtttgtccgtccggtttcggaggcggagtcctaaacgatgaggcggctggggcttcgtgggttgaaggcagctcggaacgaaagttaattaaaaatgttcaacgcatttttctcaataaaggggcaaacaaggatgggcaaaaaagttaagtttaaaacgcgactagcttgtgtgtatgtgtgtgtgtgtgtatccgtacatgtgtggctgcttctcacgtatttggctaattaaaaagccgtgcaacattattaatatatagatatatatatatttgtatgtatatcttgacttttacctgcaggtgcaagcaggtcaactacggcgtttccaacactccattgttggtcgaagctcagacacgttctcacacccactactcccctcccccactcggaaatctaccatctacccatctaaccatatacatccattcagctctccatccatccatccatccatctaccacccatccaacccagacacattcacacggcacaagcacacattcgaatcggagcgggggcgtcgtgagtcgtggttgatctccggacataagtacaccagacaaattatctaaaatttactagctcttttatgtataacatcttgttatgtgggtagctaatttcgattggtttgggcttgtgttcggattcgatttcggaattgggtttgtgttgtgtacagtttctggaggctcgccactaatgccttgcttattctgctgatgtttctgctgttcccattgcggctgttgctccagttgcttgtgttactgttgctggtgttcctgctgctgctcctgttgctgctgctgttgtcacttggtttgatgtatgttgtgaagttttcattagctgctgctcctgtgccttgtggtttgcgccagcattgagttggcaatttgctgctgacgttgggctgtcgccttctataaaatcaactgtttgcctgtcatccatcattggcctggctgttgcctcggctcctcctgccgctcctaccactcctacctctgttgctcctggcccagaggattgttttgacgtggcaactgctgatgttgctaccgttgctgtcgcgggctcgtccggtttgtttttctgcctctgctgctgctgctgctgctgctgctggtcattcataatgctgggtgcttgtagtgggcagctttgcttttcacctgatgccgttgctgcggatgcccccccctcagctttcagcaactctggcaaattattttctaattgcctcgcctttggctgagtctgatggacatggacgtgggtgtggatcagggtctgatctggttgttgagtgccgttcgttgggggcgatgatgctacagtagtttcatccgacatatttataatatccgccgcaacgaaatttagattttccagcgtcttggacatgcccgctatttgcccatccccatcgccatgctgtaggttttcttgcccagaattctccaccacctccactttctcctggccgggcttgtcctgagctccttccgctcccgttgctactgcatcatttatgctcgatgttgtcggctgcttgcgtccctgatttgtttcgacatctgaaatatgcagggaatttgaaggcagagtgaaaataaaacaggaaatgacaagcgaaacatttacagtgaacattttcctgcgaattgagaaataatttcatgcatattacgattattgtgtacagacagaaagacgttaagagcggctttgctgccccacgactattgaaaatgcttcaaaatcgagggttccttggttccttggatccatggttcgttccactaactcccaccaccactcgtgccaatctcgtgcagtgctctcgttggcatttattgccaccgaatctgttatttgcttatttgtattgcttgtttggttgttaccaactcacacacgagcttccggaggcgaaagggatttcccgtttgtcgagtggaatttaaatttgaatttatcttccaaacgatttcacacacagccaaaaaggacttcgtggcaacgaaaacagctctgccatcgtaaaaaaaaaatggaaagctactgatgtaagtcgaagttcggatattctatacactcatctgacagatgttactgaaaatcacgtttaaatacaattataataatcgcatcgtaaactaattacagaaattcttttgcctagcgcatgataacttatttgcacttatttgcgtaaaataacccgaggctaattgtttttctagcgaaaggatgcaattaaaagcacgatttattgcggattaaacagaaagagttcttgtgaaaaagcacctttgatgcaagcattatgcccactgaaaagggtatgcaaatggttgccacaaaagttaagagtttaagccctcgttgtgaaagtcaatgaagtgtgctggccccactcaattaaggcgagcgaatgtcgccaaagctcacctgctgcatcgttagctgctggcgttgctgccgcgtctgctgctgctgccacatctgtagttgcaacatcgccgatggtgggttcatctgttgcagcgctctggcccctttgggcggcccccgctgctgccatggccgctgccacctggttgcgcaagccaggtatgtcagcgacgttaatacgctgcagacgcacctgcatcagccttgcgttgccgccatgtcccaggaagacgcgacgcacggtggcgaattgctcgcggccctgcaacaactggcccaccacgggcagtcttctcaggttggccaaggccacgcccacggcggcagtgggtcctggcgggcgtggttcctgctgatggcgttgtgctgcaagttgactgaagagccgagtgactatgagacgggcacgttgcatggacgcctgctggccagcaccgatgccgcctcctcctgccccaccatctccttgctgtccaccagctgcagcgcctgctcctgcgccccctcctgctgcctctgctccgcccgcgcccgctgccgctgcagcagctgctgctgctgctccctggttgcgtgtaatgatgaagacctggtgctgggccatgatggctggcagctcgtagcgatgaaagaagaacaccatcgagtgctggaaaaaggaaggggcacgagtgtgaatctcagacagatatatggagcagataggatgagatgttatgccacggtcgccgggcacgtgagaccggtttcggtctgcacgtgagcctctggcctggctggaaacaatgccacaatgccacaaaaggccagtggagaatggcaatttgtcatgcacttgacaggcgtaaacatggccggagttcgtttccatcattgtcgcagcgtcgttgcataacgcattcattattcgccatggttacgccatttggccacgtatagcataacccacctgggtgaataggtacgacgagagcagggccagcgtcctgtactgtccactgaagcgatagtgatacgcatagaacgcaaaatggtacaggtagaagaatctgcaagtgaacaaacgaaacgagttagatccaggctcaaacaattgtcacccgagaggcaggcaggcacatccgtttcacagtcaatggttggaataggtacgctttcaatactacaacagagtctaattgattatatattcagatcttaggcgaactttaaacctaataagatagatacatagatggatgtataactaaatgggttttaacgaattcataccttaaaacgaatcattcattcatcagcccagtcaacctaatgctatatatatctcggtttaagtgagtaaaacatttaccccatttaaaagtggtttcaaaagtgtcaggcacttaagaaaatcgaaaccccatccttggcatagaacataatagaaatagccaaacgatttgctcacatccattttaaagctgccaacaaaaaaggaaagaaatcgtgtctggggcttcgaaacccacatcaaatatcggcgatcattgggcggaaagcatgattaccattcaacaaaatggtatttagttgacaaaaaataaagagcaaaaacatattggtttctgtttttctattttaccgccacctccttgaaactgccattccggttcattttttttccgttttttttttttttcgggtgggccgagcatatgctgtggagaaatgggtcagacgtgtggcggatggcgtacggcggatagaggatggaggagctaccctgggagtccgggccatgacataagagtaacaagtaacaagtaaccatagccggggcgggcaaatatcaaaatgccaagacaacagtggcggcggcgagaaaccgaatggaaacggaaacaacaatggccccattgaatgaaggggcagaggagggcaaaagcgggggcaaaatataaaaaaaataacactcaagaggatttaataatataaataattgctggcgctgttagctgaattgtagctggcccaaaagacaacaaataaaaaacacaatggatggccgtaacaacaacagaggcaacaataatgacgggcgaaggcgactctcattgataagcaatggacaagcggagaagcggacaagcggacaaacagcttgacaaccggacagaggacctttggcgtggccagcggaattcaactttaatttatttttacaaccatcggggggtagaatggatacgaatcggaaacggaatggggatggacatggtggttttggggcatggccatgattgagttatgttattgaatttaattcgagttgattgtgtgcacacacacacacacacacacacaccgagtaacccagaagtatccgccatcaatatcaacagcgacaaatgaagacacacgactcttatttagcaagcctttccagggcattgcgcaagctgaggagcagtgagcgttgagcattatggacacatacccgccgaacgcttgccagcaatttcctcaatttccctcgcactgacacatggccacatggatccacacacacacacacacacacacacacacacacacacacacacaaacacccgaatcctcgacgccgggtggctggtaaggaagtgcgggctgcaggcacgtagacaacacttatcgcccgttcgtttccgtttcattcgctttcctaatgtagcgtagcgttgacaagcagcaacgcctcatccccgcttccgctccttaccctttccttcgatgccacccgtaacccgtacccttgcccagacaatgctcctcctcctcatcctcatcctcattccacttgcattgccagcgggcgcacagtgtactgtcatcttggaaatacttcttaaggagcaatatcttgtggacactcaaaacatcactgtccggacaaatctctcttgagcggacaactcttgagaatggagaacttcatatgttccgataaagttgtatatagattttaagcaaaagtagtaagtaattagtaagaattatatttttcttgaaaaagcttttaaggaaattacttcatagcttagaaatgcaatcatatttcaaaaccagaatctgttgaattttgaacattctcaaagaatcagtagaaatcaatataatcacagtctgactacaagaaatgaatcttacaactctttgcttgcaataagcaatccgtttcgattcaccatcgaccaaggtgcgatgtggcaggacggatgtgcgccagcaaatactgttggctttcatatccttcgcaccaaaagcggaagtgggcgggccagtgccaggatggcaaataggacaactgttgcatgtgtctgctgctgagtgtgggtgtcggcgggtatggtgtagagtctgagtcgggtagcgtggttaagtaagcacctcagctcagctcaacctgatggcaagtgcgaaatgctgctgttggttgtgtcagtttttgcagcaacgatgatccgatatgcgtcataagtgtttatttgttgcaggtaaacaccgagggggcaaattagaacgagaagaaggagccatgtgggcgattcgtaatagttaaagtgctcaatgagcttgtaagctcctctgttgaaatggttgcttttaatagcatttgcatacacatatgggattgcatatctttgaagggcggacggggaaacggaatagtgaacaggagaaaggatatctctttcaacagatgtaaggtaggggttcaatgagtttttgattcgatgggagaaactcgaaagcgaagtgccggtgagtgaatgcaactcgaaacataattgaaatatcacaaaaagtgaagtgtttgccatgcaaacaccacgcattccattgctctagctttctcctcctgttaaatgcgtgaaaacgacccattttcgtgcataaattggaacagagttgtcgcatatgcaaacaacagacaaaggcacgttgcgcatacgccatgttaacaaacaaaacaagctgaaactgaaacaaacagagtacaaacacacacagccacacacacacacacacacatacacacatcaactggcacacacaacaatgaagcgattttgcctcgttatgagcactcatcaactgcacctttgaacaacacccgcccaacgagtatacacccatccagttggcacccatccaaccatccacccatcataggaacccccccgttttgagccacttctgttgatgggggtcgccgcccgcgcgtttggacaaaagttatggcagaaaaacaaacttgacgcaattatactttgcgtaacatgatctcaatcaacacgaaaacagccaaaggagtgcaaagcgaaaggaaaatgccagcccatttcctttcccaccagtttttccgggggctcccttcaccatggttgccaatgccgttgacgttgaggctaacccgccgacaccgtggccacctattcagaccgtgaagcggcaacaatggcttgcgaatatatatgttatatggtccccacctataccctatatataaatacgtatatatgtatatatatttatatatatgtgtatatattcgctatgtttgttagcgtaacaagcgtgtaaacaagaggacgaaagcggagacgaagtcggctacttgaggcgcgctactgtaaccgacctgaacccaaacccctttgcccaaccactttggccccccgactccgggttcctggcatttgctctttgatgcttgggtcctcagcttcgtcagcttcctcgccattcagctttcagcgttcagctttcgcaacgcgacaaacaatctgcgcaagactttggattcgtagccagcagcaggcagcagcaggatgaagtggaggccagcaaaggtaggtgtttcttttagcttttcctgtgcgtttgcagctcatttaatacgtgtcgtctgcccgtgcctggcaaccagatttaagcacaaaaggagcattacgcgccgcaagaagccacagggcaaaataagaagcccaagtgaaagggctgctgggggattgggggtaaagtccgggtgtcaggggcttattatgctccttccgtgcgaatatatatggatgtagtcagggatggtaggtggtcggggtagcatcgttaaacggcgattaagaagagccgagacagccgctcctttgatgactttaaagtcaattagaatgaattgaaggcaattgacaggaagttcgcaaggttagagttgggctaaaatgaatagagatggaatggaggccggagcagaagcgaaatcaaaagcagcagctgaagcccgaggtttgccacttgacaattttaagcttccgactgccatctgcaattgccatttgcaattcacgttgattgcaacttttagcaaagtttaagtacacaaattagtctatgcaatgaaattaataccatttggcggactgcaaggggcggctttgaattggaacagctgtggtagtagctaaaaagcaaaaagcgccgccagcttgtttgtgttctatgctaacttcaatgccagccggcttgctccttagccgacttgactgcctgcctttcgcagaccaagttaaccgcaaaaacaggcgagcaaatacggaagcaggaggagcagaaggatcgggccagtaagccccatcacctcgggcaggaaggaaggaagtcaggaaggaagcaggaagcagcagcacaagcaatcccggccctgtaacccataaccgcaggacccacaacagcggcgccagcaagaacaagaaagaattcctaacttgccatgatgaaatttgtaataccctagcaaaaaagccaagttgattacaatatataataattatgttcatttaacaattataaccacttacaatagatttgttttctaattataatatcactcaaatccagttgccatacacatgctgtttaaatttcattatcaaaagccgctttctccgaattatacaccccctatgcagttagggtacaaatatactgttccggaaacccctttcaccgcttggggcagtcaataacagcaaaattaaaccgtaggaaagcacacacactcgaaccagcctcccccacatccagaaaacacaccctccagacacacaaaacactcacaaacatgctgttatggttccggtggagcgtccacggccatatggcatatggatgtgccaggattccgtactgaattaatttcacttaaagcgaggaaggacccaagacgaaagctccttggacttggacttagaccaatacccatacccaatcaatgtcctttatagagctacctatgcgaagcaacatcagatattgtttgccattcaattgcacagaaaaggattcgctcggtacgatgcaattggatattttttcattcaaaagttttgcaaaaagtttgacaatctgggcgagcaaatgatgagttatgcgaaactcgaaggagcgcatcagacacaaaagatattccattttggccaggtgcacatcacaacctaacagattagtagcgtcgttgtggtctcacagaggaactatcatcgcaatctcgactgccttttcatctgtgctggaagaaatgcgagacaaaacgatgccttatgcctgcttcccatgaatttttaatttgtgccccagtaaattcacgtaaggtgtaatcttgcccaagttatgttcttcgtctggccgctacccagctgccatttccataggaatccacaggacaagctgtgggcaaacaaggcgagcacatttaaaatcattcgcggcaatgaatctttaatgaatataaatatacgtcaagtggccctcgtggaggcgacgagactctttacttgccaaaattttctggaccactgatagccttttaattcggcgcaaattacgcaaaatcaacaccgcaaggcggttgtgtggccagtgattgaggatggatgcaggcacatgaattcataatcaaggcgtgcggaccttggccctcgccgaaaagggaattttcgagtgtcttcttgaattattgatggtccgttcagcgcatcgtggaaattgatgtccggaaaagtggccgaaaaaaaaaaagatggaaataatttcttgcggcggccgttctcaattatgcaaagtgcgcgtaataaaccgcaaagtagctctgtttctggcgaggatggggttgtccgctgtcctgacgtgcatggtcattaatgtcgatcgaacaacgggaatgagcagctctaaatttccatagctttttttttcttcgcattttttcccctttttgtcgttttttgctgtgcgggcagcgtgtttatttaaatgtttgctaatggtgcggctcagttggttgggccagttggtcaggagctatatgcatgatggctatatggagaaacggcgcttgggttacgcttgttgacttaagtgatgaaattctctgtttgccggtgtctgtgtgtttgagtggatagagggaaggacgcggacatcggcgagggagggacctgccccgccccctggcgaaggggtggcggccactggtcgatttgttctggccccgggggaggcttgcgcaagccaagttaattttcaaataacaaccgggacgccggcggttggattgggagaagagtgcaaaatacacggactgagaccaaagagaaggaaaatatgcgaaccgaacgaaatgaactgttaagtgctgatgactgaggtgggttgggatggccaagatgccgggtggaagctattatctatggccgggcagcggtaacacatagatgctggaaaggattgcagacttaatgtaattgaatttgtcatttgtccggggcacggacgatttcacagtaaaaacaaaaataaacatggccagaatggggatactctgctgggctggatacgtttgggaaaagtaacgattccgaactggtacgcacctgagccaatgacgcttggtgatgctcgtgtgacagcagatggcatcgtattgatccgcgatccagacaatcagtatgatgtagaaggccgtagtggtgtcattaaagaactccgacatgatggcttccattcctgaagaaaaaaaatacaaatacaatacaagcgttaatgggaatgcaaatgaatcattaggcaggctctttccacacctacgagcgccaatatgacagtgagcaacggtgcgattgggaaccgggcagacacattgtactccagcatctgcagcaggtcgactaaaagagaaaacaatgtccttaaagtatattaaaacttggctgggttgtatgaatttattacctataaacacaaagatctggtggtgtgagtagcgcagcaacatcgacactgagaacgtctgaaacacaaacttattttagtaactatataatccccgtgatttcagttgacttacgaatagtaacataacacagaaggcagccgggtaactgctccaggctgcccaccacatggagacgaagcgataatgttcgccggttataacattgcgcaggtagcccttattttcctcctgctcggctattgttcgtacggatgccattagtaagtcatcatagctataaacaaagaggaaatatttttaaaatgcagctgcactttaaaccaaagaatatttcttaccctagcaaacgtttgagcagatatcgcgtcaaactgtccccaaaacacttgtccgtattgggatccagttggacagtgagtacgggtatgcgtagacgctttcgcgtggatgaagacaagcggaggtggccgtattccaatgaatactccacaatgtactgctcttctacaatagaatatgcttattaggaaaaactatataattaatatttagaatttccaaccatcatcctcttcgttcttgagctgtattgcatttggatggtcgtaggtgtccaggatgttgatggcatcaaagtagtagtacagggattcgttactgtaagcgaatgttggtcggacgggcagacccagttttcccagaatggactcgtaccgtttaagcgtttcgtgattttgacgagtttggggtccaataccatagtagctaaaacagattagtgtacatgaagtaactttcctttattaaggatggtttttgtatgctcactaggaatccttgagggagcgcactatttcttggtcccttttaattccctgccaaattgcacgcttctccgccaggtgaggaataatttccactctgcaaagaagttctggcttaataatgattgaaactatgcaccaagggtaatccatgcctgatgacgccttcgcgcggccagttcttaacatcctgcaggcaagtgcagggattcttgatgaaggagttgtgcacgtagatgagcgtaaagaagaacagcaaggccttggccagcagcaggaactcaatggtcaactgcaccttcctggaaatggaaaatcatatgcgggtgataagggtgggcagataaggggggccaatgacttttaccttggaaccaactccgcataggtggccgccgcccgaaagtatatggcatggaacagtcgatcccgcatattcatcatgttgttctgcaagtcggggaaaagataagagtgttgtgtttttaacaatccatgggtaattacatacctggccaccaccacctaatccgccaggtagcacccgattgcgcccgttcccatttccattcccgttgatgttattgattgcattggccaccgcgatctcggccgcgttttccggcagcacagcggccatggctggagttgaaggttgttacttccgcgtctggttggcccctcttccgcagtctgatctgatctcaggtctacggatatttctcaatcttgatctcagagagttggctaaaattcacttggcggaccacaacaacaacaaccaggtccgcagcagaggtgaccagcgagcgatagtaattatcgatagtttggtgaaaaattcatgttttggggaacagtaacggttgagctggtgcactataaaatattaccaagaactttatttataataaatgtatacatatatcaggtccttttacttcgttttcaaaaaatttgcctataataaatcgattaatgcaaaagttattaaaagttgaaactaagaactctttagaactagttctatcggctgaccgctaaacgaaacaaagctcaattcggaaccagcaccagcaaccgttcagagatgaaccagctcaaccggttaaccggttggtaaatagcggcaagttcaaattcgaaaacccccatcagtttaaccaaaagcaagaaaacaacatttataatcgttttttaatttattttctgcaaaccaatgtacgaaattaagtatctcaatgccgcgatcttcatttgttatataaataagctacattgaatgtcgtttaatttagttttacattgattggtggttgtgatttctttattcattttacgccattgtttctatagtttctcatagtcatatatagttacgcatatgtgtttatgatgtatatataactacatacgtggttgttatctcattaagctacaaaattatactcataagacgaatacaaacgattccaccttcttagttagttatttttatttaccatttaccatataccatactttgttcgctcttttacaattgtttcaacaggctactcggattagttgtttgtcttgcatttaaaaatttcgctatgggattgttaaattgctttgcgttcgttttttgtttggtttccattagctagtttttcttgttgtttttgtttttgtttttgtctgttgtttgtggttgttgtgagtgttttattgtatagtataaattgttaaaaatcgcccacttttttcaattctgactcag

SEQ ID NO: 12644 - DNA, 2988 bp, DROSOPHILA
ccaagtgaattttagccaactctctgagatcaagattgagaaatatccgtagacctgagatcagatcagactgcggaagaggggccaaccagacgcggaagtaacaaccttcaactccagccatggccgctgtgctgccggaaaacgcggccgagatcgcggtggccaatgcaatcaataacatcaacgggaatggaaatgggaacgggcgcaatcgggtgctacctggcggattaggtggtggtggccagaacaacatgatgaatatgcgggatcgactgttccatgccatatactttcgggcggcggccacctatgcggagttggttccaaggaaggtgcagttgaccattgagttcctgctgctggccaaggccttgctgttcttctttacgctcatctacgtgcacaactccttcatcaagaatccctgcacttgcctgcaggatgttaagaactggccgcgcgaaggcgtcatcagagtggaaattattcctcacctggcggagaagcgtgcaatttggcagggaattaaaagggaccaagaaatagtgcgctccctcaaggattcctactactatggtattggaccccaaactcgtcaaaatcacgaaacgcttaaacggtacgagtccattctgggaaaactgggtctgcccgtccgaccaacattcgcttacagtaacgaatccctgtactactactttgatgccatcaacatcctggacacctacgaccatccaaatgcaatacagctcaagaacgaagaggatgatgaagagcagtacattgtggagtattcattggaatacggccacctccgcttgtcttcatccacgcgaaagcgtctacgcatacccgtactcactgtccaactggatcccaatacggacaagtgttttggggacagtttgacgcgatatctgctcaaacgtttgctaggctatgatgacttactaatggcatccgtacgaacaatagccgagcaggaggaaaataagggctacctgcgcaatgttataaccggcgaacattatcgcttcgtctccatgtggtgggcagcctggagcagttacccggctgccttctacgttctcagtgtcgatgttgctgcgctactcacaccaccagatctttgtgtttatagtcgacctgctgcagatgctggagtacaatgtgtctgcccggttcccaatcgcaccgttgctcactgtcatattggcgctcgtaggaatggaagccatcatgtcggagttctttaatgacaccactacggccttctacatcatactgattgtctggatcgcggatcaatacgatgccatctgctgtcacacgagcatcaccaagcgtcattggctcagattcttctacctgtaccattttgcgttctatgcgtatcactatcgcttcagtggacagtacaggacgctggccctgctctcgtcgtacctattcacccagcactcgatggtgttcttctttcatcgctacgagctgccagccatcatggcccagcaccaggtcttcatcattacacgcaaccagggagcagcagcagcagctgctgcagcggcagcgggcgcgggcggagcagaggcagcaggagggggcgcaggagcaggcgctgcagctggtggacagcaaggagatggtggggcaggaggaggcggcatcggtgctggccagcaggcgtccatgcaacgtgcccgtctcatagtcactcggctcttcagtcaacttgcagcacaacgccatcagcaggaaccacgcccgccaggacccactgccgccgtgggcgtggccttggccaacctgagaagactgcccgtggtgggccagttgttgcagggccgcgagcaattcgccaccgtgcgtcgcgtcttcctgggacatggcggcaacgcaaggctgatgcaggtgcgtctgcagcgtattaacgtcgctgacatacctggcttgcgcaaccaggtggcagcggccatggcagcagcgggggccgcccaaaggggccagagcgctgcaacagatgaacccaccatcggcgatgttgcaactacagatgtggcagcagcagcagacgcggcagcaacgccagcagctaacgatgcagcagatgtcgaaacaaatcagggacgcaagcagccgacaacatcgagcataaatgatgcagtagcaacgggagcggaaggagctcaggacaagcccggccaggagaaagtggaggtggtggagaattctgggcaagaaaacctacagcatggcgatggggatgggcaaatagcgggcatgtccaagacgctggaaaatctaaatttcgttgcggcggatattataaatatgtcggatgaaactactgtagcatcatcgcccccaacgaacggcactcaacaaccagatcagaccctgatccacacccacgtccatgtccatcagactcagccaaaggcgaggcaattagaaaataatttgccagagttgctgaaagctgaggggggggcatccgcagcaacggcatcaggtgaaaagcaaagctgcccactacaagcacccagcattatgaatgaccagcagcagcagcagcagcagcagcagaggcagaaaaacaaaccggacgagcccgcgacagcaacggtagcaacatcagcagttgccacgtcaaaacaatcctctgggccaggagcaacagaggtaggagtggtaggagcggcaggaggagccgaggcaacagccaggccaatgatggatgacaggcaaacagttgattttatagaaggcgacagcccaacgtcagcagcaaattgccaactcaatgctggcgcaaaccacaaggcacaggagcagcagctaatgaaaacttcacaacatacatcaaaccaagtgacaacagcagcagcaacaggagcagcagcaggaacaccagcaacagtaacacaagcaactggagcaacagccgcaatgggaacagcagaaacatcagcagaataa

SEQ ID NO: 12645 - protein, 379 aa, DROSOPHILA
MAAVLPENAAEIAVANAINNINGNGNGNGRNRVLPGGLGGGGQNNMMNMRDRLFHAIYFRAAATYAELVPRKVQLTIEFLLLAKALLFFFTLIYVHNSFIKNPCTCLQDVKNWPREGVIRVEIIPHLAEKRAIWQGIKRDQEIVRSLKDSYYYGIGPQTRQNHETLKRYESILGKLGLPVRPTFAYSNESLYYYFDAINILDTYDHPNAIQLKNEEDDEEQYIVEYSLEYGHLRLSSSTRKRLRIPVLTVQLDPNTDKCFGDSLTRYLLKRLLGYDDLLMASVRTIAEQEENKGYLRNVITGEHYRFVSMWWAAWSSYPAAFYVLSVDVAALLTPPDLCVYSRPAADAGVQCVCPVPNRTVAHCHIGARRNGSHHVGVL

SEQ ID NO: 12646 - DNA, 4941 bp, DROSOPHILA
tattgtgtgttcatggcggcctgtcgccggatatgcaacgattggatgacttacgtagcctggatcgctgccacgagatacccgaaagtggaattatagctgatcttctctggagcgatccacaggaagcgcctggatgggcggcatcgccacgaggacatggaaaactcttcggtggcgatgttgttgaggagtttacgcgcgcaaatggaatctctctcatatgccgcgctcatcagttggcccaggatggcttccgttggcattttggccaacttcttgttaccatatggtcagcacccaactattgctatcgctgcggcaacaaagcggctattctgcgcttaaatgctgctggcgattatgattttaaagtgttcgaagcgcaggcgctgcactccaaaccgcagccaaggaaaccgaaaaagcgttgtcgtcaattttttcaatgatttaatcgctatctgaatcttatcccaagtattaatacggtttgaactggccgaacctaccgatcactccaaagcgacctttgccattccaaactactcatatactcataatttcgtaatcaataaaatacgtgtacttagtaaaacatgcagctagatttacgttttgactttggcggtctttttatatgcaggttataatgatcttattaaaatataatgaccttgttaaaatagtttttactatcgatcatttgaaatgcaactaagcaactaaaattaatgcacttatagaatatctactttatgaaacatttcatttgaaatagtaagatcgtatatgtacatagcataactgcattttatctgcttagcaagtgagtccatattttttgcagccactgtgccgactcgtgctgactgtgcatcttatcacagagagcaaaagagagcgatgagagagtcatcatagatgtagatgtagttgtatttgtagcggctttttcacgcgacgactgggcttcatttcaattggaaattggaatcggcggcacgcggtcgcacgtatttgttaacttacggagttcggtgtgcaattcaaatcggaaattagccaatttttaacaagtgtttttgttttaatatgacggaattcgatgtaagttcaagtgcaagccgctttttctctctctttctactgtcatttccatttctcttttacaattcggtctctctgtttatcaaccagtgctagtgctgtgacgtcatggctaatgggtctcggacttgtttccaaagcaaaaaaaatatatactcatgcttaataatggaaagctcaaggtcgcttttgatatggggttaaagttggaagtctcaacctagtaaaccaaattagcagctgttttttttaaagggcgccttcgctttgcaatcacatatatcagttttgagtgcgaataatctgtgtgcgagatgtgttttttatttttgtgactttcttatcactggcggtagtttccaccagccacagtgacctttcatagcccatcagcccatcggaagaccaaacgcaataccactgggctaaaaattagctcaactaaatatcagattattaatacagtacaatatacatgcttaccatttaaatgaagtaaaaaattactatattaaaagatatgatcatttttgatcaggaccaatagcagagtaaaactggacttttttaatttggtttaatattttaaatatgacaaagagataatatacaaaggatttttccatgtatattaaaagatatatatgtttccatttctcacgatctcaaaagattaatttttactaaaattacctaaacagggttacaagattaagtttatagattatattgttattgtgctatatttaaaataaaaatgcagtcagtgcaatcagctttaaataaactgcctataggcctaaataattgattgaatctgcacttatttcaattttaacaatgagaactatgaaataggagttacgtgtgcattttgtgactaaattgtctcacttatattattactttttagtttgtgccactcgccgtgggtgtggtagccgtactcgccggcgccctgatcgtccactatctgctgaataagaagtccacgaaaccacgccgggaacccaatcgcaccgctcggctgcgcacacttgtggatcccaatgacaagtacctgctgcctctcatcgaaaaggagaatctgagccatgacactaggagattccggtttggattgccctccaagcagcatgtccttggcctgcccgttggccagcacattcatctgatcgccaccatcgacaatgagctaataattcggccatacactccgatatcgtctgatgaggatgtgggctacgtggacctagtcgtcaaggtgtacttcaaggattcgcatcccaagttcccggccggcggcaaaatgacacaacacctggagcagctcgagttgggggacaagatctcgttccgtggtccctcgggtaggctacaatatctcggcaatggcaccttctccatcaaaaagttgcgcaaggatcctccaaagcacgtgaccgccaagcgggtcaacatgattgccggcggcactggcattactccaatgcttcaattggccagggaagttctcaagcgcagcgataaggataagactgaactggcgttgctgttcgccaatcaggtaattagcgagcacttaggctagccaagttaactaacatggttgtattacttccttgcattaaagagcgaaaaggacattctactgcgtgcagagttggacgaactggcccagaagcatcctgaccagttcaagatctggtacacagtcgacaaggcaaacgaaggtgagttgcagtaataaaggaactaaatagctcatgcatagatatcattctcgtcttcataagatcgtatcatttgatcaatgtctagctcgtttgtacaattcaaaattcgctggaatgtcaattattttattgttagaactttaaaaccgtttaaagcacttaataccatggtttactctttcacttcgaacatattcatggactctttttttcaagccacattcaagaatattccacttagagtcggttcagaatggaatactacattttaggctgcaccaatctttcccttgcatcccagcatccccatcaccatccggagtatcactcagacatttttcaagcatctattatgttaagaatcttgtctctgccccttgaaccatgctgctatcaaacgcatgccgcgaatgggaaacgcgcgctttgtagcctggtcctacaacactggccacgtgaacgatgatatgatgcagcagcatctgtatccgccgggcgaggacacgctgtgcctactgtgtggtcctccacccatggtgaactatacatgcattccgggcctagagcggcttggtcacagggccgagcagcggttcagctattaggagttgatccagccgacaacatagatactattgcctgtgttttgatttaatttaacaatgctgagccagtgggaaagattgtgtgcatcaggtcttgctaagaacacttgtacgccctaaaatgttgcacttatattgatattccttcatattttgcatctaggttggcagtatagcgttggcttcatcaatgaggaaatgatcgccgcccacctgcttccggccaaggacgataccattgtgttgctttgcggcccaccaccaatgattaactttgcctgcaatccggcgctggacaagcttggctaccatccggacacccgttttgcctactaatatgatggacattatgggacgaaattgcattttcgttgtgttatattcctctttttttatctgttgtctcttaccagctcatcaaaatccaagagttcgccaagatttcggcaatgtgattgaaaaccaagcgaataaaaacattaattagtttaaagtttaaagcattttatgtttagtgttattgtggacataaaacatagataacattgataacatagccaaacatcgttattgctaagcattgatgtcgctaaacattgatattgctaaacattaatgttgctaaacattaatgttgctaaacattaatgttgccaaacaagcgatgtggccgcttagaaaaggaacaacttttccaggaagaaaaggtcaagttgacgcaggaggagtgggatttaggttattttattaaccaataaaaaatgctgttcgtttgtaattaatttatttcataagtattgttgttaattaatatgtgattcatttatgaactgaatgttctgactcctattgatttttacttcgtttttaatggccattcagtcaaacaaaaacgttcagttcgcttgaaattttattaaaatgtactaacaaattctatgctaactacttttaacaaaaattatcttttgcaactgcagtaaataataatttaaagtttatttaaaaaacttcagggttcgttgcgacaaatgatggaaatgcgacgtgtcctgggcaccagcgcaccctgaaactgggagtgctccttagctagtatctcgtgtgtgaatttgtagcgagccgtgtggctcattatgtacaaggagcggcgcggcaacaggatgtcagcgtagaagttgttctttagagacgcctccggttgatggcgataggctgcatcgggttctgacccctgggaattcggatccgttgcagttcccgacgattgctgttggtaccgctgctcatccgtgcgcacaagtcgcatcacactgtcgctaagtaggctgattccagagatggtgttgccgcagtactattaggatgaacgaaattaatgataagcctttctggtgatatcattgcaatgctggacatactctcgtgctatccacatggggcttgataacgccatcgggtgcaagatctaggatgtggacatagggcat

SEQ ID NO: 12647 - DNA, 1191 bp, DROSOPHILA
cggcacgcggtcgcacgtatttgttaacttacggagttcggtgtgcaattcaaatcggaaattagccaatttttaacaagtgtttttgttttaatatgacggaattcgattttgtgccactcgccgtgggtgtggtagccgtactcgccggcgccctgatcgtccactatctgctgaataagaagtccacgaaaccacgccgggaacccaatcgcaccgctcggctgcgcacacttgtggatcccaatgacaagtacctgctgcctctcatcgaaaaggagaatctgagccatgacactaggagattccggtttggattgccctccaagcagcatgtccttggcctgcccgttggccagcacattcatctgatcgccaccatcgacaatgagctaataattcggccatacactccgatatcgtctgatgaggatgtgggctacgtggacctagtcgtcaaggtgtacttcaaggattcgcatcccaagttcccggccggcggcaaaatgacacaacacctggagcagctcgagttgggggacaagatctcgttccgtggtccctcgggtaggctacaatatctcggcaatggcaccttctccatcaaaaagttgcgcaaggatcctccaaagcacgtgaccgccaagcgggtcaacatgattgccggcggcactggcattactccaatgcttcaattggccagggaagttctcaagcgcagcgataaggataagactgaactggcgttgctgttcgccaatcagagcgaaaaggacattctactgcgtgcagagttggacgaactggcccagaagcatcctgaccagttcaagatctggtacacagtcgacaaggcaaacgaaggttggcagtatagcgttggcttcatcaatgaggaaatgatcgccgcccacctgcttccggccaaggacgataccattgtgttgctttgcggcccaccaccaatgattaactttgcctgcaatccggcgctggacaagcttggctaccatccggacacccgttttgcctactaatatgatggacattatgggacgaaattgcattttcgttgtgttatattcctctttttttatctgttgtctcttaccagctcatcaaaatccaagagttcgccaagatttcggcaatgtgattgaaaaccaagcgaataaaaacattaattagttt

SEQ ID NO: 12648 - protein, 313 aa, DROSOPHILA
MTEFDFVPLAVGVVAVLAGALIVHYLLNKKSTKPRREPNRTARLRTLVDPNDKYLLPLIEKENLSHDTRRFRFGLPSKQHVLGLPVGQHIHLIATIDNELIIRPYTPISSDEDVGYVDLVVKVYFKDSHPKFPAGGKMTQHLEQLELGDKISFRGPSGRLQYLGNGTFSIKKLRKDPPKHVTAKRVNMIAGGTGITPMLQLAREVLKRSDKDKTELALLFANQSEKDILLRAELDELAQKHPDQFKIWYTVDKANEGWQYSVGFINEEMIAAHLLPAKDDTIVLLCGPPPMINFACNPALDKLGYHPDTRFAY

SEQ ID NO: 12649 - DNA, 4009 bp, DROSOPHILA
ctgtttgcggctggttaactgagtgggtgtattggccacatcgtagtccagctcatcaccagtttgcttaaggctgtgatacaggaacttggacagcaaattctttgtttgcagcgcctcccgggaccgctcctttaggcagtagttgtgctgtgtatctccataggtcaggacgtgctccagaataaaggatcttagccacttccagtcgtcatccgcctttcgcagcagatacttctggatgtcgaactcatccaggagcaacgtgttgcccaccttgtgcacaaccatgctgatggcgctcttcgcgctgtaaggcaacttgagtagctgcttgatattctccgcgtcgctgaccacatccacctctcccacgcagtccggaaacatctggcccaatcgaaaactggcaaagccagcactttggtagagggcctggtgtaatccatgactgctgtgcgacgttgtcagccagttgagaggcggaagattcaagttggtgttgcactccagccgcttgaagtgggctggcactggaacgggagacaacttaatcaccgcctggctttttacgacgtccaactcatgtggtccaatactcctgcacggttcaatctatcgaaaaacatgtgttatttatttaagcttctttgcgcacattcttacttcttcgtttctatcttccattattgcgctcgctcattggtaactccctgaaaatccaatcccgtggaatattcaagaaactttcgagcagatgtgtttttgttttgccggctcagctgatagctgccgcagttttccaacaccggaccagaccggcgctgccaacttagtgccagcacagttgcatgggatcaggtagacttcaaaacctctacaatttataagggtttaaactaagtttcaagactaattatatatggcatacaataaacctcatatttagttattcaatacttccaacacacttttgctctctagatgatcgaaatgaaacttacaatgaaatttctttcagtggtagctcaaaatttaagcataataattatttcaaaaactatgtgaaaatataactgtgggaaaccgtcccctctcctacgccactggccaattccaagctgatgactttctgatgctcgttatccagcactggtatattattttgttttccattcagtaacacgattatcacaaactgtcgcaaattttcccgaattgaatacaaatctgacacaaaagcatgacactgtttgccctcatcgccctgctcagcctgctgaacacaatcctgccagatttcataaggaactacgtgagtaccatccgcaagagaaaaccccagtgtagaaccttatcctgacctgcagctcaaagtgtcgcggttgtggggcgtaaggaactccgcggaaattcggcagttgcagacagaactggacgatgcccggaagcaagtggaggtggtcagcaatgcggagcattccggagagtacgccaggaccatcaaaattatgcgcgccgagcgtaaagtatcagaggcggaggcgaaactgaaatctgcccggggaatggagaacttcatgcggataagcatcgatacggccatgttctacggatctaaggtgctgctctcagcaataaccgtgtttatcagcatccggaatcgtggaacgcccgtcatgatcatcgatgaagcgatcagcctggctccgttcacaggacttcttagttttcctactggcgtggccaatgccatttcggtgcccgcctgggcattctcctgcaacctgacatttcgactcatctacggctttgtgaaaaatcgtggggcgtgattccatccgagcgaaatccctccatttcatttagcacttagaaggcgctcgaaactatgtactttgttatggtttgctaagcttcatcatgcattgactcttgaatgtaaaggcccaattttatgtaagcaccacatcaaataaatgtattttcagacaagattcagtttgaatcacgcgccttggtctaagggtgttttccatcactgctcgtaaacatagtgttgcgctgtgctcactctagatgagtgcgtgtcattttccccatccaatttgtttggtgttttgttagccgaaatggacaaactaaatgaaaatgctcgacagcggaagcagatcaagctgggagagatcgacacgggccccattatagtggccctcctgctaggcttcattgcagtgggtgagtccgccacgtggagttcgccttttgccccagggagtctcacctgatgtctataatcccgttcacacgttttctcttttagccatatttgtgatcctgcgaagacgctctgctggtcgcaaggactttctgcttactgggctcagtgaatccggcaaaagtgccatcttcatgcagctgatccacggcaaattcccggccacttttacttccatcaaggagaacgtgggagattaccggacgggcagcgcgtctgccaggttagtggatatacccggacattatagggtgcgcgacaagtgcttggagctatataaacaccgtgccaagggcattgtctttgtggtggactcggttactgcccacaaggatatccgggatgtggcagagtgagttttcaattaatgtacaacctagatgcggtgctaatcttattggttttccagctttctgtacaccatcctatcagacagtgccacacaaccctgctctgtgctagtcctttgcaacaagcaggatcaaaccaccgccaagagtgcccaggtcattaaaagcttattggagtcggaactgcacacagtgcgcgacaccagaagccgcaaacttcaatccgtgggcgacgaggatggcagcaaatccatcacattgggcaagccaggccgtgacttcgaattctcacacatcgcacagaatatccagtttgcggaagcctccgccaaggacactgaacttgatcccctcaccgattggctcgctcggttgctgtgaattgggcacacaaggctctcagactgataaaaaactggagtcctgaaggaaagaatgcggaacaaaaaaacaacagattgatatttattttaacgtttagcgctctgaatgtcgtatttattatgctaagccgatatacaccgctgagtataaatccgtgcattgttaaatatcctcttttcccatcctttgccttccacctattttcccgtctaattttaggttattgtggaaattttatatacttttagcattaatttgtcggtagataagtgataaagtcatttataaaccgattaaaaagaaaaaaacccaaataagatttacgagtttttaaaagcaggttgtgggatcagcaaaggctccaaataatagcatgctggggggcttaaatttatgtcgtacatgtttttctttatttttaagaaatgccgccaaaactgagtttagttcattgactatcgatagcacagatatgtttaactttttagttcaattttcaaacacaattatctggtggcgccattgtttaggcatgtaaaattttacgtagcagtcatgtagaattagcacaaccttatttttaaaatatagcttagaataataagcattaaataatttaaagctcagaaaaaaatacatgttttgaaattctacataaattggctataataaaaatttttttaatgttataaaaaaatggaaaaagtacaattaacattgagagtataaatatttcttcatttgagtaaggcttctatgaaaaagttcgatttatatatatgtttatatctacagcaacaattcgcttccttttatttcaacagctgtatctaatttgattatcacatgaccgaaattcatgaaaaaggggttttgctcaactagcagttggcaaagccatatttttgaccaactgtcccagaaacgaggattattgttagatcgctgagcaaacgtttggcgcatgcgcaagctttcaaacctttttcgcgatttg

SEQ ID NO: 12650 - DNA, 1557 bp, DROSOPHILA
ttacaatgaaatttctttcagtggtagctcaaaatttaagcataataattatttcaaaaactatgtgaaaatataactgtgggaaaccgtcccctctcctacgccactggccaattccaagctgatgactttctgatgctcgttatccagcactggtatattattttgttttccattcagtaacacgattatcacaaactgtcgcaaattttcccgaattgaatacaaatctgacacaaaagcatgacactgtttgccctcatcgccctgctcagcctgctgaacacaatcctgccagatttcataaggaactacctcaaagtgtcgcggttgtggggcgtaaggaactccgcggaaattcggcagttgcagacagaactggacgatgcccggaagcaagtggaggtggtcagcaatgcggagcattccggagagtacgccaggaccatcaaaattatgcgcgccgagcgtaaagtatcagaggcggaggcgaaactgaaatctgcccggggaatggagaacttcatgcggataagcatcgatacggccatgttctacggatctaaggtgctgctctcagcaataaccgtgtttatcagcatccggaatcgtggaacgcccgtcatgatcatcgatgaagcgatcagcctggctccgttcacaggacttcttagttttcctactggcgtggccaatgccatttcggtgcccgcctgggcattctcctgcaacctgacatttcgactcatctacggctttgtgaaaaatcatgagtgcgtgtcattttccccatccaatttgtttggtgttttgttagccgaaatggacaaactaaatgaaaatgctcgacagcggaagcagatcaagctgggagagatcgacacgggccccattatagtggccctcctgctaggcttcattgcagtggccatatttgtgatcctgcgaagacgctctgctggtcgcaaggactttctgcttactgggctcagtgaatccggcaaaagtgccatcttcatgcagctgatccacggcaaattcccggccacttttacttccatcaaggagaacgtgggagattaccggacgggcagcgcgtctgccaggttagtggatatacccggacattatagggtgcgcgacaagtgcttggagctatataaacaccgtgccaagggcattgtctttgtggtggactcggttactgcccacaaggatatccgggatgtggcagactttctgtacaccatcctatcagacagtgccacacaaccctgctctgtgctagtcctttgcaacaagcaggatcaaaccaccgccaagagtgcccaggtcattaaaagcttattggagtcggaactgcacacagtgcgcgacaccagaagccgcaaacttcaatccgtgggcgacgaggatggcagcaaatccatcacattgggcaagccaggccgtgacttcgaattctcacacatcgcacagaatatccagtttgcggaagcctccgccaaggacactgaacttgatcccctcaccgattggctcgctcggttgctgtga

SEQ ID NO: 12651 - protein, 437 aa, DROSOPHILA
MTLFALIALLSLLNTILPDFIRNYLKVSRLWGVRNSAEIRQLQTELDDARKQVEVVSNAEHSGEYARTIKIMRAERKVSEAEAKLKSARGMENFMRISIDTAMFYGSKVLLSAITVFISIRNRGTPVMIIDEAISLAPFTGLLSFPTGVANAISVPAWAFSCNLTFRLIYGFVKNHECVSFSPSNLFGVLLAEMDKLNENARQRKQIKLGEIDTGPIIVALLLGFIAVAIFVILRRRSAGRKDFLLTGLSESGKSAIFMQLIHGKFPATFTSIKENVGDYRTGSASARLVDIPGHYRVRDKCLELYKHRAKGIVFVVDSVTAHKDIRDVADFLYTILSDSATQPCSVLVLCNKQDQTTAKSAQVIKSLLESELHTVRDTRSRKLQSVGDEDGSKSITLGKPGRDFEFSHIAQNIQFAEASAKDTELDPLTDWLARLL

SEQ ID NO: 12652 - DNA, 7611 bp, DROSOPHILA
tagaaatagttttgcagttgctgcaaatagttttgcagacattttttgattgccgcatactttaagccagcgagccagtcagtcaaccagaatggatgcctctagctccacaactgaaatactgaaagatgttaaaagctgagaaatggtttctgtctggatctggtattttttttgcccagatccttggggctcgtttactcctttgctttgatgcggcttcatgatgctgatagtaaaataaatctcttttcatacgaaaaagggtctcatctgtggcttcaatattaattttagtaatttgttgtgaatgccatgcatggttggctggtttttaacagttttacaagccaatctgcctagaggtcttttcaatatacctaaagttaagatatagtaaaataaatgtaccctataccccagtcactttaaagtatttcctcaccagtctgccgtgaatatggatcttaagtaaaagtgctggaaaattcggggaattatcttggctggttccccgaaaagcgtcatcttcggctgttcttattttaatagcccggcgattatagtggattacatgcacatacccttcattatcaacttattttcgtagcagctctgtgccggctgctccgacgtcatctttcccatgagttggcatccgttgcctgtgcatttgccgcattttcaaaaggttaattttccagttatcaaataaaagaccaaggcatgctctcgtactcgaatccatggaaaccgaagagtagcaggcggtggagaagcaggatgcagcagctggctgttggatacacatgcttggcaaatagttttgacagccaccggggaaagtgggcgacgaaaaggggggtgtgctatgtgtgtatgtgtgtagtcgtggccaaagccgttgggatcctcttacgtacgagtattttcgctagaatttttcttgtaataatttttgctttaacctttttggcatgcagagtgaaacgagcgctttgcatttcagcattttgcttggctgcttttggggccaacgtttttattatagcgtattttaattttcattcgcatcaatttgctgaaacactgcattaaactaggaaaattttcttaagcctacgttctcatgaatttaattcttcttctcggttagattgtagatttgcttggcaacatcggatagctgaacatcaatggccttggtatcgtcatatagcgacggagcctcgcctaggatcacaaatgtgcccaccaaggatgcgatcataaagagccagaggaataggcgatccatgaccatggccacaaagccccagtcctgatcttcctgtaagaggaaaatggtttcagtaaattatgcacatttagtgctgagcttaacaaattgattcaaatatccatacgaaatccgaaaatataaaaccggtaaaacttcagtaaattatatgcatttgatgctgagctaataaaagttattaaaatattcatacgaaatccgaatcgaaaataaatcaagagaagcacattgttagtagatataatagtatatacaaaatgaatttatatcaattatgcacactttatataaagttgaactattaaaaatgattgcaatgaaatttgctgaataatgtgttcaacaagagaacaaaaatcaggcttcttttcatatgaaaatttgctttctttttttttggctgccattcaatttgaagttgcccgcatgcaggacggttaattgcgctttaagcccacactttgagcgattggctttcattaagcacttcgcttaatctacttatgcccgacatcagttcggttatcaatcaaagagcgaaatcgcagcgccagcaaagcaaagcccgaaaaaaataaatggctcaaaagggccaaaagcaaagaacaaacggggctgtggggaaaactcatggcaaccagacaccgccgcacacaatcgcacaacaaagaacattcggggtttgattgaaacgttttgctgaacccaacccgcgctgatgaagagatgaagtgcctcgattggccaattgccagtcaattgaacaaaagcaattaaaagtggatttgccgggtcgagtctttaagtgcaaatatggcaaaagcttaaataagtcggcaaataaaaaaaaaaaaaccaactgccttccaggcgatcagacagtgggtggccagtccccagtccgtatgaccagttcggctgaacgaaagcctccggataggaggacaacatcatcggccaatgcgatttttgcggttcttcttctccggctacgcccgtggacaaacggaatttccaattaaaaattcaatcagctgccggactcaccgcattgaactcgtcctgccgctgcatgtggtgctgtatgaacatgacgttgtggatggccttttccagctcgaaaggatactttttgcgtgcggccacatcgctcaaagagtcgtccaatccggatagcaccgatggcagtccgttgtagccgctcagggtgctcagtccgccgcccaaagcccccaccaagccgctgaatctgtaagttcgagatgagaggtcaacacagtgtccttgtgccaggatatgcacagatgcgggtctgagaagttatacattcgtccatcacaaaatacaactgttactttttttcggaccgtattttgggaagtattaaattgtatgtacaagattttcgtaaataaatgcttttcatgtttttgatacccaagttggtttatttacccccaaaactcgttagcataactcacctgtttgtggccgtggtcacgtgcatgccattgcacccaccagcacccacacgaccttgcatccgccgcagggagtctggactggagccgcccgagttcatttgcatctcgtccatcagcgcctgtccgaacttggtcttgctgaacttgaggccgtagttgatcttgttggccgccaggtcacgcagcaggtccttgggcacacgcatcagcaggagtttcggcaatctcttgatgaagaaggacctaatccagggtcgcatcttgtgcgtactcggcttccggtagtgtatgtttagtatgataatcgtgatgacaacactcaggccaaccagcaacatggtgaacagtagatattttcccagtagcggcaatgccagtgaagtcgatggtataatctccgatatgagcaggaagaacatggtttgcgacagcaggatgctgatgcacagagcaatcttctcgccagaatcggcgggcaggtaaaagaccagcaccgaaagatacgagatgcccacacatggaataatcaggttaaccgtgtagaagagagtctttcgcctcagggtgatgttgaagaagatatctaaaccgtccagccattgaagcagttacaaatccacgaagacgcgcaggaagtgggatacaaatgtgttgggaaaaggggagaaagggatcattttcgggggatgagtttgggtagagctttcgcgtaattgctggcgatgggaagctttaaactccactaaactcacccggatacggttcggcacagcagggatagtacttctcgtgccgctcagccggaacgccgagaatgtcccactccacactgggatagtactcacgcaggtcgatgcctatctccaccttgttgtccttgtcgtttttctggctgatgtgcttcaaatcgatctgtgaatcgagaaaagccccgttgatggagccgttaaagttacgctcctttggctcctttgtccggctcactgccacttgccgtgacaacgccacctggcgcatcccactccctccaatctcctccaaccaggcgaccggcagccaaagtgcagtcgttaaaagagtagcgaaatttaaatgcgttgacaaacgcccggtgaaaaagagctctgttccgtagcctgtcctaaaacccatcgcagcactcaaaaaaaaatctagtgcctttaatgtgtagctctctaatagtttaactaatcttataacattctatacatcttataaattctatgtgcacacttcgtctttaagtagttactaattgcaaatgtgacatactccatctcaatattgatttcatatttttctcagtgcacctgtccctcttcgcagcactgcgaagggtcagcggaaacggaagctgcttgggttgggtggaagtcgcactttggcttaatttatggccgcgcatttttatgacagcgacacacacagtcgagtgcctctgtgtgagttagtgccgctctctttcagcgccagtgtgcgtgcatggctgtgtttgtgtgtgcagcggttagacaagtttcaattacacttttacaatttctcacattttaatctgcgagttgccaacgacgccttttcgatgttcttaccgcgtcttaggcgtgtaagtcgctacctcatctcctcatctcatctctcagataaatggtgtaccataaatcgttcgccacgcccatttatctgaggctcaactggcatggcactggcagcagatagaagacaatgacgccaccactcacctgatcaccgtcgtaggtccacgagccgaacttcatgaagcaggtctgctgatcgaagggaaagtagcgcacatcaatctcacagctggacttgaagatggccggcggagtccagaccactttgccggtatagtggaggatggccttcgtcatggtggtgaccacgtactcgccatcggcactagaggaaagggaagacatagctttgattcagggcttttaagaaatagagatttcagaaacgtaattttaacatgcaatacaaattgggctttaagtgtacatgtgtgtattcgaggtcctgtttcgactacttacttgttgtagagcacgatgtcgggcagccagatgtgctcggatggcacataaagctctgtgacgccgccatactccgagggatcccacttgaatttatgatcctgccattcgtgctccagccacacgttggtggttagaatttgatctttgagattctgcaaaaaattaaactcgcatatatgtacggatagctctacaagccgcaaaaaaaaaaaaaaatgtgtgtgagcaagtggagcggagtgtagtggagttggggcagtaaggcccagcgatgcatcaagtgggatttgcattttattcatttttcccctgcatttttttttgttctttatatcatttgcacttctcgtcctggccacccggtaccccggctaatgtgctttttgctgtcagcttacggcttctttcccttttcggcttgttttattaccttttaagccttctggtggcagggccaaccatcaccactaccaaccgcccaaagtagcggcccttgcagccggaattgcagtctcggccggctgacaaatgacttggccggggaactttaagcaagcgcagacaacgatcccctccatgtaatgaaatgttggagtgaaatgttataaaaatctagtgctccccgttcgcccaaagttttttttttgagaaatgccagcgatttatctggtgttctggtggtgcaaggcaaccagtgctgacaggaataaagttgatgttgcgaattgaaatatgccactttaatatagggtctacacggagagaaatctagctaatatcgcaattaagctaatatcttattctgtacttttaacttacagcactcatccctctttttttttgggggggtgtgtcattatggccccatggatttctctgtttgccagctcgcgattcgccccatttcttgctgtttattgttttgcattttttatttacgagctgctgaaagttgctggcaacttttacgcacttcttattgttttgccagcaaatgtagcgaaacgcgggcgcttgagcttaattaaaaacatccccccacccgccaaacttcgatgattataccaattaattttgcttaccaaatcgatgagttgggagagccgtaggcccaatttgaccaacaccgtgtccgtattattgctcacagggcggatgaggcgattgtagttgcttagcagatcgtcatagagtcgcttggcatcgggattcgcctgaacggtttcgcagaggagcaggagcaccaggagcaggcagagtggcttgcagtggcgccagatgtgagcgagcagggcgatggggcggggtcgtgtggtgcagcagccaggagccatggtgacgacgtcacgacggaaagaaaaaaaggaccttgacgctgtgcggcgtgggcggtgtgccggtgttttattgatgcacaaaacacgcgcacaggtttttgtttacctttctgcccgccttgggtgcttggctgccccttgatgctcaatctctgacgcagttcgtggggcagagcgagtaactggcttttagcacatggcctaaaagtgtttacaagtctccaagtctcgctgctgctaactgattcccgattcggcgcactgcttgagcagctgaagtcgctgcgtccaggcagctgattttgtttttgctccggccgccttattttatttaaaaagtctttttaattttcaccaactcaatttcgtgcttaaaaaattctaaaaaatattcaaacttgttaactgatttttcaatatttttgtgtgcagttttaagcggactttcacttgatttcaacaagcctttgggccccgctccgtgctgtcctgcatagatattcacaggattcgtactgacgcgcgttttgtttttgtagcctggccaggacctctggcagcctccgttttgtagctttgtcgccggcgggatatcataggaatgtggcatgtggcagatgctgcgcagcgcctgcgcttttagcattcaccctgttatcctgcgagagccgcatcctgttacacactgtaaaaccaagccctagacggatgctctctttgccacacactctccgcatgatgctcgccggactctctgaagatgtgctcttcgatgggttaatccaacaaagactcagactccattacaactccggcctggttcggtgctcttttggccgtacatattttttgggctctctcccgcgattccggcgagccacagcccaaaaaaattccccacaaatactcccagcacacagttacgcagaaaaaaaagtataaattcgagaaaaaagtatgaggcaaggcaaggaaaacttcaaccatgtaccacaccgctccacatttggcaaatactcatacgccccgttggacccacatttcgtttaaccagaaaccaaatttttcgtaattgtcaacattcgttaaaatctacgttaacatgcagttcgccacacacacacacacacatgtacatgcacatgcacacttatacattgagaaacacacacacacagctatcagcacttgtgcactttgcatgtttagcgctgcaatgctggctacactttttgccttttgcatgggtgttggttcagctcggttttgcatttcgtttcgtttggcattttgcaacgtctgttcacatatgtgtcatattgcgattttgagttgtttctgtggttttggtttggtttttgccacccatacttgtatttctatctgccgccagctgaattcccaccctc

SEQ ID NO: 12653 - DNA, 2210 bp, DROSOPHILA
tcagttaacaagtttgaatattttttagaattttttaagcacgaaattgagttggtgaaaattaaaaagactttttaaataaaataaggcggccggagcaaaaacaaaatcagctgcctggacgcagcgacttcagctgctcaagcagtgcgccgaatcgggaatcagttagcagcagcgagacttggagacttgtaaacacttttaggccatgtgctaaaagccagttactcgctctgccccacgaactgcgtcagagattgagcatcaaggggcagccaagcacccaaggcgggcagaaagcgtcaaggtcctttttttctttccgtcgtgacgtcgtcaccatggctcctggctgctgcaccacacgaccccgccccatcgccctgctcgctcacatctggcgccactgcaagccactctgcctgctcctggtgctcctgctcctctgcgaaaccgttcaggcgaatcccgatgccaagcgactctatgacgatctgctaagcaactacaatcgcctcatccgccctgtgagcaataatacggacacggtgttggtcaaattgggcctacggctctcccaactcatcgatttgaatctcaaagatcaaattctaaccaccaacgtgtggctggagcacgaatggcaggatcataaattcaagtgggatccctcggagtatggcggcgtcacagagctttatgtgccatccgagcacatctggctgcccgacatcgtgctctacaacaatgccgatggcgagtacgtggtcaccaccatgacgaaggccatcctccactataccggcaaagtggtctggactccgccggccatcttcaagtccagctgtgagattgatgtgcgctactttcccttcgatcagcagacctgcttcatgaagttcggctcgtggacctacgacggtgatcagatcgatttgaagcacatcagccagaaaaacgacaaggacaacaaggtggagataggcatcgacctgcgtgagtactatcccagtgtggagtgggacattctcggcgttccggctgagcggcacgagaagtactatccctgctgtgccgaaccgtatccggatatcttcttcaacatcaccctgaggcgaaagactctcttctacacggttaacctgattattccatgtgtgggcatctcgtatctttcggtgctggtcttttacctgcccgccgattctggcgagaagattgctctgtgcatcagcatcctgctgtcgcaaaccatgttcttcctgctcatatcggagattataccatcgacttcactggcattgccgctactgggaaaatatctactgttcaccatgttgctggttggcctgagtgttgtcatcacgattatcatactaaacatacactaccggaagccgagtacgcacaagatgcgaccctggattaggtccttcttcatcaagagattgccgaaactcctgctgatgcgtgtgcccaaggacctgctgcgtgacctggcggccaacaagatcaactacggcctcaagttcagcaagaccaagttcggacaggcgctgatggacgagatgcaaatgaactcgggcggctccagtccagactccctgcggcggatgcaaggtcgtgtgggtgctggtgggtgcaatggcatgcacgtgaccacggccacaaacagattcagcggcttggtgggggctttgggcggcggactgagcaccctgagcggctacaacggactgccatcggtgctatccggattggacgactctttgagcgatgtggccgcacgcaaaaagtatcctttcgagctggaaaaggccatccacaacgtcatgttcatacagcaccacatgcagcggcaggacgagttcaatgcggaagatcaggactggggctttgtggccatggtcatggatcgcctattcctctggctctttatgatcgcatccttggtgggcacatttgtgatcctaggcgaggctccgtcgctatatgacgataccaaggccattgatgttcagctatccgatgttgccaagcaaatctacaatctaaccgagaagaagaattaaattcatgagaacgtaggcttaagaaaattttcctagtttaatgcagtgtttcagcaaattgatgcgaatgaaaattaaaatacgctataataaaaacgttggccccaaaagcagccaagcaaaatgctgaaatgc

SEQ ID NO: 12654 - protein, 576 aa, DROSOPHILA
MAPGCCTTRPRPIALLAHIWRHCKPLCLLLVLLLLCETVQANPDAKRLYDDLLSNYNRLIRPVSNNTDTVLVKLGLRLSQLIDLNLKDQILTTNVWLEHEWQDHKFKWDPSEYGGVTELYVPSEHIWLPDIVLYNNADGEYVVTTMTKAILHYTGKVVWTPPAIFKSSCEIDVRYFPFDQQTCFMKFGSWTYDGDQIDLKHISQKNDKDNKVEIGIDLREYYPSVEWDILGVPAERHEKYYPCCAEPYPDIFFNITLRRKTLFYTVNLIIPCVGISYLSVLVFYLPADSGEKIALCISILLSQTMFFLLISEIIPSTSLALPLLGKYLLFTMLLVGLSVVITIIILNIHYRKPSTHKMRPWIRSFFIKRLPKLLLMRVPKDLLRDLAANKINYGLKFSKTKFGQALMDEMQMNSGGSSPDSLRRMQGRVGAGGCNGMHVTTATNRFSGLVGALGGGLSTLSGYNGLPSVLSGLDDSLSDVAARKKYPFELEKAIHNVMFIQHHMQRQDEFNAEDQDWGFVAMVMDRLFLWLFMIASLVGTFVILGEAPSLYDDTKAIDVQLSDVAKQIYNLTEKKN

SEQ ID NO: 12655 - DNA, 4808 bp, DROSOPHILA
cagtctcaaggggtaagtttcaaataaggagaatagtacactaactaatataatctttttttctatgcagcttcaaggaggtcaacatgctgacggtcaccctgagtgctgatcatcgtgttgtggatggtgctgttgctgccaggtggctgcagcacttccgcgactacatggaggatccttccaatatggtattgtaagcggacagaaacgacccatcacatttagagactccaacgaaaacaaaaaaaggataacaaatttagcatcctctctttaagcgaggagtttcaatcgacatgcaatatgtggatatgtggtttctaatcggtgtcacatatgtaaagttttaaattggatttaactcatcggtcgcctatatatatatatatatagaaattaaattgtgtaattattgatgtagttattgatggtcaccgtcgttgccatgattgtagaagagtacacaaaatacttgaatgatattcgaattaacccactcaccgagctgtaaatttccgtttgatatgcaaaacgttttttatgctttgttcgcatatgttgatcatgatcgagtatgaaaatggaagtagttgaaagtccaaagacgcgttaaataaacccaaaacactcacatgaactagccaattcttaaataaaattgacttttattttaattatagtgtgtttcagcctaaattcaaaccacgatgcctccaaatttaaaacattatctgatgggtgttgcatatatcaacttttaagctttctagacagtagctagagtaacaaaactctattcagctcaaatttaatgctctcaacacccagtcgaaaaataatatacattgcttttccgtggtttatagtattatgtaactagtttattgccaaaatgttacgaactaagcaaacacatattgaaagtatttacaagcataaagttaagctaatgtcaatgtaggatgcgaatgtcagtgtagtattgaaatggggccaatcaccactgggcagggccaagctggctccactcctccacatactgggcctgctgctccagagcggggaaccactcgacgccaccgtagtcgatcgcgggcagagtacccttgtagttggcgggcaggacggaggggtcgaggaacttctgcaacgacttcatgtcactgccgtggaagtgcatctgttggaagaaaattattcaatgatatattgttattaatattcatttaaaaggagggggaaatcagttatgtctaattaatatggtttatataacttggttataattgtaagaatcaggtattttacgttactgataagattcattcttccaatgaagagaaattgtagcctacttttgagggcagaaggacaaggtaggagtaagtacacgttttacttaccctattgttcagcttttgtttgacgaagggcttgaagagcgaccaaaccatgttgaagatgaacggctgcttcacgaagtgcacctccttcatgcgaaggggcatcgcctcctggatgaatgtgagcaatcgcttggagaagctcggcgacagggccttcacctgtttcatcgacagtccctcgaagtccatgatgcagaccacgccccgcacctgggtctcctcctccagctgggcggcgagatgtaccatgtagagcatgcggaacatctcatcgctggtaatatcgctgggatcccagagtttgccacagttcacgatgagcacacgacgacccttctggtcgcagttcttgagcacattgatcacactgcccttcacgaatttctccttaacctgctcgaccaggagtccgcggaccagagaggcgtactccttgcggaagctggctgtggttttcatctgaaagtcattttcaaattagtcaagagcttagcaaacttaaatttatgtattttatgtgaggataaaaaattttagtctaggcaaccaacttaatttagcttattatgctactcgtgtagctaattgaaaactttatatttttaatatttttatagggtacacattataaacagaggaattgcctctataaatctttgaaccgatgacgctaacttcttacggaactagtcattgtaacttcatctgttggcaggtgtgacatggctagattagagtccataattgataaggtattgaccattggccagaactataaaatgcccatataagttatgcggcttcctatgatgataaatttaaaaatggcgaacattcgatttttatgacccgattcagtcattctgctaaaaagtcattgaacactctacatgcataaagtgaatccgaatcggatcgaaatcgaccacgcttatcagggttttctttgccggtcagcgagttcagaagcaataagttatcagcagacgggaactgtaaatgatcctgttgttgggtttcatttcagatcgtatgttgcttcttttacaatatcccatatattactttagctagactataaatgaggtggccattttctgggcaagtttttatgcaaccgcttaatcatatattattatgtaagagatatgtagataaggccatggttataagctgatgcaactttctaaacttggggcaaaaatgcttttcttgtagctcttatgcatatacaatattattcccccactatctagtgcacttgtttgaacttcggttatagaccccatttcaatagctctggttgaccgatgtttgctggcgataaggcgtgttcgagaagttctatacatttgataatccctcaaatgttgaaacaaatagacggagacacttgtgttgccggcgttgataagcaaaaagccattgaattgtgtttctaaggcggtcaattcataatatacatatatatactatgtatgcttgcgatttgattgaagcttcagatgattttcagagtgatgtgtaatgttaagcgattattagtattatgaattgaatattgctggaacaatttagatattccttaaactatgttcctttttttatcatcattggattctggactatgtttaaataactttaaatttgtaatttatatatattaagaacttaacgtttggttatattgcattatgtattagggaagttaaatgattcaaaacatgacattttatgatatttattaatggtgaagttaaaatgaaaagtgaagggcacacgaaactgagacacttgcattgctgacttaacattgcattatcagtggctcgcgatatgctttcatggtacgcaccttttccagagctccttcgggataaaagtggcaggcgcgcaggaaaactgtgaggaaagcgtcgtcatccttgtagttcagctcgggcgtggccttgagcagttcccgtagcttgatgatggcctccgccttgacttcttcggtttcgcggagttccacacgggcgatttccacggtctccggcttcagatagcccaggcgcaagtgaaaggcctcctcggcgatatcggtggcagccattatgtcgcttggtttttgtttttatgtgtcggggcctgcgtgttggattcgagaaatgcgttctgtgttagtttttcctaatccactgattgccagcgcaaattgcaacttaatatgaggtaatttggcaccagcactttcggatcgatttgtttaaacaatcttgcccgatcatttgggttagaaattggttggtttttttttttcttttctttgtacttgtatttacctaaggcgaagtcaaacgattttcacttattgagggtttttcagcgttctttagttttgcttcctcgcgactcgtgcgattcgagtcaactgaaattcggttcgcctttggaaacccttgtgagttaacttctatattatatatcagccgaacgacagcttcgacgtcgacgtcgatgataaagcacgccgtggcagaggcgatcgcagtcgtcttggctcgacttccattttcgttccttatcttttagacaaatggcgctgagcgaaatacatataataacaacaataatcagaaaaaaaggtcaccaatccggctgtcaatcacctaacgcctttaaccctccggcatctgcattgaaccctctaggcctgaaatccgactttcgactccgtttaaaattttgggtaatttcgtcattgatcgtgatgtttacacgcgcccggcgtcatgaaccttagtttaaattacctttacctcgaacttacccttgctacactccactttgcaaactcagcgtctggggcacgtaataaaaaagacaaatttgtacaaaaaaagcataaatatcaattagcaacgaaaaaaaaaaaatggttgaaccagcctattgacagcggaaacagcgcactgttttatagtgcctctcataatacctgtaaggcattaagataatgcgaataatattgctttgagataccctatagctagtacagctagttcaactgctggaatataagataactatataatatataaccttttatgttgtatgccggcttgaaattatatcgggtggtttttagttatttagtactaatcaatactcaaatattgtaagatatattattaagacgttgaatgtctgactctacatcaaccatattaaccctaaatggtactattttttacagggtatgcaaactactttcgactaaagtccaacgcggaattcttgagtgataacagctccccaaaaatattctgcttccagggctattatcgaatgtttcatgttctaatggaaaaagaagtcccaaccattctaatcacagctcataatccttatcactgg

SEQ ID NO: 12656 - DNA, 995 bp, DROSOPHILA
acgagtcgcgaggaagcaaaactaaagaacgctgaaaaaccctcaataagtgaaaatcgtttgacttcgccttaggccccgacacataaaaacaaaaaccaagcgacataatggctgccaccgatatcgccgaggaggcctttcacttgcgcctgggctatctgaagccggagaccgtggaaatcgcccgtgtggaactccgcgaaaccgaagaagtcaaggcggaggccatcatcaagctacgggaactgctcaaggccacgcccgagctgaactacaaggatgacgacgctttcctcacagttttcctgcgcgcctgccacttttatcccgaaggagctctggaaaagatgaaaaccacagccagcttccgcaaggagtacgcctctctggtccgcggactcctggtcgagcaggttaaggagaaattcgtgaagggcagtgtgatcaatgtgctcaagaactgcgaccagaagggtcgtcgtgtgctcatcgtgaactgtggcaaactctgggatcccagcgatattaccagcgatgagatgttccgcatgctctacatggtacatctcgccgcccagctggaggaggagacccaggtgcggggcgtggtctgcatcatggacttcgagggactgtcgatgaaacaggtgaaggccctgtcgccgagcttctccaagcgattgctcacattcatccaggaggcgatgccccttcgcatgaaggaggtgcacttcgtgaagcagccgttcatcttcaacatggtttggtcgctcttcaagcccttcgtcaaacaaaagctgaacaataggatgcacttccacggcagtgacatgaagtcgttgcagaagttcctcgacccctccgtcctgcccgccaactacaagggtactctgcccgcgatcgactacggtggcgtcgagtggttccccgctctggagcagcaggcccagtatgtggaggagtggagccagcttggccctgcccagtggtga

SEQ ID NO: 12657 - protein, 294 aa, DROSOPHILA
MAATDIAEEAFHLRLGYLKPETVEIARVELRETEEVKAEAIIKLRELLKATPELNYKDDDAFLTVFLRACHFYPEGALEKMKTTASFRKEYASLVRGLLVEQVKEKFVKGSVINVLKNCDQKGRRVLIVNCGKLWDPSDITSDEMFRMLYMVHLAAQLEEETQVRGVVCIMDFEGLSMKQVKALSPSFSKRLLTFIQEAMPLRMKEVHFVKQPFIFNMVWSLFKPFVKQKLNNRMHFHGSDMKSLQKFLDPSVLPANYKGTLPAIDYGGVEWFPALEQQAQYVEEWSQLGPAQW

SEQ ID NO: 12658 - DNA, 5496 bp, DROSOPHILA
cccgtactcgggcaatggcaccatactgggtggccttaacgatatcgaagccactgtaatctggctccacgggcgcggtggggggttgttgggcgatcagcgccgactgtcgctcgttgtctggctgctgaccggttcccgggacacaggagcccgtagtggccgcctggcaggcactctggtacatcgctggcttctctcggtcgctgttcccttggggtcgtccaaacgtgattcacactgcgctgaggtgctcgtcgtaacatcaaccgtccatccccctccttccagcgggcgagcgagcgagaggggtgagcggatagagagagagggagagagcaggagagacacccccaccaggaacagtttcgaggaattcacaggtttgtcattttcaccggagtttcacacggcagctgctttctccacagtgctctagcactcgtttctcggcaggatctgctggtgacgacacggctattgcggctatcagtttaatgcgttttacctgccaatttcggaggactagaagcaattttggtggtacaatgcaagctgatagcactgaatgtgtggtgcgacttccaacactatcgcggggaatttcgcaacttgtttggtatttttaagaagaggtgtggtatttttatagcaaatattaaaaaaataaattattttcatttttgcttattaatgtagttactcgctggttttcaatccccattcaaaactttaattttgtgttttcatttttatcttatattcgtattaatataaatgaaaatgttgacgtaaaattttggggaggaaattaattaataatgtttggaattgaaaaattatttccctttatcttcaggtcatagaaataagtgatcttaataaccttcactgatattagtaagttaacattttaaagtctccttttttggttcatagtttttgaaatatttggagcactaaaaaagtttcacaaagtagttacatctagctgcggtcactctaacgtgcctaccaacaaaagcgcgccttattttttggcatcgctcttgtcttatggttttgcaagtaacatttcaccaaggtacccagaatggatggcaagcgcaagtttaatggaacctccaatggacatgccaagaagcccaggtgagtaaccctttgaatggcctaatacgagtcaatataaaattgttcacgcaggaatcctgatgacgatgaggaaatgggctttgaggcggagctggccgccttcgagaactccgaggacatggaccagactctgctaatgggcgatggacccgagaaccaaacgaccagtgagcgttggtcccgtccgccgcccccagaactagatccctccaagcacaacttggagtttcagcagctggacgtggaaaactatttgggacagccgttgccgggaatgccaggtgcccaaataggacccgtgccggtggtccgaatgtttggtgtcaccatggagggtaactctgtgtgctgccatgtgcatggtttctgtccatacttctacatagaggcgcccagtcaattcgaggagcaccattgcgagaaactacaaaaagccttggatcaaaaggttattgccgatattcgcaacaacaaagataatgtccaggaggctgtgcttatggtggaactggtggagaagctgaacatccatggatacaatggagacaagaagcagaggtacatcaaaatatcggttacgctgcccagatttgtggctgcggcttcacgtctcctcaaaaaggaagtgatcatgtcggagattgacttccaggactgtcgcgcctttgagaataacatagactttgacattcgcttcatggtggacactgatgtggtaggttgcaattggatagagcttcccatgggtcactggcgaataaggaacagtcacagcaagccgttgcctgaatcccgctgccagattgaagtagacgtggccttcgacagatttatatcccacgagcccgaaggtgaatggtccaaggtggctcccttccggatcctctcctttgatattgaatgcgctggtcgcaaaggaatatttccggaagccaaaatagatccagtcatccagatagccaatatggtgataaggcagggagaacgagaacctttcattaggaatgtctttaccctaaatgaatgcgctccaatcataggcagccaggtgttgtgccacgacaaggagacccagatgctggacaagtggtctgcctttgtccgggaagttgacccggatattttgaccggatataatatcaacaactttgacttcccctatttgcttaaccgagcagctcacttgaaggtcaggaactttgagtatttgggcaggattaagaacattcgttcggtgatcaaggaacagatgttgcagtcgaagcagatgggtcgcagggaaaaccagtacgttaattttgagggtagagttcccttcgatctcctctttgtcctgctgcgcgactacaaactacgctcgtacactctcaacgctgtgagctatcactttctgcaggagcaaaaggaggatgtgcatcatagcattatcacagatcttcagaatggagacgagcagacacgtcgacgtttggccatgtactgcctaaaggatgcctacttaccgcttagattgctggaaaagttaatggccattgttaactacatggagatggccagggtgacgggtgtgccactggagtccttgctcacccgcggacaacagataaaggttttaagtcaattgctgcgcaaggccaaaaccaagggattcatcatgccctcgtacacctctcagggatcggatgaacagtatgaaggagcgactgtgattgaaccaaaacgtggctactatgcggaccccatctccacgctggatttcgcctccctgtatccaagtataatgatggcgcataatttgtgctacaccaccttggttttgggtggaactcgtgagaagctgcggcagcaggagaacctgcaggacgatcaagtggaacgtacgcctgcaaacaactactttgtgaagtctgaggtgcgtcgtggtctgctccctgagattctggaatctcttttggcggccagaaagcgtgccaaaaatgacctaaaagtggaaacagatccgtttaaaagaaaggtcctggatggcagacagctggcgctgaagatttcggctaattccgtgtacggatttactggcgcacaggttggaaagttgccatgcttagagatctcgggcagcgtcaccgcctacggtcgtaccatgatcgagatgacgaaaaacgaagtggaatcccattacacacaggccaatggctacgagaacaatgcagtggtcatctacggcgacactgattctgtgatggttaatttcggagtaaaaactctggagcgcagcatggagctgggacgcgaggctgccgaactggtcagttccaagttcgtgcatcctattaaattggaattcgagaaagtttactatccttacctgctgattaacaagaaacgctatgcgggattatactttacgcgcccagatacctacgataaaatggattgcaagggcatagaaaccgtgaggagagataactctccgctggtggccaacctgatgaactcctgcctgcagaaactactcatcgaaagggatcccgatggtgcagttgcctatgtgaaacaggtgatagccgatctcctctgcaatcgcatcgacatctcgcacttggtcataaccaaggagttggccaaaacggattacgcagccaaacaggcacacgttgagctggccgccaagatgaagaaaagagatcccggtacggcgcccaaactgggggatcgagttccctatgtgatctgtgcggcagccaaaaacacacccgcttaccagaaggccgaggatccgctgtatgtgctggaaaacagcgtgcccatcgatgccacttactacctggaacagcagctgtctaagccgctgctaaggatctttgaacctattttgggcgacaatgccgagtcaattttgttaaaaggagaacacacgcgcacacgaactgtggtaacatccaaagtgggtggacttgctggatttatgaccaagaaaacgtcgtgtttgggctgtaaatccctgatgcccaagggctacgaacaggcctgtctgtgtccacactgcgagccacgaatgagtgagctgtatcagaaggaggtgggtgcgaagagggaactggaggagaccttctctcgcctatggaccgagtgccagcgatgccaggaatccttgcacgaggaggtcatctgctccaacagagattgtcccatcttctacatgcgacagaaggttcgcatggatctggacaatcaggagaagcgggtgttgcgattcggcctggccgagtggtaaccattgcatgagtttaatgaattgtttaatcctataatttaataattatattactagaagttattacaaagtttctttcggttcgtggattttttgcgcaatctgcaatttgaaaaaagctgttgacgttccctagctggcgatgctttggacacacattttttacacagggatctgggggtctgaggactggctaagtatctacttgcgactctgcagggtgttggacagccagtccatggcctggtcgagtccctcgcccttggtggccgacgttttgaatatttgaaatgtgcggttctttaggttctccagtcctaacgcatgatggacctcggcgacggtcatgcatccgtccatgtcctgcttgttcgccaggacgaccagtatcgcgccggccagctcctcctcacgcagcatgtacagcagctcgtccttggagatgccaatgcggtcccggtccgccgagtccaccacatagatgattgcgtccgtgttgctgtagtagcaacgccaataaggtctataatggaaatagcacgaattgagattaggattaccattcttaaaggccaaatagatatatgtacgtagcctgcctaaagaaagaactattagctattttaagttaagttgtggatgcagatgtttcctatcttatcagctacaattataatggctttttggaaacccaaaaggcttactaaactacaaccgaaaatatgtcttctagatattaaataagacttgggtaatgccatcacaatactgctctcgtgtaaccaactcacctaatacttgtctgtccgcccaaatcccagacctggaacttgaggttcttgtaggtgacctgctccacgttgaagccgatggtgggtatcgtggtgaccacctcgcccacctgcagtctgtagaggatcgtggtcttgccggcgccgtccaggcccaggatcaagatgcgcatctcccgggagccgagcagtccgcgaaagtagctgagcaccccacctggaagaagaacgtatgatttttatgaccagacttcgtcaccgggtgtcgccggaacgggg

SEQ ID NO: 12659 - DNA, 3442 bp, DROSOPHILA
ctctaacgtgcctaccaacaaaagcgcgccttattttttggcatcgctcttgtcttatggttttgcaagtaacatttcaccaaggtacccagaatggatggcaagcgcaagtttaatggaacctccaatggacatgccaagaagcccaggaatcctgatgacgatgaggaaatgggctttgaggcggagctggccgccttcgagaactccgaggacatggaccagactctgctaatgggcgatggacccgagaaccaaacgaccagtgagcgttggtcccgtccgccgcccccagaactagatccctccaagcacaacttggagtttcagcagctggacgtggaaaactatttgggacagccgttgccgggaatgccaggtgcccaaataggacccgtgccggtggtccgaatgtttggtgtcaccatggagggtaactctgtgtgctgccatgtgcatggtttctgtccatacttctacatagaggcgcccagtcaattcgaggagcaccattgcgagaaactacaaaaagccttggatcaaaaggttattgccgatattcgcaacaacaaagataatgtccaggaggctgtgcttatggtggaactggtggagaagctgaacatccatggatacaatggagacaagaagcagaggtacatcaaaatatcggttacgctgcccagatttgtggctgcggcttcacgtctcctcaaaaaggaagtgatcatgtcggagattgacttccaggactgtcgcgcctttgagaataacatagactttgacattcgcttcatggtggacactgatgtggtaggttgcaattggatagagcttcccatgggtcactggcgaataaggaacagtcacagcaagccgttgcctgaatcccgctgccagattgaagtagacgtggccttcgacagatttatatcccacgagcccgaaggtgaatggtccaaggtggctcccttccggatcctctcctttgatattgaatgcgctggtcgcaaaggaatatttccggaagccaaaatagatccagtcatccagatagccaatatggtgataaggcagggagaacgagaacctttcattaggaatgtctttaccctaaatgaatgcgctccaatcataggcagccaggtgttgtgccacgacaaggagacccagatgctggacaagtggtctgcctttgtccgggaagttgacccggatattttgaccggatataatatcaacaactttgacttcccctatttgcttaaccgagcagctcacttgaaggtcaggaactttgagtatttgggcaggattaagaacattcgttcggtgatcaaggaacagatgttgcagtcgaagcagatgggtcgcagggaaaaccagtacgttaattttgagggtagagttcccttcgatctcctctttgtcctgctgcgcgactacaaactacgctcgtacactctcaacgctgtgagctatcactttctgcaggagcaaaaggaggatgtgcatcatagcattatcacagatcttcagaatggagacgagcagacacgtcgacgtttggccatgtactgcctaaaggatgcctacttaccgcttagattgctggaaaagttaatggccattgttaactacatggagatggccagggtgacgggtgtgccactggagtccttgctcacccgcggacaacagataaaggttttaagtcaattgctgcgcaaggccaaaaccaagggattcatcatgccctcgtacacctctcagggatcggatgaacagtatgaaggagcgactgtgattgaaccaaaacgtggctactatgcggaccccatctccacgctggatttcgcctccctgtatccaagtataatgatggcgcataatttgtgctacaccaccttggttttgggtggaactcgtgagaagctgcggcagcaggagaacctgcaggacgatcaagtggaacgtacgcctgcaaacaactactttgtgaagtctgaggtgcgtcgtggtctgctccctgagattctggaatctcttttggcggccagaaagcgtgccaaaaatgacctaaaagtggaaacagatccgtttaaaagaaaggtcctggatggcagacagctggcgctgaagatttcggctaattccgtgtacggatttactggcgcacaggttggaaagttgccatgcttagagatctcgggcagcgtcaccgcctacggtcgtaccatgatcgagatgacgaaaaacgaagtggaatcccattacacacaggccaatggctacgagaacaatgcagtggtcatctacggcgacactgattctgtgatggttaatttcggagtaaaaactctggagcgcagcatggagctgggacgcgaggctgccgaactggtcagttccaagttcgtgcatcctattaaattggaattcgagaaagtttactatccttacctgctgattaacaagaaacgctatgcgggattatactttacgcgcccagatacctacgataaaatggattgcaagggcatagaaaccgtgaggagagataactctccgctggtggccaacctgatgaactcctgcctgcagaaactactcatcgaaagggatcccgatggtgcagttgcctatgtgaaacaggtgatagccgatctcctctgcaatcgcatcgacatctcgcacttggtcataaccaaggagttggccaaaacggattacgcagccaaacaggcacacgttgagctggccgccaagatgaagaaaagagatcccggtacggcgcccaaactgggggatcgagttccctatgtgatctgtgcggcagccaaaaacacacccgcttaccagaaggccgaggatccgctgtatgtgctggaaaacagcgtgcccatcgatgccacttactacctggaacagcagctgtctaagccgctgctaaggatctttgaacctattttgggcgacaatgccgagtcaattttgttaaaaggagaacacacgcgcacacgaactgtggtaacatccaaagtgggtggacttgctggatttatgaccaagaaaacgtcgtgtttgggctgtaaatccctgatgcccaagggctacgaacaggcctgtctgtgtccacactgcgagccacgaatgagtgagctgtatcagaaggaggtgggtgcgaagagggaactggaggagaccttctctcgcctatggaccgagtgccagcgatgccaggaatccttgcacgaggaggtcatctgctccaacagagattgtcccatcttctacatgcgacagaaggttcgcatggatctggacaatcaggagaagcgggtgttgcgattcggcctggccgagtggtaaccattgcatgagtttaatgaattgtttaatcctataatttaataattatattactagaagttattacaaa

SEQ ID NO: 12660 - protein, 1092 aa, DROSOPHILA
MDGKRKFNGTSNGHAKKPRNPDDDEEMGFEAELAAFENSEDMDQTLLMGDGPENQTTSERWSRPPPPELDPSKHNLEFQQLDVENYLGQPLPGMPGAQIGPVPVVRMFGVTMEGNSVCCHVHGFCPYFYIEAPSQFEEHHCEKLQKALDQKVIADIRNNKDNVQEAVLMVELVEKLNIHGYNGDKKQRYIKISVTLPRFVAAASRLLKKEVIMSEIDFQDCRAFENNIDFDIRFMVDTDVVGCNWIELPMGHWRIRNSHSKPLPESRCQIEVDVAFDRFISHEPEGEWSKVAPFRILSFDIECAGRKGIFPEAKIDPVIQIANMVIRQGEREPFIRNVFTLNECAPIIGSQVLCHDKETQMLDKWSAFVREVDPDILTGYNINNFDFPYLLNRAAHLKVRNFEYLGRIKNIRSVIKEQMLQSKQMGRRENQYVNFEGRVPFDLLFVLLRDYKLRSYTLNAVSYHFLQEQKEDVHHSIITDLQNGDEQTRRRLAMYCLKDAYLPLRLLEKLMAIVNYMEMARVTGVPLESLLTRGQQIKVLSQLLRKAKTKGFIMPSYTSQGSDEQYEGATVIEPKRGYYADPISTLDFASLYPSIMMAHNLCYTTLVLGGTREKLRQQENLQDDQVERTPANNYFVKSEVRRGLLPEILESLLAARKRAKNDLKVETDPFKRKVLDGRQLALKISANSVYGFTGAQVGKLPCLEISGSVTAYGRTMIEMTKNEVESHYTQANGYENNAVVIYGDTDSVMVNFGVKTLERSMELGREAAELVSSKFVHPIKLEFEKVYYPYLLINKKRYAGLYFTRPDTYDKMDCKGIETVRRDNSPLVANLMNSCLQKLLIERDPDGAVAYVKQVIADLLCNRIDISHLVITKELAKTDYAAKQAHVELAAKMKKRDPGTAPKLGDRVPYVICAAAKNTPAYQKAEDPLYVLENSVPIDATYYLEQQLSKPLLRIFEPILGDNAESILLKGEHTRTRTVVTSKVGGLAGFMTKKTSCLGCKSLMPKGYEQACLCPHCEPRMSELYQKEVGAKRELEETFSRLWTECQRCQESLHEEVICSNRDCPIFYMRQKVRMDLDNQEKRVLRFGLAEW

SEQ ID NO: 12661 - DNA, 4116 bp, DROSOPHILA
cagcagttggtgcctcaatggcaggcgggtgcaaaactgatgggcgatggcgaaggagcgggcgtggccggaatgatatcctttgtgcagctgccctacaactcggacattagggtgacgatcaatgtgactggattgccacccggtaaacatgccctgcatattcacacctttggcgatctcagcgatggttgcaagtccaccggtggacagtttcccaataactttgtaagatccagtggaaatgattttaaattttatgtgatttaattaagcctttggagttgtacagctcggtaatgtggacaccaaggatgatggcagcatctcggcggtctttcagagcatttacctgcaattgtttggcatcaatgggatcgttgggcgttccatagtgatacacagcaaagcaatcgatctgaatactgccctaaatgcagaggtattttcctcctccctgcaagccatgccaaatcccctggcctatcagaacgaggagaattcactgggtcctgccatcgcctgtggggttataagtattatgagcacagccgccagttcatcaggtatggcaacagctgcaccagcaccacctgcaatggaaaatccagagatttaacttgtaattatatcattcctttaataaataatttgtagttactcaattgaggctttgatcagagtcagtgatcagtgtccaatcatcttgttttactatgttatgttcacttaaatctgtatgcttcattgcgagctcaaacatatatatagtgctttcaaatcatatttttcggcatagttgttatgaaaagcatcagtggcctatttttcatcaattcgaaatatatttatggtattataatatttatttaaattacagccagagtcttataagtggccaaactgttgggttatttcaacttgatcgctcaatattattttcgagcttatcgaattcagctcagctttaatggccattacgtgcggcgcatgcgcaaaggtctgggtcgcccaatgggccaaaactttcttcgtcggctgcccgcgaatcgagtggccagttgcccgtggcggttcgcgatgtccaaacgcgaaagtaaaagttttgccagcctggtgctgatagtactactgattttcgcttcaaacccgtctcaatgtgagtcctccaaggacgatttcccgcaggccaagttcgaatggccctcgtttgcctggatgcgaaataaaaccacaaagggtacacccgcgttggatctgaagaacgactacagccagatggagttggccaactttggggactttgatcgtcatccctgcagaagagtttgccagcagggccaatcgcagaactgctactaccaactggtggtgcacaattaccagcgactcggaccggagtgccagagatgccagttcgatgagagggcctgtgcttcggagcattgtatttatggcgatggagtggcaaatccagtgatggctgttaatcgcatggttcctggaccttccatagagctctgcgaaaacgatactgttgtcgtggatgtgttgaattatctaagtgagccaacaacgatgcactggcatggagtgcatatgcatagaactcccgaaatggatggagcacccttcattacccagtatcctttgcagcccggtgaggttcagcgccacgaattcaaagtggatcgaagtggttcgttgtggtaccacagccatgtgggttggcagcggggattcggagtggctggtgcctttgtagtgcgccaaaccagtcaggagaatcagcattcacagctttatgattatgatcttgtggagcacacccttatgatccaggatatattctacgaatacaacctgcaggatgtacggaatattctggtgaacggaaagggtcgcaatcatctcagccaattgcccgacaatgataaccgtcatcggtatgaacgacttcgagttactccaggctatcgctataggatgcgagttatcctgaacggaatagccaattgtcctgtggagttctccatcgaacagcacaggctcttgatgatcagcaccgatggtaatgacattgaacccgtgctggcagatggtttcttcttgacctccgcggagcgatttgatttcgttttggaagctaatcagtacaagaaaaactattggatcaggatcaaaggctatgagcagtgtgagaatcgaaatatttatcaaggagccgtgctcagttaccgcggatctgctcgctctgagttgccacagggtgatatcctggataagccaagtagcagggctgcagatgaggatctaatcctggtcaacgatttccgatttaagcctgcaaattccacggccatatcgtcacttcgccaatccttagataaggataacaatgttggtaccgtggcgttgcgatccgtggatcctgtgccctggactcgttacaccaagttcttgacccattactccagtttcggttcgagaacagcgccaaacggagaggtactctttcaaatcagtgatatttcgtacaattcgccgggaatatcactgttgcagggcaggcatctctaccaggacgatagatacttctgcaacaagagctccctggccgcagaaggacgaaattgtgagcgtgagctttgcgagtgtgttaatgtaatgaggcttccggcctatcgtcctctggagatggttgtagccaattatttggacagcacacatcccttccacatacacggatttacattccgtttggtgggccaaggagtgctgggtaatctcaacgatttgcgcaatgtgagtagagattgtagatttacgaagggtcttctagaaatacgttatccttgttctgttcttatagattcaggagctggatcgcagaggacgtcttcctcgtttatcggaagacagcgctgccgttgccaaggatactgtgcaaattcctggacagggatacataatagttcgattcatctcaaacaatcctggattttggctatatcattgccatgttgaagcacacgccgtccaaggaatggtggcggtgctgaagatcggtgaggatcatcagatgaaaaacattccggcacgtgtgcgctgttgagtatttatttttaatataatcattccgcccacttaaaatgcccactttatgtatctgggtgacctgattttgccaaatagagtttacagattatttatatcatttttatttattaactaattattcaacaaataaattggtgattaaagttactaattgtacttcccttttttatctgtaacctcctcaagttccagttaatcaaataaaaggtttcctttacgcaaaagcttgttaattcaagaactaatcgctttgccttaacttatcggccagaggcacttcaaaatgtattgataatcaaaatggagaatttacccccatcaaatgggggcgttgttttggttattaagccccatttatagattttaagagcggtagttgtatattttacggcctctacttgttactggggaaaattgggttttgattacaaaagtcggctgacatctatcgaattatttgaatttgaatgaagtgaagtataaatctgattgagcttttcaacattgaagtgagtctacttggagatgtctaagttgcatccgttgaagataagattggatttagttagatttacataatattaactcttggtaacttataactaaattaactgtcggaggttgtacgataattaatcttgagagcaaaaagtgtcgagcatacacgcgaaaactcaagaataccacttggcactcgaaaaaaccgtttttatcactagtattagtgatggagaaattgaaactttcctgtacacaagttaagtaggttctaagctcgcgcggaaatcccccatgtgcctcatcaacagggatatatggattcttattttactatccgataatgtttcttatgttccgaccccacttaagtttattcctttttaattggcttatgtagttgatcggctcgtatcaaattaagtacttaactaaagtgcttgactaaactgtttataagggaatggttatcagaaaattttcaccagttgagtcgca

SEQ ID NO: 12662 - DNA, 2049 bp, DROSOPHILA
gtctgggtcgcccaatgggccaaaactttcttcgtcggctgcccgcgaatcgagtggccagttgcccgtggcggttcgcgatgtccaaacgcgaaagtaaaagttttgccagcctggtgctgatagtactactgattttcgcttcaaacccgtctcaatgtgagtcctccaaggacgatttcccgcaggccaagttcgaatggccctcgtttgcctggatgcgaaataaaaccacaaagggtacacccgcgttggatctgaagaacgactacagccagatggagttggccaactttggggactttgatcgtcatccctgcagaagagtttgccagcagggccaatcgcagaactgctactaccaactggtggtgcacaattaccagcgactcggaccggagtgccagagatgccagttcgatgagagggcctgtgcttcggagcattgtatttatggcgatggagtggcaaatccagtgatggctgttaatcgcatggttcctggaccttccatagagctctgcgaaaacgatactgttgtcgtggatgtgttgaattatctaagtgagccaacaacgatgcactggcatggagtgcatatgcatagaactcccgaaatggatggagcacccttcattacccagtatcctttgcagcccggtgaggttcagcgccacgaattcaaagtggatcgaagtggttcgttgtggtaccacagccatgtgggttggcagcggggattcggagtggctggtgcctttgtagtgcgccaaaccagtcaggagaatcagcattcacagctttatgattatgatcttgtggagcacacccttatgatccaggatatattctacgaatacaacctgcaggatgtacggaatattctggtgaacggaaagggtcgcaatcatctcagccaattgcccgacaatgataaccgtcatcggtatgaacgacttcgagttactccaggctatcgctataggatgcgagttatcctgaacggaatagccaattgtcctgtggagttctccatcgaacagcacaggctcttgatgatcagcaccgatggtaatgacattgaacccgtgctggcagatggtttcttcttgacctccgcggagcgatttgatttcgttttggaagctaatcagtacaagaaaaactattggatcaggatcaaaggctatgagcagtgtgagaatcgaaatatttatcaaggagccgtgctcagttaccgcggatctgctcgctctgagttgccacagggtgatatcctggataagccaagtagcagggctgcagatgaggatctaatcctggtcaacgatttccgatttaagcctgcaaattccacggccatatcgtcacttcgccaatccttagataaggataacaatgttggtaccgtggcgttgcgatccgtggatcctgtgccctggactcgttacaccaagttcttgacccattactccagtttcggttcgagaacagcgccaaacggagaggtactctttcaaatcagtgatatttcgtacaattcgccgggaatatcactgttgcagggcaggcatctctaccaggacgatagatacttctgcaacaagagctccctggccgcagaaggacgaaattgtgagcgtgagctttgcgagtgtgttaatgtaatgaggcttccggcctatcgtcctctggagatggttgtagccaattatttggacagcacacatcccttccacatacacggatttacattccgtttggtgggccaaggagtgctgggtaatctcaacgatttgcgcaatattcaggagctggatcgcagaggacgtcttcctcgtttatcggaagacagcgctgccgttgccaaggatactgtgcaaattcctggacagggatacataatagttcgattcatctcaaacaatcctggattttggctatatcattgccatgttgaagcacacgccgtccaaggaatggtggcggtgctgaagatcggtgaggatcatcagatgaaaaacattccggcacgtgtgcgctgttgag

SEQ ID NO: 12663 - protein, 677 aa, DROSOPHILA
MGQNFLRRLPANRVASCPWRFAMSKRESKSFASLVLIVLLIFASNPSQCESSKDDFPQAKFEWPSFAWMRNKTTKGTPALDLKNDYSQMELANFGDFDRHPCRRVCQQGQSQNCYYQLVVHNYQRLGPECQRCQFDERACASEHCIYGDGVANPVMAVNRMVPGPSIELCENDTVVVDVLNYLSEPTTMHWHGVHMHRTPEMDGAPFITQYPLQPGEVQRHEFKVDRSGSLWYHSHVGWQRGFGVAGAFVVRQTSQENQHSQLYDYDLVEHTLMIQDIFYEYNLQDVRNILVNGKGRNHLSQLPDNDNRHRYERLRVTPGYRYRMRVILNGIANCPVEFSIEQHRLLMISTDGNDIEPVLADGFFLTSAERFDFVLEANQYKKNYWIRIKGYEQCENRNIYQGAVLSYRGSARSELPQGDILDKPSSRAADEDLILVNDFRFKPANSTAISSLRQSLDKDNNVGTVALRSVDPVPWTRYTKFLTHYSSFGSRTAPNGEVLFQISDISYNSPGISLLQGRHLYQDDRYFCNKSSLAAEGRNCERELCECVNVMRLPAYRPLEMVVANYLDSTHPFHIHGFTFRLVGQGVLGNLNDLRNIQELDRRGRLPRLSEDSAAVAKDTVQIPGQGYIIVRFISNNPGFWLYHCHVEAHAVQGMVAVLKIGEDHQMKNIPARVRC

SEQ ID NO: 12664 - DNA, 13036 bp, DROSOPHILA
ctccgtttacagtgaacgcattaaaaatcgaaataaaggaactaatcggcgggacaattgaaaattgaacaattttaaatacatttcttattttataccccaatatcactcgatatcccagaaaaatgatgaaatttcgcgatcgcgtttctactacctatgaatttattgttttttttttatatagttcaactggaatcacagcacggccttctccatcatgtccctatcctctttgatccgcaagaggccaaacttcgccaattgcgtttcctaaaacgccgaagtggggagaatagggtccgtctcttgatttgctcaggcttaccccccaaaagcaacagtcagctcctccgtcttgtcctcctcgttgcttacctgtgttgcaggtacggctccaaaaaccgcagctccgctatccactgccaaccgtaggccgccttgtccatcccacgaatttgtgacgcagctttgaccactgcttcttacaggctgaagctaatatagatcgactcggattgtatatctaatcataaatagatctataccctatggggtctgcaaatattataatattttaccaatctgttacaccccttcgctactcgagtagcagttatacataaatatgatctgaaattcttaatcgtagacgcccactttttggcagtataaaatgcgagactcaagcctatatagcgccagttttcgtggacattgccagtggtgcggatcaaatagtgacttgatttttgaattatatgtttaaagtgtgacttcctaagaatatcgtttattgtgaacttgtggcgcaacaaaattatgaagaaaaatgctcattaagtcgctaaaatgtttattcttacttgtgttttgcttgcaattccctcattcgaatacatctcgggataatcttgaaaaacgtgcccatcttgtgagacaatcgaacgataatcttcttctcgaaccggcttgggatcgaaatgtttccttgcgattgatgggtgaatccgccaccgtgactatcaatgatgtagacatgatgacggtgcttcggcggcgtcaaaggattattgcggatcgtcaggcggcgcgaagggagcccctgaaagtggacgccgttagggatatgttccacgatgtggagcttaaaatgacgaggattcagcgaaggatcttcagtgcgagaaactccacgaaaagaagtgggctcaatcaacgcatcctgcgccggcaattgcagcgcgtggaacgcgtcaaaggaatactgcagaccctcgcgggaaacctggccagaaacgagtgcttatcgaatccgtgcaaaaacggtggaacttgccacgatgcctacaagggattccagtgcgagtgcccggcgggctggcaagtgagtaagcgggggcgtctctcaagagattatggggcgtattttcacacgaaagagtaacttacatatatgactggaaatgcgttggcttaattacaatgcaagttagttaccaaaagtcaccgtatgaagaattcttgatcatgtttgtccgtttgtccgtatggggacgtcgagatcttggtaaataagagagccaaaaatccgactgtatttgacttttgaatacagttattggggcgtttcatggttaaagaagttatagaggtttgaggttagaattatcactccatgtacatacatatgtacatagttccagcacagaagtttattgggattagtaaattcgtttatttttagggtgactcttgtgaggacgacgtaaacgagtgcttcactttggccggaacagatctcgatgggtgtctaaacaatggtcagtgcattaacactccaggaagttaccggtaagttgacgagaagttccacgtgcaggaaatgaaatatgtaccgcaaaattgctgttttaggtgcgtttgccgcaatggattcactggcacccactgtcgccttcgtcacaacacttgtctgttcggcggctcccgggagctgtgcggcgagcatggcacctgcatccaggcggccaattccgctggctatgtgtgcatctgcgatcagggatggacctgggcagatgccaatgtgacctcagccagcccaagtgcctgcgtccgcgacgtggatgagtgtgagccgcgcgtgaatccttgccacgatgagtgcattaatctgccgggaagttttcgatgcggagcctgtccaacgggatacacgggtgatgggcgcttctgccgcgatatagacgaatgtgcctccgaggataatggcggctgtagcctccagccacgggtaacctgcaccaacacagagggctcacatcgctgtggccgatgtccagccggttggacgggcgacggacgaacatgcacagcatcggattcaaactcgtgcaacaatgaggggatttgccatccgctggccaagtgcgagtatgtatccgacatggtggtgtgcacctgcccattgggcagctttggacatggctatggtgccgatggatgcagcgcggactccagtcgactgccctgcgaccagcatccttgccagaacaacggtacttgcgtccagaacggaaggggaaccacgtgcatatgccagcctggctattccggcgttgtgtgcaactcatcggatgcgtgccacccaagtccctgcctaaatggtggaacatgccgcctattaccggatgctaagtaccaatgcgtttgcccacgcggctacaccggcaccacctgctcccatcagcgattcttttgcggcgtcacgatacgtggaccgtcgggccagttgcattacccgcccaacacagctgatggcgattatcaggccgacgagcgatgtcctttcatcatacgcacaaaccggaacatggtgctaaacctgaccttcacccagttccaactggaggacagtgccgactgcactgccgattttctgcaactgcacgatggcaactccctgtcctcccgtttgattggtcgattctgtggctctcgtttgcccatgacaaatggcagcgttatcaccacccaggagcaggtctttttctggttccgctccgacaaccagacacaagggaagggcttccacgtcatctggaattcattgcccttctcctgcggcgaaactattaatctgacatcgacgcagaccggcgtgctgcgatctccgggctatcctggtcaggcgcgaccggaactcgactgtcgctggcaactgacggcgccgtttggctaccggctacttcttcggttctacgacatatcgctgggcagcagcgaagcatctgccgggaactgcagccaggactcactcatagtctacgactccgatcgccagttgttgcgcgcctgtcagtctattcagccgccgccggtgtatagctcctcaaatagcctgcgcctggactttcacacggatgccatacgttcggatagctcctttcaaatgcactacgaagtggtgccgggccatcccggctgtggaggagtgtacacggagtcgcggggtcgcatctctggttacatgaacttcgaggtctgcctctatctaatcgaacagccacgaggaacgcaagttaagctggtgatcgatcgtgttagtctggtgcaatcgttgagttgtcactatctgaagatcgagatctttgacggaagatcaactgacgcgccacttttgcgacgcatctgcggaagtcacgaggaaagtgaactggagccgataatatccattggaaatgtgattctagtgcgctatgaatacgccttgagtggcgtgaggctgagtaaaagttttgatttgacttacacaagaggtaaggcatttaaagactatagatatgaatatacttattcaagataaattgttttaaatttagcggcaacactaactaattaaatctatgaattaaacttagtggtttagttatattttcaaaaagtgcatttgaaacaaagctaaatgtcattacttttcagtgtgtactggtaactttaacaccaattccgggataattagtacacccaattatccgggtccatattttgatgacatgacctgtacttacaacttgaccgggcccctggatacggctgttcgaatgagaattactgacctatctctgggcactgccaataatgaaaatgatacttcttacttggacgtaagtgatatttgttaactattgttaactatatatttacaaacggatcaatcttataggtgtatttatcggcggatcaaaagcggcatattgttaaatcaacggataacctcatcctgttgtcacatagcaatcgggctagtctggtcttccacggatccggtggaggtcgtggaatgcgacttgaatacaattttgttcctaatcagtgcggcggatttcttaatgagcccggcaggcgatatgtgacggccgttcggggtacattttgtcagtggtttattgacttccccggtaggaaaaagatctctattcatacactggggccaactccaagtatatccatatatgataacagcacaagcccgggaaaattagtaaataggtagataattaaaatctgaaaaaagagtagctattaataatattattattattattgcagttattctgggtctgtgggggacgttttcgatggagatctattgacgataaacttgcatacaaattggcccaggctcgaaatttattcaattcaatttgacattgtacaacaaggtaggaaatattaattaataaatataattaataaatattaataaattaattagtaagtaatttttctgaaagttgcctactctactataaaagcagaaggaacttatatatatatatatatgcattacgtttcgattacaattactatagatagttgtggaggaaccttcacagcccgatttggctacatcaaatcaccaaattggccaaagaactatggggaatctcaaatgtgtgagtggatcttaagagcaccctttggccaccgcatagagttggtggtgcacaattttacgctggaggaagagtatagttccactggatgctggacagactggctggaaataaggtaatccgatgcaaagatattgcatacgaattgattaccttatgatattcgatttcaactacaggaatggcgactccgaatcatctccgctgattggacgctattgcggcaatgaaattccaagcaggattccctcattcggaaatgtactgcaccttaagttcaagtcagatgactccatggaggagaagggattccttttaagctggcagcagatgggagccggatgcggcggcaaattgagttcatccatgggaaccattcactccccgcatttattggcgggaaatcgtgggatccttgcttgcgactggcagatcatcgtcgccgagggatccagagtaagcctgcagctgcggagcaatgacaaccgtatatgtagtggtcaactgaccttatacgatggacccaccaccgccagcaatccaatagtgattcgttgcaacggaacgattgccaaaccgctacagtcgaccggaaatcgcgtacttgtgcgttacgatgttggccatgatgcacctgacggcaccgacttcatgctgaactaccaaacaaactgtcgtgttcggctggagggcctgcagggtgcaattgaaacgcccaatttcccggagaactatccgccaggccaagactgcgaatgggatattcgagctggtgggcgtaagaatcacttacagctcatattctcccacctgtcagtcgagaaattttcctccatctgtctcaatgactatgtgtcccttgtcgacatgctggacgatcaaacactcagcgagcagcatctgtgcaccaacgatgggttggaacccatcactactgtcgggaatcggttgctccttcgctttaagagcgattcgtcggtggaattgcaaggcttccgggccgagtacaagcgcattggatgtggagagcaccttcgggaatcaggcggaagatttgaatcgccgaatgcacccttcagcgtggacatggactgcgtttggattattacagcatcggaaggcaatcagatacggctgttacttcatgaagtctacttcgaggcgccgcagatcgagtgccgcgatgcggaatctagtctctccgtatccgcacccagtggatacaactcctcagtggtactgtttcgaagttgtcacgaggagacgcagacacaaacctttacctcgccgggaaatgagctagtgattcgctttgtgagcagctcggcaccgtctaggaagtactttaaggccagctttgtccaggtgccagccagttgtggaggatacataagcgccagtagcggtgtgctgaccacacccggattccacaatcaccaggacagcaaaaacgtggctaattacacatccaacattgagtgcgtatggactgtagaggtatgttattaataaaaataataataattcataaagagaattgaattgaattatcattttaaattgattgtccgataatttttgcaatctttcaggtaacgaatgggtatggcattaggccgcattttgagcaatttaaccttacggattcaggcaactgctcagttagctttgtggaactaacgaaactggaaccggacaacaaggagatatttctggagaagacctgcggcgaggactcgccaatgatccgaatagttcacggacgaaagctgcgagtccgttttaaatcccaggccggaacctggggcaggttcatcatgtattttgagcgccagtgtggtggacggctatccactggcgagggatacttgcaatcccgcctagacgaggagtgcagctggctggttacatcaccggagggcagcaaactgagccttatcattaatcagctagagtgccctaaatgcaatgccgtatcgcaaaattgctcggaaggtctgcagctgctcaacgatgatgaccaggtcttactataccagatgtgtcgcgatcatccagccaatcttatagtgcccgcaaacaatgtgcgtatcctgacccacggaataaggctgcaggcgcagtttagcacttttgagaactcatgtggcgggaatatcacatcagccagcggcagccttagttcgcccaattatccggacagttatccggccaatattgagtgcgtgtggtccatcaggacacgtccgggaaatgccttggaaatcacctttgaggccatggacattgttcgctccgagcattgcaacgatgacttcctagagatacgctctagtgtccagggtccactactggccctctactgcgataagaatctaccagagactcccttggtggtccactctgagttatggatcaaattccgcagcagaccaggcaacaccgctgggggtttccgtttccgctggacttacggtacgttatcttgaccactggaatctatttattattacttatcacaaccactcgcgcagtgcacaacaacgagattaatagtggcatcaatggaacaatcgagcctcctccgccgcttttcgttagcaacgaggatcaacccttcacctggcgcctttttacggacttcaaaaaggtttttgtcttgcagtttgaggaatatatttcaggcctcatagtaagtacgacagctttccaatgaaaaaaaaaaagaattcaaggctatatattcatacaatccttccagctctttgatggctatgatgataacgctttggcggtcaatatccccgtcagtccatggagatttacctccagcagcaatgtggtctacttaaagacggtgaatgacgcacttactcattttcgacttaagtggggcgtgctggatagcaatttggtggcgagtaatctcagcttaaccaccggtggttgtacaaaggagctgacgttaagccatcatggcgacattgagttaagttcgccgggatatccgcacggttatgcacccaatttaaattgcgaatggaccataaggtcacagttcccttcacatcatatatacgcccattcaataattgtggatctcgaggactatcccgcctgtagtgccgattatctaagcattcagagctcacgtgacctcattaaatggaagaatgagctgcacgcttgcaaggcttcacagattgcaccagttcacggaacgccatatctaagattacagttccgtagtgatgtatccatcaacggcactggattccgggcgaagctacgtacatcctgtggctccaatatgacgggcattgtaggcactattccgcaggaaaacctctttgatgagtgtgcctggcacatcgacgtccgaccaggacgaaaaatcgacattgcaattaattataataatatgccgccaatagcagtgtgtgaggcatacggtcttatctacgatggtgtggatgagcatgcatctttgctggaacataccaggtttggcaaccaaatgggcattagaagaacacaattccgaacaagcggctcgcacgcctacattaaatatcatatcggccgttcaagaataaacggcctttgcctttggaatctcacataccgagagtttaacgagtgcaatggcgagattcagttgaaccagcaggctcctaactatacgattatgtctccgggttatccgtatctgccgcatcctcacgcggaatgcacgtggttggtgatggcgccgccaggtgagaccatcgcagtcgatttcgatgagcaattcgagttgagtgcccgccactgcgacaaggaaaatgtggagttctttgatggcgccaccaaactggcccgccttttgctccgcacctgtcgcaagccgcagaacacggtgcgcacgactggtaacctgcttctcgtccactaccaatcacagctcaatgaacctactggaggttttcgcctgaacctatcactaagcacatgtggtggacagttcagtgcatcggctggcttcatcagctcggagaactatcctcatttgggtggctatcccaagccgtcggtgtgcgagtatagcattctcttgcccaagaacgcgttcattcgcttaaacatcaccgatctccacttgccatacgatgcgaatggaacatccagcgatcgcctggaaattgttgactatgaggatcgaacgcaaaaactaatggttctggatggcaggacaaaaacatccattctctttactctaaacacaaatgcggcgaccattcgcttcgtggccgtccaaaatgtgaacaattatcgaggctttaagataagatacgagcggtatgtgggaacttgctcgagggatataaatggagcttcaggggacatcgtaattcccccaatgccgcagtcggtctggcttcgattctgtcgcttaaggatcagtgtgccaaagggtcaacgggtacgtctgaatcttctcaatctgtctaatattcgcgttgtcaagcgaaacgacacaaaccggtaagtacggaaataaataaattataaaaaaaaaaacaaatataaatataatgctagagctagctctttcctaaaataaaactatcagatttatatcactattaaccttaatacaatacaaaacctatttcagatcctttatgcaaatcggtcgattggaaagtatggctcacttctccttctacaacgacgccaactcactatccaagatcgccgaattccggatcgatggtggctacaacggcagtgggattattgagtctaccgacaactatatgctcgtcgttgtgatgaccaaccagttggatttaagtgccacgccgctgagagctcgctacagttccagtgaaccaacagtctgcccgccgaatatcggagatcaggccacgggctcaatttccatccaaagtctccttcaagtacccggctaccattgcaccattaaatttgtgggcactgacagtgcaacgctcaccttcaaggtggaagagtatctattccaaacagccggcggcccagcagttgtgttcagagacgacattacgaatattccggtcaaagcgatgtacgctaatgtgaccaatagtttcgtctccgtggtcacctcagctggaagtgtaacgctgctgaacagcaaaaatgtcaaattgcgacgcttccgggccacatacaggcgacacaattgcggcggacgtttgcaggcggctgaaggagttaccatcgagtcaccggatctgttgacaacactgaatgatgcctacggcgaagttgagtgcctctggacgctgagcaacagcaacggctatgtgctggagggcaatgtaacgctaacggatcgttgcgatcgggagtacattgtgatctttagcggacagtcggaagtgggtcgcatatgccggggtatggccatgaatagcacgctcctggagcgaccattttccacgatactctaccattcggagagccgactcgctcagcagagtaagttcatcctgcaagcatggaaatcagtctcttctggcaatgcgattcgcattgaccaccgaccttcgccaccggtgacgattagtagcaagaattacttggagagcaagcaacgcatatgggagtttgttaccaatgatggtctatctttgaggctacatttcctggaacgaatcttcattgtgagctcacctaactgctcgaccgatcgattgacggtggagcgttacgatcagacgacagaagagtatatagaggtgactagcctgtgcggcaggcaagcagctaacgatattctggtgccatccgcccgaatgcgagtgatattccaaacgaactctaatataacgggcgacggtttcagtttccaagtcattcccagctgtgattccgtactgctggccggagcagagatccaaaccctggccagtcccagttgggcggcgttccgcggaaggcagttcaattgcagctacacattctatgcgcatgacaaccaccaagtggtggtcagtgtgaggaccagaggtcgtccgtgggcgtcgtatgcctgcagcagatcctacttcgaggcttatcgtcgcggtgatggcaatggagttggggaggagagcattggcaggctctgtcccgagttcgaggtgaagggcaatggtagagttcgattgcgttatgtctctccattgtcgcgttggttcgaaatgcaataccaactaatacaatgcggtggcaactacagcacatcctttactctgcgcccgccgcaaaacgaggattctagtgtatatgcccacaatacgttatgcgaatggaggatcaccgcgcctccacagcatgccgtcgtaatagagttcaagtattttgatatggagtccagcagaaattgtggtttcgacagtctaaccatctatcgtggccatgtggtcagcgaggagcagagaacgggcctactatgcggcaatgtgaccaatcctgagactatcatcgttaatagcaacgaagctctcattgttctgaccacggacagttcgaacagttaccggggcttcctggccagtgtgcgattcacccccaattgcaacgagcatgtggctttagacctggaagtaccccgcatgagcgtgatgcgacaatacgttgtcaatattagcgaatcactgttgtgcatattccaggccagcgctccgccagattatcgcatttctttggaggtgcgcaagctgcagcttgcagacgatgtcgtctgccgtacctgcagctatttggaaatccacgacagtaaagatgtcgaaggccagaatcttggcaggtactatggtggcacaaatggtaatgaaccctcgaataggacaaaggtgttcagttccttttcggacatgtcgttcaagttgattgcaactaccggacaggctcagaagaacatcagctttgagcttatcctgcaaatggtgcgcactgtatgcggtcaaggggagtacgacttgcggttaaatgaggtaggatttcctgaacaaattatgatgaaatgactccttcactgcgttgcaaacttctgactgaaataaatgtactctatacccatttttcttactttttccgacagactataacgttgggtatgcagtacgacaacagcacaagattctacgagggaagtattcagtgtctctggataatcaagaataaaggagatgtggaattagaattccggaagcttcgcctcaaggaaatatctcaggggacaggcaaatgcacggactacttaaaactgtccaaaccctatgtaatatagatagttttataagaagtcaccactaataaaatcttattgcagttctctagatcatattgcggacaacacgacaaaagtttcaagatagtcgaagaagtcaatgaatccaacttgcaactggctttccacagtgacggcctcgaggaatcgcaaggatttgaagtaatcatacgccgaaagtcaagtatgttgtaatccctatttgttgtttaacaaatatttcaaatattttccttacagcgtgcaatcgaaactacacggagttgagtcaggtgattgataccagcaatcttaccaactgcacggattatatccgagttccaagaggttacagcataacgctatacgtgatgactgtgctgttcgatagtttcgataataattattttagggtatgattttcagtttttacgatttaagagaatattaattatacacttcgctttcgcacaggtaatagatgtacagtcgaacaagaccatattcaccaattcggacatacaatgggaaaccaaagctatgattacatctaccaacgagctgcgtctcgaaagccgtcaagtatcgtccctcaagttcttctacttttccaccagcaaccagtttcctggcggatgtggtggtgatctagccgttggtgggtcggtgggcagctatctggagaatccctcctacgaaggacgcaacagctcattgtgcacttggaaaatatccgtaccagctggcggaagtctgagatttagcttcgcaggttatataatccatgatccattga

SEQ ID NO: 12665 - DNA, 9455 bp, DROSOPHILA
atgggtgaatccgccaccgtgactatcaatgatgtagacatgatgacggtgcttcggcggcgtcaaaggattattgcggatcgtcaggcggcgcgaagggagcccctgaaagtggacgccgttagggatatgttccacgatgtggagcttaaaatgacgaggattcagcgaaggatcttcagtgcgagaaactccacgaaaagaagtgggctcaatcaacgcatcctgcgccggcaattgcagcgcgtggaacgcgtcaaaggaatactgcagaccctcgcgggaaacctggccagaaacgagtgcttatcgaatccgtgcaaaaacggtggaacttgccacgatgcctacaagggattccagtgcgagtgcccggcgggctggcaaggtgactcttgtgaggacgacgtaaacgagtgcttcactttggccggaacagatctcgatgggtgtctaaacaatggtcagtgcattaacactccaggaagttaccggtgcgtttgccgcaatggattcactggcacccactgtcgccttcgtcacaacacttgtctgttcggcggctcccgggagctgtgcggcgagcatggcacctgcatccaggcggccaattccgctggctatgtgtgcatctgcgatcagggatggacctgggcagatgccaatgtgacctcagccagcccaagtgcctgcgtccgcgacgtggatgagtgtgagccgcgcgtgaatccttgccacgatgagtgcattaatctgccgggaagttttcgatgcggagcctgtccaacgggatacacgggtgatgggcgcttctgccgcgatatagacgaatgtgcctccgaggataatggcggctgtagcctccagccacgggtaacctgcaccaacacagagggctcacatcgctgtggccgatgtccagccggttggacgggcgacggacgaacatgcacagcatcggattcaaactcgtgcaacaatgaggggatttgccatccgctggccaagtgcgagtatgtatccgacatggtggtgtgcacctgcccattgggcagctttggacatggctatggtgccgatggatgcagcgcggactccagtcgactgccctgcgaccagcatccttgccagaacaacggtacttgcgtccagaacggaaggggaaccacgtgcatatgccagcctggctattccggcgttgtgtgcaactcatcggatgcgtgccacccaagtccctgcctaaatggtggaacatgccgcctattaccggatgctaagtaccaatgcgtttgcccacgcggctacaccggcaccacctgctcccatcagcgattcttttgcggcgtcacgatacgtggaccgtcgggccagttgcattacccgcccaacacagctgatggcgattatcaggccgacgagcgatgtcctttcatcatacgcacaaaccggaacatggtgctaaacctgaccttcacccagttccaactggaggacagtgccgactgcactgccgattttctgcaactgcacgatggcaactccctgtcctcccgtttgattggtcgattctgtggctctcgtttgcccatgacaaatggcagcgttatcaccacccaggagcaggtctttttctggttccgctccgacaaccagacacaagggaagggcttccacgtcatctggaattcattgcccttctcctgcggcgaaactattaatctgacatcgacgcagaccggcgtgctgcgatctccgggctatcctggtcaggcgcgaccggaactcgactgtcgctggcaactgacggcgccgtttggctaccggctacttcttcggttctacgacatatcgctgggcagcagcgaagcatctgccgggaactgcagccaggactcactcatagtctacgactccgatcgccagttgttgcgcgcctgtcagtctattcagccgccgccggtgtatagctcctcaaatagcctgcgcctggactttcacacggatgccatacgttcggatagctcctttcaaatgcactacgaagtggtgccgggccatcccggctgtggaggagtgtacacggagtcgcggggtcgcatctctggttacatgaacttcgaggtctgcctctatctaatcgaacagccacgaggaacgcaagttaagctggtgatcgatcgtgttagtctggtgcaatcgttgagttgtcactatctgaagatcgagatctttgacggaagatcaactgacgcgccacttttgcgacgcatctgcggaagtcacgaggaaagtgaactggagccgataatatccattggaaatgtgattctagtgcgctatgaatacgccttgagtggcgtgaggctgagtaaaagttttgatttgacttacacaagagtgtgtactggtaactttaacaccaattccgggataattagtacacccaattatccgggtccatattttgatgacatgacctgtacttacaacttgaccgggcccctggatacggctgttcgaatgagaattactgacctatctctgggcactgccaataatgaaaatgatacttcttacttggacgtgtatttatcggcggatcaaaagcggcatattgttaaatcaacggataacctcatcctgttgtcacatagcaatcgggctagtctggtcttccacggatccggtggaggtcgtggaatgcgacttgaatacaattttgttcctaatcagtgcggcggatttcttaatgagcccggcaggcgatatgtgacggccgttcggggtacattttgtcagtggtttattgacttccccgcccgatttggctacatcaaatcaccaaattggccaaagaactatggggaatctcaaatgtgtgagtggatcttaagagcaccctttggccaccgcatagagttggtggtgcacaattttacgctggaggaagagtatagttccactggatgctggacagactggctggaaataaggaatggcgactccgaatcatctccgctgattggacgctattgcggcaatgaaattccaagcaggattccctcattcggaaatgtactgcaccttaagttcaagtcagatgactccatggaggagaagggattccttttaagctggcagcagatgggagccggatgcggcggcaaattgagttcatccatgggaaccattcactccccgcatttattggcgggaaatcgtgggatccttgcttgcgactggcagatcatcgtcgccgagggatccagagtaagcctgcagctgcggagcaatgacaaccgtatatgtagtggtcaactgaccttatacgatggacccaccaccgccagcaatccaatagtgattcgttgcaacggaacgattgccaaaccgctacagtcgaccggaaatcgcgtacttgtgcgttacgatgttggccatgatgcacctgacggcaccgacttcatgctgaactaccaaacaaactgtcgtgttcggctggagggcctgcagggtgcaattgaaacgcccaatttcccggagaactatccgccaggccaagactgcgaatgggatattcgagctggtgggcgtaagaatcacttacagctcatattctcccacctcgagcagcatctgtgcaccaacgatgggttggaacccatcactactgtcgggaatcggttgctccttcgctttaagagcgattcgtcggtggaattgcaaggcttccgggccgagtacaagcgcattggatgtggagagcaccttcgggaatcaggcggaagatttgaatcgccgaatgcacccttcagcgtggacatggactgcgtttggattattacagcatcggaaggcaatcagatacggctgttacttcatgaagtctacttcgaggcgccgcagatcgagtgccgcgatgcggaatctagtctctccgtatccgcacccagtggatacaactcctcagtggtactgtttcgaagttgtcacgaggagacgcagacacaaacctttacctcgccgggaaatgagctagtgattcgctttgtgagcagctcggcaccgtctaggaagtactttaaggccagctttgtccaggtgccagccagttgtggaggatacataagcgccagtagcggtgtgctgaccacacccggattccacaatcaccaggacagcaaaaacgtggctaattacacatccaacattgagtgcgtatggactgtagaggtaacgaatgggtatggcattaggccgcattttgagcaatttaaccttacggattcaggcaactgctcagttagctttgtggaactaacgaaactggaaccggacaacaaggagatatttctggagaagacctgcggcgaggactcgccaatgatccgaatagttcacggacgaaagctgcgagtccgttttaaatcccaggccggaacctggggcaggttcatcatgtattttgagcgccagtgtggtggacggctatccactggcgagggatacttgcaatcccgcctagacgaggagtgcagctggctggttacatcaccggagggcagcaaactgagccttatcattaatcagctagagtgccctaaatgcaatgccgtatcgcaaaattgctcggaaggtctgcagctgctcaacgatgatgaccaggtcttactataccagatgtgtcgcgatcatccagccaatcttatagtgcccgcaaacaatgtgcgtatcctgacccacggaataaggctgcaggcgcagtttagcacttttgagaactcatgtggcgggaatatcacatcagccagcggcagccttagttcgcccaattatccggacagttatccggccaatattgagtgcgtgtggtccatcaggacacgtccgggaaatgccttggaaatcacctttgaggccatggacattgttcgctccgagcattgcaacgatgacttcctagagatacgctctagtgtccagggtccactactggccctctactgcgataagaatctaccagagactcccttggtggtccactctgagttatggatcaaattccgcagcagaccaggcaacaccgctgggggtttccgtttccgctggacttacgtgcacaacaacgagattaatagtggcatcaatggaacaatcgagcctcctccgccgcttttcgttagcaacgaggatcaacccttcacctggcgcctttttacggacttcaaaaaggtttttgtcttgcagtttgaggaatatatttcaggcctcatactctttgatggctatgatgataacgctttggcggtcaatatccccgtcagtccatggagatttacctccagcagcaatgtggtctacttaaagacggtgaatgacgcacttactcattttcgacttaagtggggcgtgctggatagcaatttggtggcgagtaatctcagcttaaccaccggtggttgtacaaaggagctgacgttaagccatcatggcgacattgagttaagttcgccgggatatccgcacggttatgcacccaatttaaattgcgaatggaccataaggtcacagttcccttcacatcatatatacgcccattcaataattgtggatctcgaggactatcccgcctgtagtgccgattatctaagcattcagagctcacgtgacctcattaaatggaagaatgagctgcacgcttgcaaggcttcacagattgcaccagttcacggaacgccatatctaagattacagttccgtagtgatgtatccatcaacggcactggattccgggcgaagctacgtacatcctgtggctccaatatgacgggcattgtaggcactattccgcaggaaaacctctttgatgagtgtgcctggcacatcgacgtccgaccaggacgaaaaatcgacattgcaattaattataataatatgccgccaatagcagtgtgtgaggcatacggtcttatctacgatggtgtggatgagcatgcatctttgctggaacataccaggtttggcaaccaaatgggcattagaagaacacaattccgaacaagcggctcgcacgcctacattaaatatcatatcggccgttcaagaataaacggcctttgcctttggaatctcacataccgagagtttaacgagtgcaatggcgagattcagttgaaccagcaggctcctaactatacgattatgtctccgggttatccgtatctgccgcatcctcacgcggaatgcacgtggttggtgatggcgccgccaggtgagaccatcgcagtcgatttcgatgagcaattcgagttgagtgcccgccactgcgacaaggaaaatgtggagttctttgatggcgccaccaaactggcccgccttttgctccgcacctgtcgcaagccgcagaacacggtgcgcacgactggtaacctgcttctcgtccactaccaatcacagctcaatgaacctactggaggttttcgcctgaacctatcactaagcacatgtggtggacagttcagtgcatcggctggcttcatcagctcggagaactatcctcatttgggtggctatcccaagccgtcggtgtgcgagtatagcattctcttgcccaagaacgcgttcattcgcttaaacatcaccgatctccacttgccatacgatgcgaatggaacatccagcgatcgcctggaaattgttgactatgaggatcgaacgcaaaaactaatggttctggatggcaggacaaaaacatccattctctttactctaaacacaaatgcggcgaccattcgcttcgtggccgtccaaaatgtgaacaattatcgaggctttaagataagatacgagcggtatgtgggaacttgctcgagggatataaatggagcttcaggggacatcgtaattcccccaatgccgcagtcggtctggcttcgattctgtcgcttaaggatcagtgtgccaaagggtcaacgggtacgtctgaatcttctcaatctgtctaatattcgcgttgtcaagcgaaacgacacaaaccgatcctttatgcaaatcggtcgattggaaagtatggctcacttctccttctacaacgacgccaactcactatccaagatcgccgaattccggatcgatggtggctacaacggcagtgggattattgagtctaccgacaactatatgctcgtcgttgtgatgaccaaccagttggatttaagtgccacgccgctgagagctcgctacagttccagtgaaccaacagtctgcccgccgaatatcggagatcaggccacgggctcaatttccatccaaagtctccttcaagtacccggctaccattgcaccattaaatttgtgggcactgacagtgcaacgctcaccttcaaggtggaagagtatctattccaaacagccggcggcccagcagttgtgttcagagacgacattacgaatattccggtcaaagcgatgtacgctaatgtgaccaatagtttcgtctccgtggtcacctcagctggaagtgtaacgctgctgaacagcaaaaatgtcaaattgcgacgcttccgggccacatacaggcgacacaattgcggcggacgtttgcaggcggctgaaggagttaccatcgagtcaccggatctgttgacaacactgaatgatgcctacggcgaagttgagtgcctctggacgctgagcaacagcaacggctatgtgctggagggcaatgtaacgctaacggatcgttgcgatcgggagtacattgtgatctttagcggacagtcggaagtgggtcgcatatgccggggtatggccatgaatagcacgctcctggagcgaccattttccacgatactctaccattcggagagccgactcgctcagcagagtaagttcatcctgcaagcatggaaatcagtctcttctggcaatgcgattcgcattgaccaccgaccttcgccaccggtgacgattagtagcaagaattacttggagagcaagcaacgcatatgggagtttgttaccaatgatggtctatctttgaggctacatttcctggaacgaatcttcattgtgagctcacctaactgctcgaccgatcgattgacggtggagcgttacgatcagacgacagaagagtatatagaggtgactagcctgtgcggcaggcaagcagctaacgatattctggtgccatccgcccgaatgcgagtgatattccaaacgaactctaatataacgggcgacggtttcagtttccaagtcattcccagctgtgattccgtactgctggccggagcagagatccaaaccctggccagtcccagttgggcggcgttccgcggaaggcagttcaattgcagctacacattctatgcgcatgacaaccaccaagtggtggtcagtgtgaggaccagaggtcgtccgtgggcgtcgtatgcctgcagcagatcctacttcgaggcttatcgtcgcggtgatggcaatggagttggggaggagagcattggcaggctctgtcccgagttcgaggtgaagggcaatggtagagttcgattgcgttatgtctctccattgtcgcgttggttcgaaatgcaataccaactaatacaatgcggtggcaactacagcacatcctttactctgcgcccgccgcaaaacgaggattctagtgtatatgcccacaatacgttatgcgaatggaggatcaccgcgcctccacagcatgccgtcgtaatagagttcaagtattttgatatggagtccagcagaaattgtggtttcgacagtctaaccatctatcgtggccatgtggtcagcgaggagcagagaacgggcctactatgcggcaatgtgaccaatcctgagactatcatcgttaatagcaacgaagctctcattgttctgaccacggacagttcgaacagttaccggggcttcctggccagtgtgcgattcacccccaattgcaacgagcatgtggctttagacctggaagtaccccgcatgagcgtgatgcgacaatacgttgtcaatattagcgaatcactgttgtgcatattccaggccagcgctccgccagattatcgcatttctttggaggtgcgcaagctgcagcttgcagacgatgtcgtctgccgtacctgcagctatttggaaatccacgacagtaaagatgtcgaaggccagaatcttggcaggtactatggtggcacaaatggtaatgaaccctcgaataggacaaaggtgttcagttccttttcggacatgtcgttcaagttgattgcaactaccggacaggctcagaagaacatcagctttgagcttatcctgcaaatggtgcgcactgtatgcggtcaaggggagtacgacttgcggttaaatgaggtaggatttcctgaacaaattatgatgaaatgactccttcactgcgttgcaaacttctgactgaaataaat

SEQ ID NO: 12666 - protein, 3138 aa, DROSOPHILA
MGESATVTINDVDMMTVLRRRQRIIADRQAARREPLKVDAVRDMFHDVELKMTRIQRRIFSARNSTKRSGLNQRILRRQLQRVERVKGILQTLAGNLARNECLSNPCKNGGTCHDAYKGFQCECPAGWQGDSCEDDVNECFTLAGTDLDGCLNNGQCINTPGSYRCVCRNGFTGTHCRLRHNTCLFGGSRELCGEHGTCIQAANSAGYVCICDQGWTWADANVTSASPSACVRDVDECEPRVNPCHDECINLPGSFRCGACPTGYTGDGRFCRDIDECASEDNGGCSLQPRVTCTNTEGSHRCGRCPAGWTGDGRTCTASDSNSCNNEGICHPLAKCEYVSDMVVCTCPLGSFGHGYGADGCSADSSRLPCDQHPCQNNGTCVQNGRGTTCICQPGYSGVVCNSSDACHPSPCLNGGTCRLLPDAKYQCVCPRGYTGTTCSHQRFFCGVTIRGPSGQLHYPPNTADGDYQADERCPFIIRTNRNMVLNLTFTQFQLEDSADCTADFLQLHDGNSLSSRLIGRFCGSRLPMTNGSVITTQEQVFFWFRSDNQTQGKGFHVIWNSLPFSCGETINLTSTQTGVLRSPGYPGQARPELDCRWQLTAPFGYRLLLRFYDISLGSSEASAGNCSQDSLIVYDSDRQLLRACQSIQPPPVYSSSNSLRLDFHTDAIRSDSSFQMHYEVVPGHPGCGGVYTESRGRISGYMNFEVCLYLIEQPRGTQVKLVIDRVSLVQSLSCHYLKIEIFDGRSTDAPLLRRICGSHEESELEPIISIGNVILVRYEYALSGVRLSKSFDLTYTRVCTGNFNTNSGIISTPNYPGPYFDDMTCTYNLTGPLDTAVRMRITDLSLGTANNENDTSYLDVYLSADQKRHIVKSTDNLILLSHSNRASLVFHGSGGGRGMRLEYNFVPNQCGGFLNEPGRRYVTAVRGTFCQWFIDFPARFGYIKSPNWPKNYGESQMCEWILRAPFGHRIELVVHNFTLEEEYSSTGCWTDWLEIRNGDSESSPLIGRYCGNEIPSRIPSFGNVLHLKFKSDDSMEEKGFLLSWQQMGAGCGGKLSSSMGTIHSPHLLAGNRGILACDWQIIVAEGSRVSLQLRSNDNRICSGQLTLYDGPTTASNPIVIRCNGTIAKPLQSTGNRVLVRYDVGHDAPDGTDFMLNYQTNCRVRLEGLQGAIETPNFPENYPPGQDCEWDIRAGGRKNHLQLIFSHLEQHLCTNDGLEPITTVGNRLLLRFKSDSSVELQGFRAEYKRIGCGEHLRESGGRFESPNAPFSVDMDCVWIITASEGNQIRLLLHEVYFEAPQIECRDAESSLSVSAPSGYNSSVVLFRSCHEETQTQTFTSPGNELVIRFVSSSAPSRKYFKASFVQVPASCGGYISASSGVLTTPGFHNHQDSKNVANYTSNIECVWTVEVTNGYGIRPHFEQFNLTDSGNCSVSFVELTKLEPDNKEIFLEKTCGEDSPMIRIVHGRKLRVRFKSQAGTWGRFIMYFERQCGGRLSTGEGYLQSRLDEECSWLVTSPEGSKLSLIINQLECPKCNAVSQNCSEGLQLLNDDDQVLLYQMCRDHPANLIVPANNVRILTHGIRLQAQFSTFENSCGGNITSASGSLSSPNYPDSYPANIECVWSIRTRPGNALEITFEAMDIVRSEHCNDDFLEIRSSVQGPLLALYCDKNLPETPLVVHSELWIKFRSRPGNTAGGFRFRWTYVHNNEINSGINGTIEPPPPLFVSNEDQPFTWRLFTDFKKVFVLQFEEYISGLILFDGYDDNALAVNIPVSPWRFTSSSNVVYLKTVNDALTHFRLKWGVLDSNLVASNLSLTTGGCTKELTLSHHGDIELSSPGYPHGYAPNLNCEWTIRSQFPSHHIYAHSIIVDLEDYPACSADYLSIQSSRDLIKWKNELHACKASQIAPVHGTPYLRLQFRSDVSINGTGFRAKLRTSCGSNMTGIVGTIPQENLFDECAWHIDVRPGRKIDIAINYNNMPPIAVCEAYGLIYDGVDEHASLLEHTRFGNQMGIRRTQFRTSGSHAYIKYHIGRSRINGLCLWNLTYREFNECNGEIQLNQQAPNYTIMSPGYPYLPHPHAECTWLVMAPPGETIAVDFDEQFELSARHCDKENVEFFDGATKLARLLLRTCRKPQNTVRTTGNLLLVHYQSQLNEPTGGFRLNLSLSTCGGQFSASAGFISSENYPHLGGYPKPSVCEYSILLPKNAFIRLNITDLHLPYDANGTSSDRLEIVDYEDRTQKLMVLDGRTKTSILFTLNTNAATIRFVAVQNVNNYRGFKIRYERYVGTCSRDINGASGDIVIPPMPQSVWLRFCRLRISVPKGQRVRLNLLNLSNIRVVKRNDTNRSFMQIGRLESMAHFSFYNDANSLSKIAEFRIDGGYNGSGIIESTDNYMLVVVMTNQLDLSATPLRARYSSSEPTVCPPNIGDQATGSISIQSLLQVPGYHCTIKFVGTDSATLTFKVEEYLFQTAGGPAVVFRDDITNIPVKAMYANVTNSFVSVVTSAGSVTLLNSKNVKLRRFRATYRRHNCGGRLQAAEGVTIESPDLLTTLNDAYGEVECLWTLSNSNGYVLEGNVTLTDRCDREYIVIFSGQSEVGRICRGMAMNSTLLERPFSTILYHSESRLAQQSKFILQAWKSVSSGNAIRIDHRPSPPVTISSKNYLESKQRIWEFVTNDGLSLRLHFLERIFIVSSPNCSTDRLTVERYDQTTEEYIEVTSLCGRQAANDILVPSARMRVIFQTNSNITGDGFSFQVIPSCDSVLLAGAEIQTLASPSWAAFRGRQFNCSYTFYAHDNHQVVVSVRTRGRPWASYACSRSYFEAYRRGDGNGVGEESIGRLCPEFEVKGNGRVRLRYVSPLSRWFEMQYQLIQCGGNYSTSFTLRPPQNEDSSVYAHNTLCEWRITAPPQHAVVIEFKYFDMESSRNCGFDSLTIYRGHVVSEEQRTGLLCGNVTNPETIIVNSNEALIVLTTDSSNSYRGFLASVRFTPNCNEHVALDLEVPRMSVMRQYVVNISESLLCIFQASAPPDYRISLEVRKLQLADDVVCRTCSYLEIHDSKDVEGQNLGRYYGGTNGNEPSNRTKVFSSFSDMSFKLIATTGQAQKNISFELILQMVRTVCGQGEYDLRLNEVGFPEQIMMK

SEQ ID NO: 12667 - DNA, 7194 bp, DROSOPHILA
ccttcgacaaggtcgctttgtttttgggctcgttcttcattttcttcttggctgtgcgggcggctttgtggaaaggagaagacgagatgatgcccaggtggaaactggtttctggttcccggattctgagctcagtttcagctacaattgcactgcggcaaagacgacttaagggacaattctattttcctcgattaaggtgatatattatgtaattacagcactctctatctatttcttaatctaatgatacaatgtgaagtaattgccatgaacttattagcattaattttcccttaaatggtatttttaatttgataaataaatacaaaatatacagtgttaagttgctattcccgttatgccgaattaaattattcaagttgataataaagtaaatgtttcatggtttttaagtacaatgagacagatacgcagagtttttttttatttggaaaacaggtctgataacctgaattcgaatcatctggtccgtgtcacttggttctattctctgtgttgagtgtactcgcttagcatcttgccacggtaatgaggcacatgaatgatgaatcattgctacctgccccttccgctgctgccattgccactgcgcttgccgccttgcctcagtttccatgtcttctcgctgctccggctgttgttatttctttttttttttttgcggcaggtgatgcggtgatgttgatggctctccggagctgggataaattcatttcagcagcagctgctccttttcttttgttcggcaggcgaaaaccagttttaagtcttccaaaaaaaaaaaaaaaaaacgaaaacgaactacaaccgattcatgccaaagtgttttggccgtttttgttatgcgggacgggattccagaggaatgtgcgggagatgttgtgagatgggatgggaattcatcatttagggattaaaatacttgccgaactgaatctgaatcacctgaaaagaaggtcaatgaaatgtgttcgagatgagaattgtggcagttggcacttgtgagataatccctactaatgcccatatcctacgcttccttctttgcagatacgtcctatgagaaggcgtgccgccgtggatcagcgcccaccacgcccattttgggcagcaaacagcaccagacggagcacaatgccacctcgcgtttcaccaacttcttttccaagaagtaagttcccagtataatatatatatatatattcaggttcacaatattaataatatgccattgttttcctttgccacagatccaatcctttgaagcggaccaagtcggtgaccaagctggagcggaccaagcgcggatccggcggactgaggggctcccgctcgcacgagagtctgctgtccagtcacgccgtcatgtccaccataggtgagttctggctcataatggagttttggccaaaccctcaaaccattttctttttctttcttcttctagatctctcgtgcactggggcggtgggcgtggcgcccgtgcatcagtcggttctgggacgtcgtcactgtttccaggtacggggcgggcctcgtggcgagcggtactactcatgcggatcgcgccaggagcgcgacctttggatctactcgctgcgcaagtcgatcgctccgaatgcagagcacacgcgtcgcacggacaactcgctgaagatgtgggtgtacgaggcgaaaaatctgccgcccaagaagcgttacttttgcgaactgcaattggacaagacgctgtacggccggacttcggtgaagctgcagacggatctgctgttttggggggagcacttcgatttccccgacatacccgagattaatgtgatcactgttaacgttttccgtgaggtggacaagaagaagaagcgggacaaataccaatttgtgggatcggtgaagatacccgtgcacgatgtcacctccagattgccctgcgaacaatggtatcccatactgagcgacaaggcgggcgacagtctgggcaggacatcgggcggcggcggcagtgggtccaaggacaaggagcaattgcccacgctgaggatcaagtgtcgtttccagagcaccgacatcctgcccatcaatgtgtacggcaactttttgacgtacctcaaggagaactataagcgcgtgtgcgagaccctggagccggtgatcggagtcaaggccaaggaggacattggacaggcactggtgctgctgatgcacgcacagggattggcgggcgccttcctcaccgatgtggtggccctcgatctgctgcgagttggcgatcagaggcttacgttcaggggcaactccttggccaccaagagcatggaggcattcctcaagctgacgggcgaacagtatctgcaggacacactatccgcaccaataaacgagctaattcagtcggagagggactgcgaggtggatcccaccaagacgagcggttcgtcggcgggttcgctgcagcgacagcaggccgccttgcgtggcgcggtccgaggggcgtggcagtgcatcttcgaatcgcacaagcattttcccgcccagttacgaaattgctttgcgacgttccgggagcgcttgcagcagctgggccgtcaggatatggccgacaacctgatctcggcgagcattttcctgcgcttcctgtgcccggccatcctgtcgccgtcgctcttcaatatcaccagcgaactgccgtccgcacgggccacccgcaatctcacactggtggccaagaccctgcaaacattggccaatttcacccgcttccagggcaaagagaactttatggagtttctcaacgatttcctcgagcaggaggccgctcgcatgcaacagtttctggagattatatccacgcggccggagcacccagctccagactcgatcctcgattgggccgggtacatcgaccagggcaaacagttgtccatactacacagtttgctcagcgaaagcctggccaagctgccggaggccaggcagcacgagctggatccgttgcagcatattctcgatgaaatcagccgagccaaagagcatggcatgggcacagcactgccgggtggatatttgccggccacctcgtctacgcactcgatagccagcgagaatcaggagaatcgcaatccgggatcctcgggctcgcacgctggctccaactcggagcagttactgccacaacaaagccagttggcccagccgcagcatgcgattgttagtaaaccattatctgcggagcgcggcatcatgcgaggagtacttacgccgaattctctggagaagaatatctttagatacaatgatcccacggttaatggcttactgcagcagcagcagcagcagcagcagcagcagcaacaacagcaacagcaacatcagcagctgcaacagcatggccatcagcaacagccgcaccaccagcatccactccagatgctctccaattcacaaacctccattgccggcaaccaatatatgagttcgccaggaggcctgcagcatgcccaatcgcagacctcgatggcgtcctcatcgcttaatgggagcagcagcaatttgctgcacggccaccagcagcatgcccatcacccgcagcaactgcatccacatcactgcccgccggcgccacagaccagtgcctccagcactatggagcgcatggatcgcatgaactatccgtatatgtcgcacaatggcaatgactacgagaccagcacgccttcgagcactcgctccaggacactgccacggaatggaaatcccaatgccaatggcaacgtgggcagcagcaacaataaccagagcggcagctacgatgacatgcacggggagttccaaatccagatctctgggttcgatacgagcagtgcttttgtctgcaagtcgcccacacccatgatgaaatccagtttgggaccagcgggggccggacgaagtcatcacaaactgaatttgggaatacccgatcactcaggtggctatgtgcggggtaataatttgaatcccaactcgaatatgcccaagaacttggaggatctggacgatctgttcaagtacgccgaggagcatgacgtggcggaaccagcgaaccatcacaatcacaaccagggtcagcagaaccaccagggacatctgaagccggccgccgttcccggcaaggagcagctgtcggcgaaaagcagtcactgcagttctggctaccagagcatctccacaaatccctcgccctcgcagtcctccagtcccgtggagagccagctgaaggccgcgatgggcagtcacaatgcgccgctggccttcaagaatccctcctatcagcttcagccccaaactggctcgtccagatcatcggcacagagtaatacacaccagcagcagcagcagcagcaacaacaacagtttggcagccgcttgaaaccaattggcggcggactggtggccgcgagggcggctttcctcaacagtggcggagccttggaggcggccactttgacgcccagctcctcggacgaacagctctcggcggataattacttcagttatgcagcggctgcagctgctggagcgggtattgccaccaaattggaggctcaacgctcgctcagcggcggcagtagctcctccacctcagcatctgcgtccacctcgaatcttggcaagagcggcggctcatccgcctacgggcggctgaatgggccgctgaagcgcgaggatgtctacggcagtggctacggcggcagcagtggaaatgtgggctatggcttgtccacttccagtgccgcgggacaccatcaacatccccaccagcagcagcagaatccgatgcagcagcagcagcaaagggaacgggatcaggaacacaagcagtatgccggcagtgtggcgggcagcgtgggatcggccacatcagcggctcagaggcgcctgagcttggactcggcgcgcacgctctccgacagcagcacggatacagagggtgagttgggcaaatgcgtgtgaatctaactacgaaatagataatttgacataaattctggttccaggacactgcaaccaattgcaggagggcaagcgacgcaggcagttgcgcagcagtggcggcagcggcggaggaggagccggttctgagcagggactgggcaagagctatgaccagaacggagagattcagctgctgcaacagacgctggacacgctctgccacacgctggaccgggatgaggccgagcttcgcgactccagcgacgagctgtttggcctgcagcgtccggcgggcagcaatggatcgaacaatcttagcctgcagtcggagtccactatgcgcagcatcatcgacaggtggggattgaattcaattcgagacgcaagcgatgtagccaaaataggtgttccttcgtcaatgcttaacctaagctttcaataaccacactaattttggccacacggctgtctaaatattttgcatggacccatccttcaggggtaaacctaattaaagtttctttcaatcctcctgcagactcataaccatggaggaggagctgcgacgcgagcagctgaagatgtcgctggcgctgtcgcacaagcagcgcgtgatcgaggagcagggccagcagattgcggcactggatgcggccaacagccggctgctgagtgccctgaccgccctgcgccagcggtacgagacccagcagcagcagcagcagcaccaagcaccaccaaagacccagaagccgcagtgagcggatggggggcagagaggaagggcagagatggaaggagactaaggaggattaggaggtgaccgcgaccgaacccgaaaccgaaaccgatacctagcatacctagcatactgacggtggcatctttgttgcgctggacaccgtcgcggtcccgtcttagagatacctttttgtttatttttttttttagatattttttttgtatgctacataaattataatatatatactacatgtttaatatataactatgcataacatacatacatacattatacataatttctcaatctatgtttaaaaccaacaaattgtgaaaacgctaaacgcagctgcaaaggcagcaagataaaccccagaagatcggagcatggaagtgaagaagaaccagaacaagttaagataatgaataaaattataaccaaagttagacaaaaatgcacgacttggcttggctcatttatttttattatctacaattttttgttaaatatttgcagattgtatgtagagttcggtaacatggatgtaacttacacggaaggtacgttgtcagtgtagatgagagaaggcgacacctagcggtacatgcttacattcttagtaactggataataaaacagcaccgccgatgtaagatgtatatgcagtgatcgtttcaacattcaagagtagagggcgccgcttactttttgataagcctaaagttagatggagccagcagtcttaaaaacaacattttgttattaacaatcaagaagtttaagatctttaagatcttcatttaaaatcaaataaaaaatatttacattatttaaaaaatcgtataaaacgtctatgttattgataaactcataaatggtaggtccaatacttttttataaaagcaaacaaaaaagtatttatttaaattagttagacagtaaataagtatcgaataaaaagccatttaacccatttatgtagctaaactttgagcaaagatcttttgatagccaactatagaggcgcgctctattgaaaactcaacaaatatggataaatgttaaatatcgggccgataaagcaaagtgaattatacaaatcatatatttaagctgatcccctccgcagggagcccaaagaatatggtttttcgatgagcaacaatcggtaatcaggttcaaatgcgatcgccctgctttgtcaacgattttgatgggggaacacagcatatcatcatatcatttttcttaccaaaagagtgcctataaattgtaacggaaatctggttagctctcgttggggacagcagggtatccaccaccacaatggaaaaggggggaggggcgcctctgcgactgctgatggactgactggccggtcaacttttgacgcctcctttgttttccttggctctttgttgccttgttgccatgtttggctgcggttttttttc

SEQ ID NO: 12668 - DNA, 4749 bp, DROSOPHILA
atgagaattgtggcagttggcacttatacgtcctatgagaaggcgtgccgccgtggatcagcgcccaccacgcccattttgggcagcaaacagcaccagacggagcacaatgccacctcgcgtttcaccaacttcttttccaagaaatccaatcctttgaagcggaccaagtcggtgaccaagctggagcggaccaagcgcggatccggcggactgaggggctcccgctcgcacgagagtctgctgtccagtcacgccgtcatgtccaccatagatctctcgtgcactggggcggtgggcgtggcgcccgtgcatcagtcggttctgggacgtcgtcactgtttccaggtacggggcgggcctcgtggcgagcggtactactcatgcggatcgcgccaggagcgcgacctttggatctactcgctgcgcaagtcgatcgctccgaatgcagagcacacgcgtcgcacggacaactcgctgaagatgtgggtgtacgaggcgaaaaatctgccgcccaagaagcgttacttttgcgaactgcaattggacaagacgctgtacggccggacttcggtgaagctgcagacggatctgctgttttggggggagcacttcgatttccccgacatacccgagattaatgtgatcactgttaacgttttccgtgaggtggacaagaagaagaagcgggacaaataccaatttgtgggatcggtgaagatacccgtgcacgatgtcacctccagattgccctgcgaacaatggtatcccatactgagcgacaaggcgggcgacagtctgggcaggacatcgggcggcggcggcagtgggtccaaggacaaggagcaattgcccacgctgaggatcaagtgtcgtttccagagcaccgacatcctgcccatcaatgtgtacggcaactttttgacgtacctcaaggagaactataagcgcgtgtgcgagaccctggagccggtgatcggagtcaaggccaaggaggacattggacaggcactggtgctgctgatgcacgcacagggattggcgggcgccttcctcaccgatgtggtggccctcgatctgctgcgagttggcgatcagaggcttacgttcaggggcaactccttggccaccaagagcatggaggcattcctcaagctgacgggcgaacagtatctgcaggacacactatccgcaccaataaacgagctaattcagtcggagagggactgcgaggtggatcccaccaagacgagcggttcgtcggcgggttcgctgcagcgacagcaggccgccttgcgtggcgcggtccgaggggcgtggcagtgcatcttcgaatcgcacaagcattttcccgcccagttacgaaattgctttgcgacgttccgggagcgcttgcagcagctgggccgtcaggatatggccgacaacctgatctcggcgagcattttcctgcgcttcctgtgcccggccatcctgtcgccgtcgctcttcaatatcaccagcgaactgccgtccgcacgggccacccgcaatctcacactggtggccaagaccctgcaaacattggccaatttcacccgcttccagggcaaagagaactttatggagtttctcaacgatttcctcgagcaggaggccgctcgcatgcaacagtttctggagattatatccacgcggccggagcacccagctccagactcgatcctcgattgggccgggtacatcgaccagggcaaacagttgtccatactacacagtttgctcagcgaaagcctggccaagctgccggaggccaggcagcacgagctggatccgttgcagcatattctcgatgaaatcagccgagccaaagagcatggcatgggcacagcactgccgggtggatatttgccggccacctcgtctacgcactcgatagccagcgagaatcaggagaatcgcaatccgggatcctcgggctcgcacgctggctccaactcggagcagttactgccacaacaaagccagttggcccagccgcagcatgcgattgttagtaaaccattatctgcggagcgcggcatcatgcgaggagtacttacgccgaattctctggagaagaatatctttagatacaatgatcccacggttaatggcttactgcagcagcagcagcagcagcagcagcagcagcaacaacagcaacagcaacatcagcagctgcaacagcatggccatcagcaacagccgcaccaccagcatccactccagatgctctccaattcacaaacctccattgccggcaaccaatatatgagttcgccaggaggcctgcagcatgcccaatcgcagacctcgatggcgtcctcatcgcttaatgggagcagcagcaatttgctgcacggccaccagcagcatgcccatcacccgcagcaactgcatccacatcactgcccgccggcgccacagaccagtgcctccagcactatggagcgcatggatcgcatgaactatccgtatatgtcgcacaatggcaatgactacgagaccagcacgccttcgagcactcgctccaggacactgccacggaatggaaatcccaatgccaatggcaacgtgggcagcagcaacaataaccagagcggcagctacgatgacatgcacggggagttccaaatccagatctctgggttcgatacgagcagtgcttttgtctgcaagtcgcccacacccatgatgaaatccagtttgggaccagcgggggccggacgaagtcatcacaaactgaatttgggaatacccgatcactcaggtggctatgtgcggggtaataatttgaatcccaactcgaatatgcccaagaacttggaggatctggacgatctgttcaagtacgccgaggagcatgacgtggcggaaccagcgaaccatcacaatcacaaccagggtcagcagaaccaccagggacatctgaagccggccgccgttcccggcaaggagcagctgtcggcgaaaagcagtcactgcagttctggctaccagagcatctccacaaatccctcgccctcgcagtcctccagtcccgtggagagccagctgaaggccgcgatgggcagtcacaatgcgccgctggccttcaagaatccctcctatcagcttcagccccaaactggctcgtccagatcatcggcacagagtaatacacaccagcagcagcagcagcagcaacaacaacagtttggcagccgcttgaaaccaattggcggcggactggtggccgcgagggcggctttcctcaacagtggcggagccttggaggcggccactttgacgcccagctcctcggacgaacagctctcggcggataattacttcagttatgcagcggctgcagctgctggagcgggtattgccaccaaattggaggctcaacgctcgctcagcggcggcagtagctcctccacctcagcatctgcgtccacctcgaatcttggcaagagcggcggctcatccgcctacgggcggctgaatgggccgctgaagcgcgaggatgtctacggcagtggctacggcggcagcagtggaaatgtgggctatggcttgtccacttccagtgccgcgggacaccatcaacatccccaccagcagcagcagaatccgatgcagcagcagcagcaaagggaacgggatcaggaacacaagcagtatgccggcagtgtggcgggcagcgtgggatcggccacatcagcggctcagaggcgcctgagcttggactcggcgcgcacgctctccgacagcagcacggatacagagggacactgcaaccaattgcaggagggcaagcgacgcaggcagttgcgcagcagtggcggcagcggcggaggaggagccggttctgagcagggactgggcaagagctatgaccagaacggagagattcagctgctgcaacagacgctggacacgctctgccacacgctggaccgggatgaggccgagcttcgcgactccagcgacgagctgtttggcctgcagcgtccggcgggcagcaatggatcgaacaatcttagcctgcagtcggagtccactatgcgcagcatcatcgacagactcataaccatggaggaggagctgcgacgcgagcagctgaagatgtcgctggcgctgtcgcacaagcagcgcgtgatcgaggagcagggccagcagattgcggcactggatgcggccaacagccggctgctgagtgccctgaccgccctgcgccagcggtacgagacccagcagcagcagcagcagcaccaagcaccaccaaagacccagaagccgcagtgagcggatggggggcagagaggaagggcagagatggaaggagactaaggaggattaggaggtgaccgcgaccgaacccgaaaccgaaaccgatacctagcatacctagcatactgacggtggcatctttgttgcgctggacaccgtcgcggtcccgtcttagagatacctttttgtttatttttttttttagatattttttttgtatgctacataaattataatatatatactacatgtttaatatataactatgcataacatacatacatacattatacataatttctcaatctatgtttaaaaccaacaaattgtgaaaacgctaaacgcagctgcaaaggcagcaagataaaccccagaagatcggagcatggaagtgaagaagaaccagaacaagttaagataatgaataaaattataaccaaagttagacaaaaa

SEQ ID NO: 12669 - protein, 1436 aa, DROSOPHILA
MRIVAVGTYTSYEKACRRGSAPTTPILGSKQHQTEHNATSRFTNFFSKKSNPLKRTKSVTKLERTKRGSGGLRGSRSHESLLSSHAVMSTIDLSCTGAVGVAPVHQSVLGRRHCFQVRGGPRGERYYSCGSRQERDLWIYSLRKSIAPNAEHTRRTDNSLKMWVYEAKNLPPKKRYFCELQLDKTLYGRTSVKLQTDLLFWGEHFDFPDIPEINVITVNVFREVDKKKKRDKYQFVGSVKIPVHDVTSRLPCEQWYPILSDKAGDSLGRTSGGGGSGSKDKEQLPTLRIKCRFQSTDILPINVYGNFLTYLKENYKRVCETLEPVIGVKAKEDIGQALVLLMHAQGLAGAFLTDVVALDLLRVGDQRLTFRGNSLATKSMEAFLKLTGEQYLQDTLSAPINELIQSERDCEVDPTKTSGSSAGSLQRQQAALRGAVRGAWQCIFESHKHFPAQLRNCFATFRERLQQLGRQDMADNLISASIFLRFLCPAILSPSLFNITSELPSARATRNLTLVAKTLQTLANFTRFQGKENFMEFLNDFLEQEAARMQQFLEIISTRPEHPAPDSILDWAGYIDQGKQLSILHSLLSESLAKLPEARQHELDPLQHILDEISRAKEHGMGTALPGGYLPATSSTHSIASENQENRNPGSSGSHAGSNSEQLLPQQSQLAQPQHAIVSKPLSAERGIMRGVLTPNSLEKNIFRYNDPTVNGLLQQQQQQQQQQQQQQQQHQQLQQHGHQQQPHHQHPLQMLSNSQTSIAGNQYMSSPGGLQHAQSQTSMASSSLNGSSSNLLHGHQQHAHHPQQLHPHHCPPAPQTSASSTMERMDRMNYPYMSHNGNDYETSTPSSTRSRTLPRNGNPNANGNVGSSNNNQSGSYDDMHGEFQIQISGFDTSSAFVCKSPTPMMKSSLGPAGAGRSHHKLNLGIPDHSGGYVRGNNLNPNSNMPKNLEDLDDLFKYAEEHDVAEPANHHNHNQGQQNHQGHLKPAAVPGKEQLSAKSSHCSSGYQSISTNPSPSQSSSPVESQLKAAMGSHNAPLAFKNPSYQLQPQTGSSRSSAQSNTHQQQQQQQQQQFGSRLKPIGGGLVAARAAFLNSGGALEAATLTPSSSDEQLSADNYFSYAAAAAAGAGIATKLEAQRSLSGGSSSSTSASASTSNLGKSGGSSAYGRLNGPLKREDVYGSGYGGSSGNVGYGLSTSSAAGHHQHPHQQQQNPMQQQQQRERDQEHKQYAGSVAGSVGSATSAAQRRLSLDSARTLSDSSTDTEGHCNQLQEGKRRRQLRSSGGSGGGGAGSEQGLGKSYDQNGEIQLLQQTLDTLCHTLDRDEAELRDSSDELFGLQRPAGSNGSNNLSLQSESTMRSIIDRLITMEEELRREQLKMSLALSHKQRVIEEQGQQIAALDAANSRLLSALTALRQRYETQQQQQQHQAPPKTQKPQ

SEQ ID NO: 12670 - DNA, 8118 bp, DROSOPHILA
taaattctcctcaacatccgatgcagctgtggttctgggcacaacgagttccggcctcaagttctggatccctccctggtcgttcgcctcaccctcctcctcctcctccaggtcggaccaccgattgttgcttcccaggtgggctttgccggcggcctccttctcagagtctgacattcctgccagggaaaccctaatttcgaattccaaattttgtgctatgtgagagcaaagcctccaaaaaatccccagtcactatgaactgcaagctacgccgcctggacctgttgcggaatggccaaaagtcggactgcgagctccatgtctcgcaaccggacaagttgaaggagggcaagcgttgtccatgcattttccgctgccaccaggtgatgctcatctccgcctccgcggagttcgagcgcctgatcagggatcccgagttccagaagaacaagcgagtgatcagcgtggacgacgcctctcccaccgcctacgaggcgttgctcctctacatctacacgtacgaggtgtgcaatgcggtgaccatcgacatgtgcggtgacctcatgctgctggccgagcgctacgagatgctggacttcatcgactgctacatcgacaagctggcccaccaggagtggcccatggaggtggttctgcaggtcttccacctggccagcgagcaccaccatccggcactgatggatctcgtggcgaaagtatgaatttccgcacttttatctcgcttaatccccataccattccagaaaatcctccccgtagccacgcaggtgctcatggacaactcgttcctcaagctgagtgttaaggagctaaaggctctgatgataatcctgaaaaaggatggagatctctccgatcacgaactgctgacctcgctgaagaactaccaggatgtgaacaacctgcgctacgaggacatggagcagttccagcagctcgttgaggtaacccagttgttcggtcacgttctcttcgaagtggatggcaccatagttgtgcccgaagaagaaaaaccttcgccggaggaatagataggtttgcttaccacccaaggaaatagacaggatggtgtacatatctagagggatcatttattggattagggatcgaaaaacaaacaaaatcgaattcatatcggcttaaagaataaatactacctataaacataatacccgaatgggccgaggccggtgcaacaaaataatcttataaatcaatcaacggaagcggatgcctggtatccggagtcctaagaggacgtgcgcaagggcgtgcgcacttccatcggcaccatcgccacatcgccgtcggattcacaatcgccatccccatcggcgtcctcgtcaatgaccaggcagctcggcttaacgctgagaaagtcatcgctgtcgagcatcacatcctcgtcgtcatcgtcgtccccgctctcggacagctcctggtcgtgatccgtcttgtagccgttggtttgggactgctccggcagctgttttatcgcagaaacaggtgtatccatctccctctgaatcggaccagcagtattgctctccagttcgatgttttttgaatcaaacttgcagacgaccgcgatgcgcagattcagaatcagggagtagagcttcacggccgggcccaccttgagtttcaggtacgtatccaactccttgcgccccagcatcagcaacgccctgccgtcgatgtcctgctcgaagatcaccttggcaatgtcagtggaatccagggcacgctctatgtactcgcacacatcccagctggtccagtggagtggattggttcgcacgtcgtccaatttgaaggcgctgttgagctgccagaggcgatagtttggcaggaactgtggtccatagtccttcacaaaggacctggctatggccagggagcgttcatccggcacctgctccgcatcctcctccttctgcatctgtttctgctttttcacaaccttctcctcacaaggagacgtctttcgcttggcttgcaccacttccgcgaccttcgggtagacaatctcttgttgggagtcctccttaatggcttgcttggcctccgaacaggcacgctttgttttcttcgcccatccacgtctgatattctcgggggccacacgcggcggtttcaccgttttggagcgccactgacgccaattttccggcgcatacggacagcattcccgcaaagcatgcacgttgaggttgaagcgcttggcgttgccaaatccccgacatccctccacatcgcaaggcatcacggacttgggctgaagatagccaggcggggtttccagttcgtgcgaggtggcctcgcaccagccgatggggtgcagatcgggactgtcgtcctccagccagaagtagtactccgtgggccagcagtccaggtgcagctgaacccggtaacccttccgcgtcaccacggtggccggacgaattaggcagggattacgctggtccaccacctccagtttcatgcgttcctggtactccattggctggcgtggtgtgaacagctccttggaggcggccattccaccaacctctgatatgtagtcatcccaaatgaaggcagacttctggtagtccggcggaacgatcaactgctggcgtccctcgtgccaaccgcagggatggatgtacggtgaggtgatgtgtacccacaggtcgtagcagtcatcccagccgtcgaagtggactcgaatgcgctcgtccagaatatccgtcactgtggccacacaaatctttcccgtatcgttcaggtcctccgcctcgagatgcatgcccacagcgaagccgttgcgcacatccatctgctgctgcatattcagatgaccaaagagcgcccgcggagctgccttgccgcccgttttcaccaaatagcggctccaactgaagcgctccgagttgtagtccttaggcgcctgcagaacgcgtgctgtctcatcgcaccagcctggcggaaagatgtcctgcgagtcggcgttcacccagaagtcgtacatggaggagtagccatcgaagctaagcttcagccgatagccgcgcacctcgacaatgctgcagacacagaagagcgagcagttctccggatcgatggcctctagcttcatgccgatctcgaagcagttgggactgatggggaacggattgaggaacaggtggatgggcgctgccacatcctttccctttgacttgaggtactcgctccagcggaatggctttctgggcttatccttttgacgttgctgcagctgttcctgtatggcagacagagatttgtgtggtttgtagttggtttgccgcttttgtggcaaatctggcgctgttccagctgtttgctctagttgggtacggcttatcttgctctccttctgcgtactctgcggcagacgacgcttctgggatcgacgcacacagccaacggagcagaaatctgtaggagaaaataatatataatatatatagagtttggggactttggtagctgctctctttactcacgtggtgccagaaagtcggcggcgggtccgtggaaattgcaacgctggcacaagtacagcagcggatggacgcaggccgagggcctgcggcccggacgatcatacaaaggccgctcgaaatatgcagctggaccctggcgtggctggcagcgttcgtttatctgcagaaaattgaactcattcagctcgaaccggacggtggagttctgcaggttggccggctgctggccgcgccatttcaacatgttcaggttctgcatcatgctctttttaaagtcattggtcttgctgctaggagatgggttcgcatcatggtcgttggctttcttggcattctttgcaggtggacttgatggcttcggatcggcgagtttgggcggcggcgacatttccgatgcgtgagagccgctcgaggatgaggaggatgacttgggcggagtttggggcacctgctcatcgcaacgcaacgagcgttcaaagtcctccctgctcagtggcagagattccgccttgatgatgcttatgccaggcagcatactgagttccttctcggttttcttggtcggtaccacctccacatcgctgtaggacgaactgtcgctggaactagaagagattgtcgtcacggaggagttctttctcacggcctttttcttggccgtactggtggtggaaatggttattcctgcgggcagaatgggcatggggatctgcttcttcttcggcgcctcctgcttttccggcttctgattctgcttcggcgtcttcttaatttccggcttctgctgctcttcctcgctctcatcatcgtcttcaatggtgatggtctcgattgccgcactgggctgctcgatcacatccacctccttggccataatggccaccgagtgacgtcgctcgttgttggccacaggcgaagcgggatggttggacacgaaggatttcgaccgctttagtttgggcaattccttgggcccacatggcgtatgttgagcgatttccttgaccaccggtggtttgtccattgtcttctgtttctgctccttggcaggcgcctttttctccttggctggtccatttacggacatctccagaggtttaggagttggtttgggtgctgtcttgattgagggctttgcagtgggcttaacgtcgaccttctctggagatgtaacaactggcgccactgccggcacaatgggcgcttcctggctgggcagcggcactgccttgatggccacgggcttggacttaattaggctcattttgttgttatcggcggtcggcacctccgtggcaatgggcatagccgttttgggtgccacaactggcttcagttggctggcactagtattctgtttgttgtttttctgggtgctcctggtcttatcctctccactggggttcggcgatgtcagaagtttcttcacatgattggccttgccgagaacgagtgcatttgggttgctcttgacctggctgaactttagacgcagcttatccaccgccaccttgctgagtatgagtggagcacgtggcttgaggggattggccagcagggatacctgcgcacccggacccgtgctgggaatctggacaggtgtcgctgtacggttgcatccaaatggagagcagaaataaagaaagatagagaaacacgaattagctttgaattttctttaattagtcacccgaaggcaatccgattggatcctccattgaacccgaacccgaacccgatccccgcaccgccgcaccctcaccgcaccgatcgactgcgctctgacagtgctgatccaaaatcttctcctcttattgcagctgcaaaaacctgatcgtcatcatcagtgtcgctttgctggtgctgttgttgttgttgttgttctcgctggcaccccgccttttgcatactgctattgataaaaccagcatatatacatcatatatattggaaatagcaataagttcttcgtgttgcttctccaattcgtaccgacccagtcatggaacatggcacccacccaattcgatgcttggaacttattttccgaaaatggcacacgaacacaaaccctattaaattggtgttatgaaatgtgcagccgtcgaacaacaactaaaaactaaacccgcagactgatgtgaacaacgaaagtaaactataaagattgccccgcaccccacacgcacactcacacacacactcgcgcacacacacacacacacgcacacttttgcaagagtgtttcccattttccgactggcctcggatctgggggatctgttcttcctcttcctctcagactggggaaacccacttgtaactcataacttacataactcggaagaaggggaaaccgaaaccctacacttacccgcttgtattttcggtggaacgaccgttttgcccacgagcgttaaaggtgctcctccagttccgcctccaacggcggctgctgcagccgatcctcctggctggatgggcttgttgctggtctcaacggtcaggctgttcttgtgcaaaggtgttccggagcgtatgaccaccggttggccattggatgcacctccgccaagcagcgtggtcttgcgattgggggccagaatggccaccaacggttggctgggattactgggcgatggcaccagctggaacaggggagcatctgctgatccgacagtggcgccagctccagcggactttatggaatttggcactatgttgaccgactttagtttggatttcattggctggacattgctgatggtgatgttgcaggtcttgttgccgcccatgggcgccaggggcaggaagcgtagctcctccttgcgcggagctagtgtgaggaggctgttgggatttggatttccgccggaggcagaggcaacaccattgcaattcgcggtagatggtgagatgactcctccattcgctggcgacatggacaatgatatattgcgctggagctgcttggcctccgcactggccatcgacaatggcagcattttgagccgtttatgcttagagctatggatttttgatttcttttttaaccagcggaaatcgaagttatattcttgtctttacaatgtttgtacgttgaggcgcacaaaagtttttggcattttacactccacaccggcgttagtatttttttgtattcccccttttcacaaaactatttggcaatttgttatgttctcgatcgcgcgatttgtgctttatatccgtatattcatcaatcacttttctcttaatcaaaatcgcagaaattgttaagtttttgaattaaagttattgtttcgcgcgtttccttgctctcattgttcgtgtttctcggttctgataatataccaacatttggtatttaaatgcacagattgcgaattagttttaaatatttacggttactttgggtttgttattacctgaaaaaggttaagttggatttagttttggatgctatataaggattttaaagctgcaaaagcatggtaatcagaaaatagctagcaggtagcagttgctttgcaacttgtatgcatattcgctgttaatagccaatcgccatctgtcccaataaaaagggaaatatctagcagcttaaagtcattagttacaatacctgtgttatcctaccttaatatttctgtttattgcgcttgctttttttttttttttgtttttacaatttacccgcggccattgggcaaaacctcgttgccccagtacggccacactgcacgtatattgaattttgataccatttttagttatgctgcccaaagatttatgttatctcaaaaacgactagaacctaaaaatagctcctctgggctttgaatcccatctcacgaccacatttacgagcccttgatggctaaaccgatccgatctcccagccccatgttacgtagcagcccacccaatgtcacaataactgaaacctcttatcttggttcggatgaaccactggccagggaatttggtctagggcccatggaatgcgtcttcatttttcactttcagagagtctacaggttccgctgccaggatccaactgttgacttacccgcacgcgattcgtttttgcccgcggagcgaaatgaaatgtacagccgcggaggaggcggaaaccaggatatcgggatgctgttggcttgccgaacacggctggaatgatagaagttcagaaagtcaggtcgcgagtgtcgaaaggtgggccaggatatgtaggcttacctgctttaaccgtatgattcgattgaactgcagtttgttgctgcgagggtgttactgctcgttcgacctcgtaaatgcaggcaaaaacgaatggccagcgaaatcgggcggaaaatcttaacaatttaagcacatttttcaccaggtaagccaactaaagcagctcgaaacattacgcagtgccatcgaaacggaagcgttctgtcgttcaacaatattaaaaactgcaaaagcatgtgtgtattttaatttctatgatcgaacggctcaggtggcaactctggttgccgattcgtgtgcgcccgatgtcggttattttgaaaaggcggaaataaaa

SEQ ID NO: 12671 - DNA, 5281 bp, DROSOPHILA
tgggacagatggcgattggctattaacagcgaatatgcatacaagttgcaaagcaactgctacctgctagctattttctgattaccatgcttttgcagctttaaaatccttatatagcatccaaaactaaatccaacttaacctttttcaggtaataacaaacccaaagtaaccgtaaatatttaaaactaattcgcaatctgtgcatttaaataccaaatgttggtatattatcagaaccgagaaacacgaacaatgagagcaaggaaacgcgcgaaacaataactttaattcaaaaacttaacaatttctgcgattttgattaagagaaaagtgattgatgaatatacggatataaagcacaaatcgcgcgatcgagaacataacaaattgccaaatagttttgtgaaaagggggaatacaaaaaaatactaacgccggtgtggagtgtaaaatgccaaaaacttttgtgcgcctcaacgtacaaacattgtaaagacaagaatataacttcgatttccgctggttaaaaaagaaatcaaaaatccatagctctaagcataaacggctcaaaatgctgccattgtcgatggccagtgcggaggccaagcagctccagcgcaatatatcattgtccatgtcgccagcgaatggaggagtcatctcaccatctaccgcgaattgcaatggtgttgcctctgcctccggcggaaatccaaatcccaacagcctcctcacactagctccgcgcaaggaggagctacgcttcctgcccctggcgcccatgggcggcaacaagacctgcaacatcaccatcagcaatgtccagccaatgaaatccaaactaaagtcggtcaacatagtgccaaattccataaagtccgctggagctggcgccactgtcggatcagcagatgctcccctgttccagctggtgccatcgcccagtaatcccagccaaccgttggtggccattctggcccccaatcgcaagaccacgctgcttggcggaggtgcatccaatggccaaccggtggtcatacgctccggaacacctttgcacaagaacagcctgaccgttgagaccagcaacaagcccatccagccaggaggatcggctgcagcagccgccgttggaggcggaactggaggagcacctttaacgctcgtgggcaaaacggtcgttccaccgaaaatacaagcggcgacacctgtccagattcccagcacgggtccgggtgcgcaggtatccctgctggccaatcccctcaagccacgtgctccactcatactcagcaaggtggcggtggataagctgcgtctaaagttcagccaggtcaagagcaacccaaatgcactcgttctcggcaaggccaatcatgtgaagaaacttctgacatcgccgaaccccagtggagaggataagaccaggagcacccagaaaaacaacaaacagaatactagtgccagccaactgaagccagttgtggcacccaaaacggctatgcccattgccacggaggtgccgaccgccgataacaacaaaatgagcctaattaagtccaagcccgtggccatcaaggcagtgccgctgcccagccaggaagcgcccattgtgccggcagtggcgccagttgttacatctccagagaaggtcgacgttaagcccactgcaaagccctcaatcaagacagcacccaaaccaactcctaaacctctggagatgtccgtaaatggaccagccaaggagaaaaaggcgcctgccaaggagcagaaacagaagacaatggacaaaccaccggtggtcaaggaaatcgctcaacatacgccatgtgggcccaaggaattgcccaaactaaagcggtcgaaatccttcgtgtccaaccatcccgcttcgcctgtggccaacaacgagcgacgtcactcggtggccattatggccaaggaggtggatgtgatcgagcagcccagtgcggcaatcgagaccatcaccattgaagacgatgatgagagcgaggaagagcagcagaagccggaaattaagaagacgccgaagcagaatcagaagccggaaaagcaggaggcgccgaagaagaagcagatccccatgcccattctgcccgcaggaataaccatttccaccaccagtacggccaagaaaaaggccgtgagaaagaactcctccgtgacgacaatctcttctagttccagcgacagttcgtcctacagcgatgtggaggtggtaccgaccaagaaaaccgagaaggaactcagtatgctgcctggcataagcatcatcaaggcggaatctctgccactgagcagggaggactttgaacgctcgttgcgttgcgatgagcaggtgccccaaactccgcccaagtcatcctcctcatcctcgagcggctctcacgcatcggaaatgtcgccgccgcccaaactcgccgatccgaagccatcaagtccacctgcaaagaatgccaagaaagccaacgaccatgatgcgaacccatctcctagcagcaagaccaatgactttaaaaagagcatgatgcagaacctgaacatgttgaaatggcgcggccagcagccggccaacctgcagaactccaccgtccggttcgagctgaatgagttcaattttctgcagataaacgaacgctgccagccacgccagggtccagctgcatatttcgagcggcctttgtatgatcgtccgggccgcaggccctcggcctgcgtccatccgctgctgtacttgtgccagcgttgcaatttccacggacccgccgccgactttctggcaccacatttctgctccgttggctgtgtgcgtcgatcccagaagcgtcgtctgccgcagagtacgcagaaggagagcaagataagccgtacccaactagagcaaacagctggaacagcgccagatttgccacaaaagcggcaaaccaactacaaaccacacaaatctctgtctgccatacaggaacagctgcagcaacgtcaaaaggataagcccagaaagccattccgctggagcgagtacctcaagtcaaagggaaaggatgtggcagcgcccatccacctgttcctcaatccgttccccatcagtcccaactgcttcgagatcggcatgaagctagaggccatcgatccggagaactgctcgctcttctgtgtctgcagcattgtcgaggtgcgcggctatcggctgaagcttagcttcgatggctactcctccatgtacgacttctgggtgaacgccgactcgcaggacatctttccgccaggctggtgcgatgagacagcacgcgttctgcaggcgcctaaggactacaactcggagcgcttcagttggagccgctatttggtgaaaacgggcggcaaggcagctccgcgggcgctctttggtcatctgaatatgcagcagcagatggatgtgcgcaacggcttcgctgtgggcatgcatctcgaggcggaggacctgaacgatacgggaaagatttgtgtggccacagtgacggatattctggacgagcgcattcgagtccacttcgacggctgggatgactgctacgacctgtgggtacacatcacctcaccgtacatccatccctgcggttggcacgagggacgccagcagttgatcgttccgccggactaccagaagtctgccttcatttgggatgactacatatcagaggttggtggaatggccgcctccaaggagctgttcacaccacgccagccaatggagtaccaggaacgcatgaaactggaggtggtggaccagcgtaatccctgcctaattcgtccggccaccgtggtgacgcggaagggttaccgggttcagctgcacctggactgctggcccacggagtactacttctggctggaggacgacagtcccgatctgcaccccatcggctggtgcgaggccacctcgcacgaactggaaaccccgcctggctatcttcagcccaagtccgtgatgccttgcgatgtggagggatgtcggggatttggcaacgccaagcgcttcaacctcaacgtgcatgctttgcgggaatgctgtccgtatgcgccggaaaattggcgtcagtggcgctccaaaacggtgaaaccgccgcgtgtggcccccgagaatatcagacgtggatgggcgaagaaaacaaagcgtgcctgttcggaggccaagcaagccattaaggaggactcccaacaagagattgtctacccgaaggtcgcggaagtggtgcaagccaagcgaaagacgtctccttgtgaggagaaggttgtgaaaaagcagaaacagatgcagaaggaggaggatgcggagcaggtgccggatgaacgctccctggccatagccaggtcctttgtgaaggactatggaccacagttcctgccaaactatcgcctctggcagctcaacagcgccttcaaattggacgacgtgcgaaccaatccactccactggaccagctgggatgtgtgcgagtacatagagcgtgccctggattccactgacattgccaaggtgatcttcgagcaggacatcgacggcagggcgttgctgatgctggggcgcaaggagttggatacgtacctgaaactcaaggtgggcccggccgtgaagctctactccctgattctgaatctgcgcatcgcggtcgtctgcaagtttgattcaaaaaacatcgaactggagagcaatactgctggtccgattcagagggagatggatacacctgtttctgcgataaaacagctgccggagcagtcccaaaccaacggctacaagacggatcacgaccaggagctgtccgagagcggggacgacgatgacgacgaggatgtgatgctcgacagcgatgactttctcagcgttaagccgagctgcctggtcattgacgaggacgccgatggggatggcgattgtgaatccgacggcgatgtggcgatggtgccgatggaagtgcgcacgcccttgcgcacgtcctcttaggactccggataccaggcatccgcttccgttgattgatttataagattattttgttgcaccggcctcggcccattcgggtattatgtttataggtagtatttattctttaagccgatatgaattcgattttgtttgtttttcgatccctaatccaataaatgatccctctagatatgtacaccatcctgtctatttccttgggtggtaagcaaacctatctattcctccggcgaaggtttttcttcttcgggcacaactatggtgccatccact

SEQ ID NO: 12672 - protein, 1477 aa, DROSOPHILA
MLPLSMASAEAKQLQRNISLSMSPANGGVISPSTANCNGVASASGGNPNPNSLLTLAPRKEELRFLPLAPMGGNKTCNITISNVQPMKSKLKSVNIVPNSIKSAGAGATVGSADAPLFQLVPSPSNPSQPLVAILAPNRKTTLLGGGASNGQPVVIRSGTPLHKNSLTVETSNKPIQPGGSAAAAAVGGGTGGAPLTLVGKTVVPPKIQAATPVQIPSTGPGAQVSLLANPLKPRAPLILSKVAVDKLRLKFSQVKSNPNALVLGKANHVKKLLTSPNPSGEDKTRSTQKNNKQNTSASQLKPVVAPKTAMPIATEVPTADNNKMSLIKSKPVAIKAVPLPSQEAPIVPAVAPVVTSPEKVDVKPTAKPSIKTAPKPTPKPLEMSVNGPAKEKKAPAKEQKQKTMDKPPVVKEIAQHTPCGPKELPKLKRSKSFVSNHPASPVANNERRHSVAIMAKEVDVIEQPSAAIETITIEDDDESEEEQQKPEIKKTPKQNQKPEKQEAPKKKQIPMPILPAGITISTTSTAKKKAVRKNSSVTTISSSSSDSSSYSDVEVVPTKKTEKELSMLPGISIIKAESLPLSREDFERSLRCDEQVPQTPPKSSSSSSSGSHASEMSPPPKLADPKPSSPPAKNAKKANDHDANPSPSSKTNDFKKSMMQNLNMLKWRGQQPANLQNSTVRFELNEFNFLQINERCQPRQGPAAYFERPLYDRPGRRPSACVHPLLYLCQRCNFHGPAADFLAPHFCSVGCVRRSQKRRLPQSTQKESKISRTQLEQTAGTAPDLPQKRQTNYKPHKSLSAIQEQLQQRQKDKPRKPFRWSEYLKSKGKDVAAPIHLFLNPFPISPNCFEIGMKLEAIDPENCSLFCVCSIVEVRGYRLKLSFDGYSSMYDFWVNADSQDIFPPGWCDETARVLQAPKDYNSERFSWSRYLVKTGGKAAPRALFGHLNMQQQMDVRNGFAVGMHLEAEDLNDTGKICVATVTDILDERIRVHFDGWDDCYDLWVHITSPYIHPCGWHEGRQQLIVPPDYQKSAFIWDDYISEVGGMAASKELFTPRQPMEYQERMKLEVVDQRNPCLIRPATVVTRKGYRVQLHLDCWPTEYYFWLEDDSPDLHPIGWCEATSHELETPPGYLQPKSVMPCDVEGCRGFGNAKRFNLNVHALRECCPYAPENWRQWRSKTVKPPRVAPENIRRGWAKKTKRACSEAKQAIKEDSQQEIVYPKVAEVVQAKRKTSPCEEKVVKKQKQMQKEEDAEQVPDERSLAIARSFVKDYGPQFLPNYRLWQLNSAFKLDDVRTNPLHWTSWDVCEYIERALDSTDIAKVIFEQDIDGRALLMLGRKELDTYLKLKVGPAVKLYSLILNLRIAVVCKFDSKNIELESNTAGPIQREMDTPVSAIKQLPEQSQTNGYKTDHDQELSESGDDDDDEDVMLDSDDFLSVKPSCLVIDEDADGDGDCESDGDVAMVPMEVRTPLRTSS

SEQ ID NO: 12673 - DNA, 19531 bp, DROSOPHILA
gctctagggggcgaggtctggtttgtttgtggctcgaggggctcgaacccagcaatcagagaagaacacccagaagtggacgatcgggccccaaaggaaacgatctatggcaaatgcttggatccctatgtaaagtgtattttatagttaatactgagattctgctagttagacgtctcaggtgtgtcgctgatccccagtccccagacccatatttgtaacctatctagtatctatgtattttatgtatttcatgtattttaatattgaagttggtggacacacaagctaaactattgtttaggcagcccttcgaacagaatagaaagtaactttggtttgtgttctatattgtggtttttgtgttttttcctcagggagagatggcagatggtctaaactttacacagacagaataaattaattcacgctaacaaaatacacattcgcctaatgttttctataaataaacctaaataaattttggtcttaataatttaaacgttgcacgcattaaaagcacatttcgaatgttcaaaccatatgacataattgttctactcctaattgcttgacgaccatcttttcaattagctagtttttgaagtatgacaaaacgtgattgaacccttcagcatcggcatctctccctccctgttgcataagtacctttctccaagcccttctctgctttcattcccactctcccacttctctcccactttctttccggctaagtaacactgcccccgttcaagccaagctttgtacaagtggtgaccccgatcctggccaaactaaaaataagttgtactgtgttctctgtatttgcctactactctctgtcgactatttcatcaaatggaattcacttgccatgctgcggggcgagaaggctcctgcccagcctgatcctgctcaaacccacaccgatgcccagaccaacggccccactacttccgttacccatcgcagccgtccacttcttggggcgccactgtcacttgggctgtatccgcgccgagcgttccagctcgttgaattgcccatagtacaacacctcgctgattagcttctccgcaatgattcgttgcgtgcgatccatggtccgcagtttgagggacacattcgatccaataaaatcgcaatcatctcgattcagggactcggcataaaaggcagacgctgcaacggccgcctgggcggaaacgctgctcttgatgtgacccggactggcggccgattcggtggcctcatcgttatccggatcgggttcctcgccatccgacatgctctccctggagcccagcagcgaattcattagcatatgacccgcactgccggcgccggtcagttttcgcatatttaagggcatggcgggtgtgctggcatcactgcctctgggtggcaggatgaaagcaccgaaattggccttcgcctgggcgactctcaggtcctgggccatgtccaccaattggagccgactctcctcgcccgctgagctataggaacgatgcgattcgggtggtggcggtggtgcaggaccaacaacaccaccaccaccaccaccaccaccgccagccgcctgaccatggaaatagtccaccaactcctgcttgatgtccaattcctcgtggccgtgatgcagctgctgctgttgctgatgctgttgcagttgttgctgctgcaactgctgatgctgctgctgcagttgttgctgctgctgttgcaggtggtgttgcgtgtgcggatggtgatgcagctgctcatgcgcctgccgcggcgtgactgaccttccgccggcgggactgtttagcaggtgattcttgtgcgcctcgtgcatattggtattcggtatgggactgctgccagcttcgcttagagtgcggtcgggcttgatgggatcgctggttggatcattggcttccctactgctcgaaccaccgccaccgccaggacctgcgcccgccggcgatcgcagctcgaccttggcagccagttgtcccagtgccgctgccgccgccacatcctccttggtattgttattatcctcattgtccgaggtgtccatggtcttcaggggactctgctggaaatcactactgctgcttccaccaccagctccgccatgatagctcatcggcagcggtactcgcagttgctgtggcggcactccgccgcctccagcacttcctcctcgctcggatccaccgccgccggatcccgatatcggtggcgagtactgacccgccgtattccaactgtccagcgtctggctgctcgctatcaacatgggtatgttcaggcccatctggaagtagagaaacggaacgagtacgcggagattagagatagtgcatttgcagtcgggtggggtgttcaaaggttcctcacttcgtcatcgtgacgcagtccaaaacattgaacgatcaagataaccaacacagggacactggctacttgagaactataatgcggagctcataaagtaattaagtacgaaattgtttaattaagagctttgctcccgataaaaagggaatccggtttcaaaatcgaatcaaatatacacaatatttttaaaatatatatatttatcttcaatttcgtaaattttaagaaaatttagtggaacataattgtgattctgccataattgtgattctaacaaattgtcgagatagcagaaaaattcgatttttaaaactaaagcgtaacgatgattgttaagtgaaatcattatggctaagcaatatttatggtctcttactatatttttgcccaatcatcatggataggcgcattgatgtttgataggaaaattactgacttaaagaggccttcgagtttctttttaatattttagttcttttgtacatgtaagttattgccctgcaattgattctctaacatcttgtggttccacatagtctccgctgccatcaacgccaacgaacggttaagcgcgacatcgacacttctgcgctgcgccgcggccgacgcctgctgcgccgctgccgacgacttcacttgattgctagggacttagggaaacattttgtacgctagatttagtttcaaatgataaattgcaataaacggtcgcttgcgatcttcaaaatcaaatcgataactgtaattattaactggcgcccgaacagggaccagcgaataaacgcgaacgaaagacaaaattctaagtcgcggagcaaaatcaaaattttgctaaaaaatattcgttggttaaattgtgccgaagaaactcccgcgagttattaacaaacaaaattcacggtcggctataaaataaaattgtttgagaaaaaaacagattttccggaagaggaaaatacttatcggcatagcattgcccattggtggatcacagtttctgtcaggccagcccgcagaaaaccttctttggagtgctgacgtggattccccagtagcccaggcaaaaaggacaacattcacccagccaggaggagtgaccgcaacaattctatgttaaataaatgcaaaacgaagaacagcaatttcatcgaaaaggagaaggaaaagtagaagtagaacgccgagaataacggaactacagaagagcaacacggataacagttaacagtgcaacccaaaacgtaacggcagaggtaaagacgacgaacggcagagaacggctgcgtgaaccaaagtgcagacaagaaggaaaaaaaaagaacaacaacagcacagccgtagcagcagcagcagcccgccaaaaagaacaggaataagaacacgttgacgacgaagaagctgaagctgaaacaaccgaagaggaggcagagagactacaagaacctggaaagtacactggaaaaaacatcagcaatttgaaattcaggcatccacccataataaaacataagtatcccaaaaaaaaaaaaaaaaaaaaaaattttaagtatattattattattatattattattataatattattattattattatatttttattattatattattaggattatattattattattatattattattattatattattattattacattattattattatattattattattattttattattattattgatattattattaatactatattttcaacccagttcctagagatcttctgaaaggaaaattttcctatttactgttcctttctggtacactgttctcaaagcaaaataaccgcggtgagctaaaatttattgcatgcaaaaataaaaaaaaaaaaatataaaaataaaaaataaaaaaacaaaaacaaaagataaataagcaaacacatacacacgcattccatattttctgcccacaacttttgttaagttcaaattggtttaggcttgttttgtgcaggtgttgtccgaattaaaaatcagtatggcaaatcctaataatataataagaccatcagcttttagttcaaacgaaagaccggtgccctcagaaagacacgacctgcctgaacagcatcgcgtagacatgagtgtcgaacagttgacagcattaattggccaaacggtggcccaagttttacctggattgataaaacaaatgaacaacaatactcttgactttactgacgtgagcgaccaggtcggcgagcccgaatacagaaataatttagcggactttgacagggtgcctgatatcgtaaaatcgatcagggaattctctggaaatccagcagaattcgggtcttggaaaaagagcgttgatagaatcatggagacttataccccatttgtgggtactccaaaatattatggtatacttcataccataagaaataaaattgttggaagtgctgatgtggcactcgagtcctacagcattccgctggactggaaggccatgtcgagatgtctcactctgcattacgcagataaacgggacataactaccttggaataccaaatgtcaactttggttcaaggccaccagcagtcggtggaagacttccaccaagacgtctacaaaaatctgtcgcttattctaaataaagtcggctgcatgcaaatgagccgagaatccgagcactttgttacaaaaatgtacagagaaaaagctctggatacttttatcagaggccttcgaggagatttacctcgccttttggcaataaaagagccagctgatctcccctcagctttacattattgccttaaacttgaaaatcaaactttcaggtcaaaccatgcggcgaataagggtcaacagtcgagtttcagaggaaacgaaaaacccattccggcaccccgcaattttcagccgtcgaatgcctttggccatcgacagcctccaccggtccctccacgacatcccatgaggagacctccacaatatttaggccagccattcccggcgccaaggcaacacgtgtctaacttcggtaatgcaccgttcattccaccccgacaaaactatcaacagcaatggcaacaatacaatgccccaccccgtccctttgcgaccaaaccacaaccaagaccagaaccaatgggacgtggacggcagtgtacagacgcgaaacattaattatatgaatagaccacactcggacataaacaaacgacaaaagaactacaacatccaaacagtgaacatgagacagccaagtattgaagtaactgggtccagttcaagcatgacaggctatcaacggtcgatgcaagattatgaaacccagaacaatataaacggcacactaaatgaatactgtgatggacaaatagacaatttggacagcgaacaacgagaccacgtgttgcattttttagagtagaagactcctcactaccatacttcgaatgtagagtggggagtggaaaggttttaagggtgttgattgacacaggctctaataaaaattacatccagcccaatttggtgacgaacgcgataccaaataacaagccttacatagctgatactccaggcggtgatgtaaaaatatcgcattacaaaagagcaagccttttcgatttcgaaataaaattttttttgttaccaacgctgaagacttttgacgccatacttggcaaagacacaatgaagggaatgggagcgcaaattgatttgaagaacctaaccatgacactggaaaacgggaaaagagttgttctcaaagaaaaacagttcgaggctgttagcacaattagtccgagaataaaacacttagaggtggaacagagaatgatattgaataaaataattgattcgtattcaggtctcttcgcagacccgaatcaaaaactaacctacacaacaagtgtaagggcagcaatccgaactatatcggatacgccaaatatactcaaaattctatcagtacccaatgtctcttaaagacgaggtacacaaacaaatttccgaacttttacacggatggaatcattcgaccctcaaggtcaccttacaattcaccagtgtggattgtaccaaaaaaactcgactcctctggcaagaaaaaatacaggggtgggtaattgactatcgaaaacttaacatggtaacgggtagcggacagataccctatccctgacattaatggaagtgttggcccaattgggagacaacaagattttctcagtgctcgatctgaaaagtgggtttcatcagattcttttaaaggaatctgatatcgaaaagaccgccttctccatcaataatggaaaatatgagtttacaccgactcccattcggtctgaaaaatgcaccgtcaattttccagcgcgcactggacgatattcttcacgaacatatcgggtaagatatgtttcatttatattgacgacatcatcatcttttagtaaagatgatgaaacacattaccagaaccttgacactattttcagaactcttcagcaagccaacatgaaatgtcagttggataaatgcgagttcatgaagagaaaagtgggagttcctaggcttcgtcgtgtccgacaagggcattgaaaccagcccaaccaaggtacaggcaatctcagactttccaattccaaggacactcaaagaactgagatcattcttgggattattccggatattacaggcgatttattcctaactacgctaagttagcaaaaccacttagctcgcttttgagaggggaggatggtcgaatttccaggacattatcgtcaaaaaaatccggctcccttaatcgcgaagcaatagaagccttcaagaaattgaagagcagcttggtttctccagacgtaatactccactacccggactttaagaaagaatttcacctaacaacgggatgcttccaatttcgcagtaggtgctgttctttcacaagagaacagacccatctcatttttatcgagaacactctcgaaggcggaagaaaattatgccacgaatgagaaggaaatgttagccattatctgggctctaaaaaagctaaaaatttacctttacggtaaagcaaaggtgaaaatctttactgaccatcagcctttgacccattctctcagtagttggaatggaaatgcgaggattaagagatggaaagcataccttgaggaatatgactaccaaattttctacaagccaggcagagaaaatactgtagccgacgctctgtccagaggaccgacagtcgaacaaattaacacagtagcctcaacaatgcacagctctgacagcccgagccatgggctgataccctagcgttgaagccccgataaacgcattcaagaatcaaattttcttcagggagtccgagtcagagaactactcatttagcattccattcccgacatttcaaaggcatttagtagatcgcaacttgttcacacccgatagtctcttgtcagatttgaaagaatatcttaacccatccgtgattaatggaattttcacatccgaggatgtaatggggaaaattcaaattctctaccccatccattttcagggtttcaagattagattctgccaaagcaaagtcaaagacctttgttaacgaagccgaacaagaggaagaaatacttaggacacataacagagcacacagaaatgctgtggaaaataaagctcagttgtccgaaagagtatactttcctaaaatgaggaaaaaagtttcggctatcgtgaatcagtgtttggtgtgtaagactgctaaatatgacagacatcccacgcatccagaaataagacaaactcccttgccagaataccccggacaaattattcatattgacattctactcgacagaacgacctctggtgctcacggcgattgataaattttccaaactggccatgggaagagttatcaaatccaaagctgtagaagacattaggaaagccctaagagatattcgtgttttattatggagtgcctaaattaatagtaatggacaatgaaaagtccctcaactcagcctctatcaaattcatgttgacagaccagctgggtattgagctctacaaagcacctccgtataagagtacagtaaatggacagatagaaagatttcactccacactctctgaaataatgagatgtttgaaaggagatggaacacataggggcttcgaggaacttctcgatagggccatctatgaatataactacactgtccatttctgtcacaaaaaaaacgacctctagaggtgttcttcggcaggatagctaccgtagctccagaaaaatatgaacaagctagactggacaatatagaccgacttaggcaaaaacaggaaaccgacatagaataccacaaccggacaagaaagcccataaaaacctatatcaaagggcaagaaattttcgttagggttaatacaagattaggttctaagttatcaagtagatttaggaaggaactagttaaggaagaccgaagtaccacaatattaacagaatcagggaaattagtacataaaagtaacataagatcatgattgcttcagaataattactggggccacatcgatagacaagtagaacatagaaacattaaacatactggttaacgtaaccaccgagaattaaatttgaaacgattcgactttgacagacgagttggccataggtttgcagaattagattgggctcgtgaaagaagagattgctgttgtgaatgctgtttctgcggagcgagtttaaattgaatgagaccagtagcctacttgaaaacaatataccgatttctggcttgacggtcaaataaatgttaaaactttcacacgttctcgctttacacaacggaactacaatttgaatgccattgaaatctccatattgaatcagttaattccttatttcttatattttaaaacatgatcagtaaaggaaactaataataataaataaataataatttaatttgaataataataaaatttaccaattaaagacgaaatgtacggaatcaatgccttctgcaaaggttccaatggtctaaaaatatgtagatataaattcattagtaatttagtaaaaaccagaaattttaatagaagcaatcaagttgtcaatgcagaacacatccgagttgcacaaacctggaacgcacgcaacaataaacacctggcattcaaaccattaatgctgtgcccaaactaccacgaatcaccccaccaacgatgcgactcaaaaacatcccatccttatgatgaccgctcgaggacaagcgtcaattaagaggggaggagttattgccctgcaattgattctctaacatcttgtggttccacatagtctccgctgccatcaacgccaacgaacggttaagcgcgacatcgacacttctgcgctgcgccgcggccgacgcctgctgcgccgctgccgacgacttcacttgattgctagggacttagggaaacattttgtacgctagatttagtttcaaatgataaattgcaataaacggtcgcttgcgatcttcaaaatcaaatcgataactgtaattattaacttgtacaaataaagtattaaagacaattcttaacaatatcttgataagaaccaaatttatatcaaactcgattctactttgttttattaaagaattcgatggaaaacaagagattaacgtctttttcttaacaaattgttgagaacatttcgttttgcatacctgctgcactgtcgcgttaaaagtcgaaagcaatttgcatataataatactaattgatatccccaaaacgaattgaattagaaatttcggattctgttttttttttttctcatcgcattccaatgccggtcaaatcctcggcgaaaagttgtttttgtcattgttctgagtgaattcgaaacataaattaaaaccgaaagagtgcgaagtcgtaccgaattatgataataatggtaaataaataataatttgactgcgctcaaatcgtgtttttgttgcttttacccaatagatgtatgaatgtatatccatatatggacaaacacacgaagcgatcaaaacaaattagcagacacacgcacgcacacagttgaaaaaagcaaaacaacatgaaagaaagttaagagtggcgatgtttgtatgctcttctaggtataaaaataatatttaaccgtaacgaatcatggacattaaataatgttaacgatgttttgtatttgtattatattaaataaaatatttattttatgaacctacatgctaatataagcaccaaataagcctgaacttgttcataatttttgatcgatgttctgaataaatcggtctacccttcgggaagggtatcatcaaaacacgcacacaggtggcaaagtgcgcgaactttccaaacaatcgccttgtgaaagagcccctcagctccccccggcaaatcgaataatgcagaaacttacgtttgaagaatttgtagttgctacggattccggggaaattctgtgtggaattgcaggggatctcagattaatgacattattattattattattattgttttgataatgcatttcggcttttgttttttttttttttttttttgtttgcttgggatcgctatttacacttgttgtagctagacttttttttgtttgctgtgcgcgaaagcgacgacaacgcgactcgaactcgtaatatttttgtccgaaattattctagcggcgtagtaaaaattttcgaagagccgaaacgtgcgagcgcggaagagagtgaacgaccaagagagagagagagtaaaaagctgcggcctgaagagaacgatttaagagaagcgtgcttttttaagcaaagtccgggtgactcattaagagcccgatagaacggcaattaacggtctatttatcgaaaattaaggaaataactaaacaaacgtaacaaattaaatttgttgattcaaaactctacttatttttggatacttttaaaatgcatttggtaatgtaatattcttttttttagctaaaaaaaaaacgcatttctaattgaattattagattcaaagatatgtaaagactgcatcttggttgttcttctttgtagaaacttttgcaaatgtcagcgttatttcacaaagactcttctgacacgcgaaagagagcgcacgaagaattcttcttctagaagaagccaaagagtgggacagaaagatggagagttaaccggagagggtttttaatggtcaggcgcggcattagcattaacctaccccacgtttggggcctcacacgaaaataattcagcaacaactacaataaaaagtttaatgtggtcagcggcgatcaaagcgggctctccctctctttctgcccgctccaccctggctagcgccatccctttctgtctgcgacgatctctttgattttgcctttctgtctgtctgggttgtggcgcctagaactttccatcaaaatgctgcgacaaagcaaatgggcctcaacattttggaaaacccgaataacaatatgctctattttttacgaaattacttttctatcgttatatggtatgtccacatgtatctaaacacatagctgtcaaaagtgtcgatctaagacttccgacattgcctattgaaaattaaaatgtatgattttgtacatatttttctttttccattttcgattttccattattttccgtcaaacgcctacaaatgtcaaaaatcgaatgttgcctattggggcatcccgagaataagagttcaacctgggttgtttatttgttgttgctcccgctgctgtttttaagtttcctcaactacgccgcccaatcccccctttcccatcattccaccgctatcgccatctcttttccgctgcttgttgctattgttgttgcagctgcttttgttgtttacgcattcggagcagagtgtgcgtgcgtgtgtgtgtgagtgagtgcgctgtgtgcgtgtttgcatgtctgtattattattttgttaaggcaaataaaataaaacagacaagagaatgaactcgcccgctctcgctcgcgcatacactcgcgcccgctcgctctttcgctcggattgtgtgtgcaactgaaaaatgtaaacaaactgattatcatccaatccaatgaataaataacacactacacaaactacgcgtcgtcgtcgtcgtcgctgcttctactcctttggcacgaaatccgccccagtcctactgcctccccctcttgcccacaccacacaccacacaccccgcacacctctctcactcatcaccaacgccccccttctccacaccgccccattcacaattgtcgcaagctacctctttccactgctacagtaaagcattccaaactcttttcgctcaacactaacaagatcaatattccgttgccttagtttttatcataaatattaaaacatttctgtggactggagctattatcagtgactttattggattttaaaagctaatattcatttaatctggaaaaaacactattaataaaacaaagatattgaagttactactctgctctttagattaaaaaatattagaggattattgaaaaaatatcttttctgttcggaaataaaaaaaatgtatttatataatatacatatctcaggaaattctatctggcatatttatttgaaaaattcaagttattttaccaaatatattaaggagtatttcgaagaagtttccattaccaaagttatactgtatctatccggctgctcacgccaatgtttttgaagtacgacggcgatattttcgcaaaagcgcatacaccgcaacaacaacaaaaataactgctacactaacattaatgaaactgccatgaaaaccgcaagcgcaagcgccgcaaacaaagcccccaaacccctcgtcttccatcacactaccaccatctaaaatgggggatttacactggaaaggggagtcgtaaaattaacagtggaacaaattgcaattgaaaatgcattgcggtgtgtgtgtgtgtgtaagatggcttcgtcacctggcaggtgccaataccagagttgccaagtgtttcggttaacgggttaatccccattaagctttgctccctagttgctgggaaagttccccactattcccacatatttttgtatttgtattcgaacgtggatttgaacgtcttgtattttctcactaaaacgcaggtgcgatttctagagttgccaaagccaaagaaaataacttaaaagcacttatttccgggaacttcatctgctttttcctattgttcgaactgtctgactgcgcctcaacccgaattgaaactgtttatttttttatctatttacaggtacgatttctagagttgccaggtctttcaaatctttcaatatcataatattgaacatcttttcaaaaactttcaaaaaccttaaactccttttttgtcactattacacaggatcaaattctagagttgtcagggccattaaattttttagcactcctgtgtccaaaacttcaaaattcttgcttaaatttagaatcactactttggcgaattccaagcaaatttcccaccaaaaagccccagatttgccgcccactacaacaaaccctataccctatcatcatcactatcatcattaccatctacatactacacacatatgtatgtacatacatacatacatatgtacatatgcatagaaaaaaaaaccatacgctgcgcgctcggctctaaacaactttgcaatgaatgagtaaacaaaaacaaacgctgacttcgctgccggcgtcgcagttgctgcatatttgccttgcacttttcattccaccaccgcgggggcgggtagtgggtagtgggtggtttataggcaatgcgagggaaaacaaaacaacgcgaattacaacaacagcttgatactcggctactgctacaacaacagtaggaaaacacaaacaagagaaaactacactcgaaaacacattgccgagaaacgagtcaagttcaagctgtcgtggacgtgcaaaacataaattaacttcaaaatcgaggtcgattcaaacataaaaccgttaagaagtctcaaaatcaaagcaatatttcgaattttaacagtgatttagtgaagaatcatacttattatatatatttttttatctattgtatattggggatgcacatgcctaatgacaacaatttacacactacagatcgatctgtgtttaagacttacatttaatttaattattgatgacaaggactttagtttagatatttacaacaactttcaattaatttaatatcttaatgaagaacacagtttacgtgatatctcaagggaagagttcatatttaaactataaaggtgatgtaaacaaaggtaaattactaaggtacttaaaatcaattttaaattaaaaaactcaacttaacctgtaaataatgaagtatcaactttacttcgtacctaaactaaagaaaacgcgttttgccaatatctccaataaataggctactttcaagctaataactttttatttttttgcaggtgtttcaatttgggtgctgcaaattgtgggtggtaaatgtgagacggtgcgtgagtcgtttgctagccacaacattgcgggacaacaaccgaaacaacaataataacaaaaacaccagctcctcttcggcttcatcatcttgtttttgtttttactgttcacttgtcttgaggaaaataccgcagagcaaaacaattgcaaaatatgaacaaaaatacataacaataagtgggaggtgggcggtgggcgtgggtggtggtggagcggggtgctctgttcgtaggtgggcgttctgaaaagggggcgtgggcgtcgttgttagtgctgcctgcacacgcaaataataatgacgcagaaatagaaaaacaacacgagaccaaagccaaaccaaaacataaaaaacggagcaacggtagaagaagaagaaaaagttttttaaaaaaatgccataggaagtggattaaatgggagcacgtccagtgtgaaccgattttatcctgtccaaagtgagatacaaaaaaaatcacaacaaaaaaacagacattaaacgaattagctcatggataactacgccctttcaaagagcaagaaacaaaacaaaatatactatatatttgaaaataatgcatcatataagaaataatacaattttatattttatctattataaataaaaaatgatgcaataacttaacattcttagcaggtttaaaacaagcttatgtgtacatacataaataatatgtacgtacataaaacataataaaatttattttcatttcatttaagaacaaattatttgcaaattagaatattatagcttaaaaaaatagttcttttaagaatattttaaggaatttttttattttactttttaaacagctctattttgatgaccgtaagtgccgaaatttgtattgagaccgcaaaaccagaaaaccaaaggtgacacgacttggacaaacaagttgcatgcatttagacaagccacgcccccgatcgccccatgccttccgcccccctccccctcccgccctactcaatccgcagtacgaggaaaagtaaaaacaaaaagctgagaaaaagtccaggcgccaagttttatattctttggcttgcaaaaatttcatttgttttccagaaacggcagcaaaaaacaagcgaaaacagccagaagagagtcaaagtcggcgaacagcaacggcagcagccagcaacaactcctggcattttgttttgataagtctgacaaacaacagagccaagtaaaaacaaaagcttccagcgaatcacggcgcaaaggggtgggaggggggtttgtggaaacttggggttggttggggcataaggtggtgtccactgggtaaccacaaaacaaaacgtcactacagcaacagcaaaacaaagagccagttcgtagcggagtttcgagacccgaagttgccagttagtatgaatcattaattggttaaaagtcaatagctacggtggttttttgttaattaatttaaatacaccacttgaaaataattaaagaaagtattatttgagcaaactagtttggcattattcttttcaagttagctagcaaaatgggctgctccagcacatttctaatttctagttttcagttactatcttaattaagtctaagtgttattaaagttaaatatgtatgttcatttggtgtagaatgcaatggaaaacttttttaacaggtagtgcctataaaatggatatgcatattgataaccccacaggtaatctcaaccttacagttaggggactcaaaataacaaacagaagaaaatgaaactggtgaaaaaatcaccatagcaagtgctgctgctcctctgctggcgtcgcagtcgccaacacatttcgctgtgcaaaacaaacatttcatcattcagagaaacagaaacaacaacaacaataacagcaaaaacaggcgaaggagaagacgaagaagagttcggcgacgaaatgtcagggccccccagccacaagacacccccttcctcatcctcgcacactttttgcttgcctggcgcgacaacgcatataaaagcaacaaaaataccaacaacaagcaggcagacagtgcgagagggaggggaagatttgctgatggagagggaggaggcgcgggagagagctggggccaatgcctcgcacacacaccactgcgcatttctaagaaaaatttatgcgtaaaattttaattctgttttgatcgtcaacaacaacaaaaaaaagagcacaaacaagccgagcacactaacactaccgccaataagagagcgccagagagtggggccagtgcagaaatagcaagtcacttgcgcacatgtttgcctgagcgctagcgccaaagagagtgcagaccgtggtcgctctcttacgccgactctccatcttatttcacagttaactcgaagccgttgttttgattgaaattaacactagaaattcatgtttgcttttaaaatattcaattgaagtgataagcttccgaaaatataaaatgaaatgtgtaaaataaatattggttgctaagccgaaaaattggtcacacgtcacacgtgtgtgctcctctaatgctgaaaactttttctattgaagttgattgtgataagagttctaaggaatataatgaaatacggatatttcgaatgaaatgtccaacgatttcgcaaaaaaaggcgacttcccttggtttccatgtgattttacaaatagcacttttcagttttgtagaagtaaaattttttcactggaaaacaataaaaaaaaaaaacgtggaaaatgtttgcttaataccgtttgtgtgtgtttttaaattttaacctccttgggttaagatctgttttaattctggttaatttttcacattgtggactttggttttcgtaaataatacacacgaatgtgtgtgtaaatacgataagaacggcactctactcaatgaaataaaaatctttaacaaattattggggcacactcaaaaaagattttctacaattgatcacccttgagtaattggatgagtattaaaatttttcaacataatacatatgtacatgtaaaaaacagtaactattgagaaaactgatcatctataagtcgaaccatttttataaacagtataaaaatcccattgatttgtctttaatcaaaataaattgataattatatataaccaacattttgtttaattcctattggggattttttcgaaccttttgtgcttgacgtgcgtcatttgttttctcatgcaccgatggaagttaatggaatttgtttaaactagaatattcgcttaccgctccgaaatatttcagctctttggtcttgatgcgtctgtgctgcatgacggtctgtgagccaggtgctccgccacctggtacagtgggtggtgctcctccgttgcccgccgccgcaatcgtaccgctttcgtaggccgctgccgcggcagccagtccgtttagcccgttgtgggcggcagcggcagcggatgaggaaacgggattcggcaccaggtttccgctggcggcattaacaccggatcccacggacccaccgccgctcaggctgccgccgcccgcctccatgaaatcgaatcgcttgaaggcataccatttggacggattgggctgtatgccctggtatatcttcacgaacatcttgtgcttctcccggcgatactgtgtgagcagtacgttcatcttccgctccacttccgccttgctacaaccgaaacgctcggctatttccgaccatgcccggaatcgacatagtttatccttgtacttgggatcggcacgattccatagctctgtatggcagcgatactgctcaatcagctccagagcatcgtcgttggtccactccatgatcttgggcgatgtatcgccaccgccactgccacccactggtaaacttccgcctcctccgccgacaggcagtgggatcagctgttgttgctgtccttgtggttgggtgatgctgctctggtgatggcttaaatacggatgatgatggtgatggtggtgaagatgggtcggtctgatgtgcggctgctgctgcggcggctaccacgctggccggattggagttcatttgccacgcctctcaaccgatcgttggatggttgattgccttatatatgtatatgtttatatatatatatatatatgtacagatctgtgcagccgagctcgacacttgagctttacttctgctttctggcgatttgcgaagctgactctcagggaatgtcacgcgaaatgcactcaatcaacatcgtcttcttgggtcctgtcgactgggtctcattatctttcatttagcactgtgttcactatctttcattaactgaaaacacagagaaaataaaagacaaaattggtcattcaaacgatccgaaatagttgtttaaaatagtttcctactcttgagccacttttcacacattacttaaataatcctcaattcgaaagcggcgaaaacaagtttagttcggcatatatcgttttgtttacgttatcgccgggtttttcccgcacgtcaaaca

SEQ ID NO: 12674 - DNA, 1561 bp, DROSOPHILA
cgtgggatccggtgttaatgccgccagcggaaacctggtgccgaatcccgtttcctcatccgctgccgctgccgcccacaacgggctaaacggactggctgccgcggcagcggcctacgaaagcggtacgattgcggcggcgggcaacggaggagcaccacccactgtaccaggtggcggagcacctggctcacagaccgtcatgcagcacagacgcatcaagaccaaagagctgaaatatttcggagcgatgggcctgaacatacccatgttgatagcgagcagccagacgctggacagttggaatacggcgggtcagtactcgccaccgatatcgggatccggcggcggtggatccgagcgaggaggaagtgctggaggcggcggagtgccgccacagcaactgcgagtaccgctgccgatgagctatcatggcggagctggtggtggaagcagcagtagtgatttccagcagagtcccctgaagaccatggacacctcggacaatgaggataataacaataccaaggaggatgtggcggcggcagcggcactgggacaactggctgccaaggtcgagctgcgatcgccggcgggcgcaggtcctggcggtggcggtggttcgagcagtagggaagccaatgatccaaccagcgatcccatcaagcccgaccgcactctaagcgaagctggcagcagtcccataccgaataccaatatgcacgaggcgcacaagaatcacctgctaaacagtcccgccggcggaaggtcagtcacgccgcggcaggcgcatgagcagctgcatcaccatccgcacacgcaacaccacctgcaacagcagcagcaacaactgcagcagcagcatcagcagttgcagcagcaacaactgcaacagcatcagcaacagcagcagctgcatcacggccacgaggaattggacatcaagcaggagttggtggactatttccatggtcaggcggctggcggtggtggtggtggtggtggtggtgttgttggtcctgcaccaccgccaccacccgaatcgcatcgttcctatagctcagcgggcgaggagagtcggctccaattggtggacatggcccaggacctgagagtcgcccaggcgaaggccaatttcggtgctttcatcctgccacccagaggcagtgatgccagcacacccgccatgcccttaaatatgcgaaaactgaccggcgccggcagtgcgggtcatatgctaatgaattcgctgctgggctccagggagagcatgtcggatggcgaggaacccgatccggataacgatgaggccaccgaatcggccgccagtccgggtcacatcaagagcagcgtttccgcccaggcggccgttgcagcgtctgccttttatgccgagtccctgaatcgagatgattgcgattttattggatcgaatgtgtccctcaaactgcggaccatggatcgcacgcaacgaatcattgcggagaagctaatcagcgaggtgttgtactatgggcaattcaacgagctggaacgctcggcgcggatacagcccaagtga

SEQ ID NO: 12675 - protein, 452 aa, DROSOPHILA
MQHRRIKTKELKYFGAMGLNIPMLIASSQTLDSWNTAGQYSPPISGSGGGGSERGGSAGGGGVPPQQLRVPLPMSYHGGAGGGSSSSDFQQSPLKTMDTSDNEDNNNTKEDVAAAAALGQLAAKVELRSPAGAGPGGGGGSSSREANDPTSDPIKPDRTLSEAGSSPIPNTNMHEAHKNHLLNSPAGGRSVTPRQAHEQLHHHPHTQHHLQQQQQQLQQQHQQLQQQQLQQHQQQQQLHHGHEELDIKQELVDYFHGQAAGGGGGGGGGVVGPAPPPPPESHRSYSSAGEESRLQLVDMAQDLRVAQAKANFGAFILPPRGSDASTPAMPLNMRKLTGAGSAGHMLMNSLLGSRESMSDGEEPDPDNDEATESAASPGHIKSSVSAQAAVAASAFYAESLNRDDCDFIGSNVSLKLRTMDRTQRIIAEKLISEVLYYGQFNELERSARIQPK

SEQ ID NO: 12676 - DNA, 3443 bp, DROSOPHILA
ccaactccgactacgactacgacctcgattccgattccgatcccgatcccgatcccgacccaagccaaaaacccaaacccaaaacccaggggagagaattattatatggctcataaaatatttgaacaagtctataaatgccgcgtaattctgctgcaattaaagccacggcgacgatcgtaaaggggaattgtttggacacttttatgtctctcttacatctcatccagcacggtgcgtatgcgcaatttcggtgggaatatatctcgtatatactatacccccacacatgagtgtaattgatatggcgccaggagaggaccacccaatccgcagataaactctcgatgcatttgtactttcaatggtttgtatttgtatatttgtatatttgtgtttgtatttgatgtctaaaatgttaattcctaatcaaagctaagttacatagaggtgtaaatcgtacatacatatatcagtgtgtaaatatagtcgggggagatatatagcttgtggccgtcgcggagcgttgtgtttactttaatcatctactatcacagcatcgtaatacaaggcaaagtatatctagtatacttagtatctagcggaatgtgcggcagattgttggcgagttgcaataataaataatacaatgggacttaaagctatcaaaaaaaaaaaaaaaaaataataataataaatttagtcggagaaaacattactatcgtgttagaatatcgagaaaactgggtatctcaaattcacgtctgtggtggattgttcacattacttattcggtttttcatagccttgtgattgtcggggattcctcgtgatttgtcgtgactggtgtggcgtggcgtgagtaataaatattggatgtttaataaattaaggatgtcttcatggaatgagcctcgttgtgtggaatggaggtttcgccggttctgagctcttggctatagctactttctactttctactctctgctctctgctctcgtctagagtttcttctggatcgcctttggcacgtgggtggtcgccttgcacagactcttacgctggttcgcgagtatcttgcggatactcttgagatactgcacaaacttcagtttggtgaagagggcgtgctgctccaggaccatcaggtcgtcgggcggtggtggtacatcctccccgcgtgcggccaaggtcgcctgctggtgcagctccacgagtggcaccaacgtcgagttgaactgctgcagacgcttctccatcagcttgcgcggcagtatcttgtaggtgaccaccggttgggcctggcgccgcttcttctggcccctcggctgtggcgcccgctgcctgttgggtgtgtacagcaggttggtcaggttgatggcctcctccacgctgcagagcacctcgcgggcggacttccgcatccttcccagctcgtcggagagcacgctcttcgcctgcaggttggccaggtcccagtgcaacttgatgttgcgcatgtacgtgaaggcgcccacgtaaatctgcaggtcgcgatgggcgtggcgaaggttcaactggaatgggcaaggaaaaagattggaagcgggttagttaaattgatttgtcaagaaatatgaatactatgaatgggaacatgactaattgataactttgatctgcaatgagaggttctctgttgataagaatctatggattcatatttgtacacccattttatatatactagtttttagattaaattaagtgctctatttatatcattaactgtccatgaacttgtaaacttatatattcccaacttaatcatcatagttaccccaacccatattggagatcaactccataatccttgattatatcagcatagaattgaaaataaaacaattatatggcaaagtatgatatttttaagtatttaacgccttaattacttgtatcgccatgaatgaaggtcggggttatctttattgaataaacctttttctgcactcgcttgcaataaaaatccccaattgtaaaattaaagtattagaaacggcgaaaccttggcggaaattgcgatatccatatcgcatatggtgtatatagtcgatcctatagttcgaattttttgggttgagtgaactgagcccaccagcccctttgcggaccccccccccccccccctcccatcgcacacacactcccctcatcccaacgaccagaaacttatctggccggcggctgaaagtgaaaatcaagccgaacgctcgcgccgctctctcgtaactgttttttgagttctcggctacgcttcggctggccgctcgtgacgtcgacgttggctcttcgtttcattcatgtcgcgctcgccgcatgccgccgctcaccctttcccgctcccgctcccgctcccgctcgctctcgctggagtttcgggggaatccacggctctgtttcatatgaatcacatatcgcgtatacgctccgcgccccgtatccccccgatcaacgaccacaaacggcgtgtgtgtgtcatttgcaataaacgagcgttgtgaactactcaaacatattatcgttaaggtcatttcttcttccgaaccgatccgctgcggtatcagcgaattcgttgttttcctttttttttttgggtgggtatgagcgaatgcatgacgtcaaaaggccgtcgattctcggtatcgaaacgatccatctaaatatagagttcttctatcagtcccgtttgccacctcgtcgtcggatcgggttccgatctgggggttccgtttcactctgttccggggatgtcaacaattagttggcacaattggcattgacgtagccgatattggccaaatattgacacacatcccgagcggcaagttcccgagcttggtgcagagtgagaaaaggtggatcgactggtcgaatcgagtagtgtgtgatcaaaggtatctactgaaaaactcaacacgaaagagtacttataagcagcgaaggcagtcaattgttaccctcattttctcacagtgtgatccgcgaggcccaggtacttttcccagactatgacgacaattgagaaatttcagcgaaagccaaactttgctcatcgccctgaatagacgattgagtggaatcgctggctaagtgaatgaatggatgaaatggaatggcaactatgatgggactggctaagtttagcagaacgggtaattaaaaaaaaaaataaaaaccaaattcccagggggtggcgacctttgagactccacttgcactctgaacgcgacttttggctgactcgaagtgagtcggcggttttcgcggatcttgaccacacttgagatttttcgccgcacctgcgatctcataaaagtatctgtttatggccacgccaagtgaactacactcatctggttatctgcagatattactgtcctatacgaaactttcccggacacc

SEQ ID NO: 12677 - DNA, 627 bp, DROSOPHILA
atgaaacagagccgtggattcccccgaaactccagcgagagcgagcgggagcgggagcgggagcgggaaaggttgaaccttcgccacgcccatcgcgacctgcagatttacgtgggcgccttcacgtacatgcgcaacatcaagttgcactgggacctggccaacctgcaggcgaagagcgtgctctccgacgagctgggaaggatgcggaagtccgcccgcgaggtgctctgcagcgtggaggaggccatcaacctgaccaacctgctgtacacacccaacaggcagcgggcgccacagccgaggggccagaagaagcggcgccaggcccaaccggtggtcacctacaagatactgccgcgcaagctgatggagaagcgtctgcagcagttcaactcgacgttggtgccactcgtggagctgcaccagcaggcgaccttggccgcacgcggggaggatgtaccaccaccgcccgacgacctgatggtcctggagcagcacgccctcttcaccaaactgaagtttgtgcagtatctcaagagtatccgcaagatactcgcgaaccagcgtaagagtctgtgcaaggcgaccacccacgtgccaaaggcgatccagaagaaactctag

SEQ ID NO: 12678 - protein, 208 aa, DROSOPHILA
MKQSRGFPRNSSESERERERERERLNLRHAHRDLQIYVGAFTYMRNIKLHWDLANLQAKSVLSDELGRMRKSAREVLCSVEEAINLTNLLYTPNRQRAPQPRGQKKRRQAQPVVTYKILPRKLMEKRLQQFNSTLVPLVELHQQATLAARGEDVPPPPDDLMVLEQHALFTKLKFVQYLKSIRKILANQRKSLCKATTHVPKAIQKKL

SEQ ID NO: 12679 - DNA, 5825 bp, DROSOPHILA
caacaattaaaacccttattttcttatatatttacatccatatttttagaaaattattagcagatttttaaccataaaaacgcgaagaattatccaaattcggaatgccatacctcgttgaactcgtaacttaatttccaatcgattgatataccaagctttatacttcaaattttgacaatttttcgcaaattttgatgatgttaccccttaccaaaaatgcaaaaaattgaaaaaaattaaaattttcaaaaacctgcgaaatgtgatttggatcgaaagctctgattttccgctgcacaaaacatggtctctaataattgtgtgccgaatttggaccaagtaataactaagaaaccgctaaaaatgtaaatattatgtatttttggtgtgacaacacctcacaacttttttctgtgtaacaactgaggctttcgggctgcccggagagcgttggaatgtccaaatgttcgatcataaaacaaagagccggccgcagaaacagaaacttaaactgaaactcaaacgaaaacaaaacagaaacgaaaaccaaaaccgaaatcgagacagcagcgaacgaagttgaaaacgagtcgaatcaatgcagataatatcaattatatgtaaaagatacacatgcatgcgatagatacatttgccccgataagcatttaaaatattaacatcaacacagactgggtatccatgtcatggaatgttccccgtctccacagtttcgtgtttgtgtttataattcattagaatccacagctgatttgagttatggcaggcagatccacaactgggggcttgtcgtgttgtctttaacctttttatcacaattatctaacttcaggttacctataagtcgcgctttcggcgcaagaaatgggtcttcatttgaataaccaagatttaaatcacatcggatttacttctgaaaattaagctttgcttgtgcaattatatatgtatacaatataaacacagaaacctttgtatatttgcatgtttatttacattaaattagactacatcagtgcactacgactacaaatacatttaactcaaaaaaaaaaatatattgtatatgaaacatattattttataaaataaataacggtttgatgattgtttcgtatttcgaactattaaaatactataataaaatacaaactgttccttctcagcgagttgctataaaagtcaaactgggaacactttttcgatctgttcccacagcgcagacacgcatctgcatctgtgccacttctggttgtgcaaacaacttagcggtgacgcaaacctgcactgctttctttgattttctacgcaatcatattgggtgctgagaaagtgtgagctgagttcttaattaattagccaattaatcattagacatgagcaaaattacaaattaattagctaattaagtaatgatatagcttacatacagttccgaatttagtggataattaatcaattaattgaaatgataatattatcatcaattagccaataaattatcaagtaaacaggttgatattaatccttgcaatagctggagcgcaggacattttcagcgcccgtgagaatggctccttcgtgctgaggacataactttaggtataggtcgctggactccatcgcctcgatgaggatgtactccaagtagatacgcggcgcggataggatgcgccatgtgagtggattcagtatattggtggggtactcccaattaacagtcgcgtactccggctctcggagattccgtccggccaccaaagctttgtattcatagcccggctcaaagtacattgccttctgggagaacttcatcatctccgtggcggctcgctcatttttgccagccttcttcaccagggcatcgtgcagctgaatggacaggatgcccacctcgccgccatgtagcgtactctcatcgtgtccggaaactcgcactgttatcctatagtgcagtcggcagaagggcttgctatctccagtccataggtagaagacccctggtgagtcgccttgctgcagctggccaagatcaacctgctcctggtaatcctcctggctgtggtagcccattcgcaggcacgtgtggcccggctcctcgcaactggtgcacttcgtgtccttaaagctctaaaaaggaagaaacaatattacatattttaagtttgaatattcaaaaaatcaatcaaagagcaattgattagcaataaaaatgcctaggatacccacctcgaaagaatcacaggttattccaaggaaaggacactgcgagccgatgctttccgtaaaatactgctgactgcgaatgtgattgcagccgaggaactcctgcatggtgaggaacagcgtcttcttcttgaccacatcctggaacttcttgttgcagccgggattatcgaaaccaccgttgggaaagaagtccacatgtcccagtcgcatattgatgccaagcccgcctttcatcaggggattggcatccgtgtgcacaatgtccacgaagtgggcatccgtcttgtccagccgcacgatgggatcggtgtccgtgaagagaggagcagccggatccagacccgttatcctggccggtttcagtccaaagtcgtgctgcaggtgatagccggcatagccggacagatgggcacccagtgagtgaccaatgatgtgcacattgtccagattcggaagacgcaactcctcgtacagcatgtgcaccacatgggcggtgatggcgcccactagccggatattggcaaccgcctggacatacggcggactagcgccaccgccccaatcgatgaggaccacggatgcccgaccctcgggctcgtgggccagcagcgccttggccatgtcccacatccagggaatttcaccggactccaggtatccatggacaagcaggaatatcttgcccttgggattcattcccatgccttgaacgctttctggatcattgagatccagatacttgggctgatccaatgcccttcgcgtgtgcagtgtgaaatggggctcgatctccgaaggcttctgcggatgcacatttatcgaacgggtcaccgtgttccagggtccattgatcggaaaacagccatacactccgaagcattttacctcgttgatgtctggcgaggattggggaaaatcagtgggtttgttgtggtatgtttggtctataaatcaacaggcgaacacctgaactgagataagcgggttggaattttagcaacaaataaccaactatcactagttttatatatagttataattcaaaaccactgaggctaaaatcttgaaaataatctactcgggcaatttgaatccatgaaactataataggcattataaaaccattaatctgaacgtaactgccttcttttaatattcctttaaacttttgcaaaatctcaattagaactgttgtggtctggtaaaaagcctaacgatccatgaaaaaaccttagacaattttcaagatgtcagatgcctgtaatgttccattaagtatttcatatgggccagaagacttcaatttatttggccagtggtgcatggattgccgtctctattttatcgtggtcttctttggctttccgtttgtatcggaagttttcgattagataggcgtgtgccgcgtccctccaacaactgaatacatattatatatctacatatatgtacgcacgatatgtacatatatgaaaccgcaccggacggagtcgcgtcattagccttttgggaccctgatttccaaatcaaattgaagcacgccgagttgccacctgtgcctccatcactcaggtgatcgcaatcgctgcgggcttcttgaaagagctttccccatttgctaatgcgagcagcactcagcatctttggatttcgaagcactaaagatccgaaaactgtttgctcagcacactcagcaaaagaaaccacttaaggttgcccctaactgggcccaaatgacacagctgcggccaagataatagctccaattactctactctcttactctataaagtggggatatcttgtatttattctaatctttaacttattattgaataatagttctacatatttgtaaaaatttcatttcattgaaacactagaaatcccttagctactcctatttcgaccgccactgtggctcaagtggcagatacttttgggccactttcgatggacatgttctagttacgatgggtggtgcaatcggtggtagccaaaagtgggctcgtggctcgaattacttaccacttttgggagctggtggtaggtccaccagggtgttgactgccgcccgactggtgtggttggccaaatacaacatggtctgcagcattaggccgcccgtcgtgttggccacatacatcctgcagctgtatctgattccgattccgattccgatgccaaatgtgatcccttagatcctggggatcttggaaattcccaacttgaatcacacactttttcccagggctttagtcagttcttaactgaaccacaatcacaaatcacttgaacgagtgccactcgagttggctattatctaaggctaggactgtatagtcgagttacgatgggatcgatcgattgatcgatcggccttttgtttggtgcctggcttttcttttctatagttttaattaagttgacgttaatcttatcgactgtctttcgtctcgagtgtgccgttagcttgttaggttagttggcggccctcggtttctttcgattttgactatcgccaatgactgggctatatgtcgtgtatatctccgccgatctgagtcgcttggaaaccgtcgcaccactgagcggatcagctgcgccccacgcaatttttataaagacgtagacgtcgcgagaaatcgaaaccgtaaccgaaatcagaaagctgcatccgaagctgcagccgaagccgccgatcgaagatagtgctgaccgatccgccgatttcccgacatatacatatgcgtacaatacgtctaccacttcaaaggtcaagtgtaataaacagttggtggaagccgaatatctcgtggaaattaccatgaaggctattcagaaaaaaaacatactttaaatctataacccgttcaagtatcactatatataccattaaatgttgataactacgctccttttacagatattatttctatggaagttatgtcgtattttcgctagacagccaacactgaccaatgagcttcggcacgcgacttacagcagagagtgtgaaagagagagaggaaagcaagaggccctgagcagctgatagtgcacaagtcgagcgtttcgctcagtgtagatgcaaagtacaccagctgctctttgttggatgcaccttcttgataaggaagccgatccgctctgccgacgacaacaaagtgaccgccatgaatgcgttgagcaatctcttacaggaagagggcggcacaagggaggatcttatgatgggtcagaaatagaggatggggaacagcccccttgggcaatcagcagctgttctcgacaacccattcggcacggcgagaaaaaatatacttatttgtataaactacccataacgatcctaacgatttgaaccatgtttttaaggatattccattattattggcaatatatatctttaaattttaaaagattgttattttagcttactttaaaagtagttatatatctaaagatcaatatatttgtagaatatctttaagcatgacgaacctagttttttgctagcttattaatagaagaaaattgttttgtgtgtaacatgccaagtgaatttctat

SEQ ID NO: 12680 - DNA, 2594 bp, DROSOPHILA
caagcgactcagatcggcggagatatacacgacatatagcccagtcattggcgatagtcaaaatcgaaagaaaccgagggccgccaactaacctaacaagctaacggcacactcgagacgaaagacagtcgataagattaacgtcaacttaattaaaactatagaaaagaaaagccaggcaccaaacaaaaggccgatcgatcaatcgatcgatcccatcgtaactcgactatacagtcctagccttagataatagccaactcgagtggcactcgttcaagtgatttgtgattgtggttcagttaagaactgactaaagccctgggaaaaagtgtgtgattcaagttgggaatttccaagatccccaggatctaagggatcacatttggcatcggaatcggaatcggaatcagatacagctgcaggatgtatgtggccaacacgacgggcggcctaatgctgcagaccatgttgtatttggccaaccacaccagtcgggcggcagtcaacaccctggtggacctaccaccagctcccaaaagtgacatcaacgaggtaaaatgcttcggagtgtatggctgttttccgatcaatggaccctggaacacggtgacccgttcgataaatgtgcatccgcagaagccttcggagatcgagccccatttcacactgcacacgcgaagggcattggatcagcccaagtatctggatctcaatgatccagaaagcgttcaaggcatgggaatgaatcccaagggcaagatattcctgcttgtccatggatacctggagtccggtgaaattccctggatgtgggacatggccaaggcgctgctggcccacgagcccgagggtcgggcatccgtggtcctcatcgattggggcggtggcgctagtccgccgtatgtccaggcggttgccaatatccggctagtgggcgccatcaccgcccatgtggtgcacatgctgtacgaggagttgcgtcttccgaatctggacaatgtgcacatcattggtcactcactgggtgcccatctgtccggctatgccggctatcacctgcagcacgactttggactgaaaccggccaggataacgggtctggatccggctgctcctctcttcacggacaccgatcccatcgtgcggctggacaagacggatgcccacttcgtggacattgtgcacacggatgccaatcccctgatgaaaggcgggcttggcatcaatatgcgactgggacatgtggacttctttcccaacggtggtttcgataatcccggctgcaacaagaagttccaggatgtggtcaagaagaagacgctgttcctcaccatgcaggagttcctcggctgcaatcacattcgcagtcagcagtattttacggaaagcatcggctcgcagtgtcctttccttggaataacctgtgattctttcgagagctttaaggacacgaagtgcaccagttgcgaggagccgggccacacgtgcctgcgaatgggctaccacagccaggaggattaccaggagcaggttgatcttggccagctgcagcaaggcgactcaccaggggtcttctacctatggactggagatagcaagcccttctgccgactgcactataggataacagtgcgagtttccggacacgatgagagtacgctacatggcggcgaggtgggcatcctgtccattcagctgcacgatgccctggtgaagaaggctggcaaaaatgagcgagccgccacggagatgatgaagttctcccagaaggcaatgtactttgagccgggctatgaatacaaagctttggtggccggacggaatctccgagagccggagtacgcgactgttaattgggagtaccccaccaatatactgaatccactcacatggcgcatcctatccgcgccgcgtatctacttggagtacatcctcatcgaggcgatggagtccagcgacctatacctaaagttatgtcctcagcacgaaggagccattctcacgggcgctgaaaatgtcctgcgctccagctattgcaaggattaatatcaacctgtttacttgataatttattggctaattgatgataatattatcatttcaattaattgattaattatccactaaattcggaactgtatgtaagctatatcattacttaattagctaattaatttgtaattttgctcatgtctaatgattaattggctaattaattaagaactcagctcacactttctcagcacccaatatgattgcgtagaaaatcaaagaaagcagtgcaggtttgcgtcaccgctaagttgtttgcacaaccagaagtggcacagatgcagatgcgtgtctgcgctgtgggaacagatcgaaaaagtgttcccagtttgacttttatagcaactcgctgagaaggaacagtttgtattttattatagtattttaatagttcgaaatacgaaacaatcatcaaaccgttatttattttataaaataatatgtttcatatacaatatatttttttttttgagttaaatgtatttgtagtcgtagtgcactgatgtagtctaatttaatgtaaataaacatgcaaatat

SEQ ID NO: 12681 - protein, 540 aa, DROSOPHILA
MYVANTTGGLMLQTMLYLANHTSRAAVNTLVDLPPAPKSDINEVKCFGVYGCFPINGPWNTVTRSINVHPQKPSEIEPHFTLHTRRALDQPKYLDLNDPESVQGMGMNPKGKIFLLVHGYLESGEIPWMWDMAKALLAHEPEGRASVVLIDWGGGASPPYVQAVANIRLVGAITAHVVHMLYEELRLPNLDNVHIIGHSLGAHLSGYAGYHLQHDFGLKPARITGLDPAAPLFTDTDPIVRLDKTDAHFVDIVHTDANPLMKGGLGINMRLGHVDFFPNGGFDNPGCNKKFQDVVKKKTLFLTMQEFLGCNHIRSQQYFTESIGSQCPFLGITCDSFESFKDTKCTSCEEPGHTCLRMGYHSQEDYQEQVDLGQLQQGDSPGVFYLWTGDSKPFCRLHYRITVRVSGHDESTLHGGEVGILSIQLHDALVKKAGKNERAATEMMKFSQKAMYFEPGYEYKALVAGRNLREPEYATVNWEYPTNILNPLTWRILSAPRIYLEYILIEAMESSDLYLKLCPQHEGAILTGAENVLRSSYCKD

SEQ ID NO: 12682 - DNA, 3771 bp, DROSOPHILA
agcgtgtggtagttccacttctcgccccagtccaggctgtacacctcgttcttgtgctcctgcaggcagatcagcggctgtttcggcgtcagctggttgctcgccgattcgccatccaatccgcaccagatctgaagcgatccatctccggaggcagtggcggcgatatcggcggcatacggacaccaggcgacgtcgaacaatccatcggaccactctaggcggcacagctctccgagactctggccatctgtggatgaggaatttgtgttggagttctgttccagcagaaagagggaaccacctccagcaagaccgtacagttggctgggtatcgaaaaaaaatggttttctattagtatattgttggttttagagcttaagattgatctcaccttgtagctagcagcaagtagttagcctcgaaaggcgaaaagcgcaggctatagccatgtcggtctgtggtggtgtgtgtctgtgtctgcatcttggttctagatctcaactgcaaagaaaaaaaaaggagagattcaaaataataccaatttctctggaccttaaatattatctaacattaactacaatgaattgcgacctttggtaagctagttgtaagaaatgccaatttcaattatacctctcacattaaaatcaatatatcgacgtttgatacataacaaaattaaaaacatctaaggtttctccttgctgcccactgatgtttggctaagagagaacaaaactggccgattgataacaacccggtaacaccaaatcggatgctaatccagctccaacctaccatgctcaattattcaacagttggccaaatgacctcgtactaggtcggaaaatcggaaaaagatacttgacattagccaatttgctcgggcaagtggcaaactgcgcagaaaatagaacaacccctggaagcagcttgtttgcagttttcccttagttcctatggttctatcttattgtcgtgttggacaagccaacaaacaagtgcataacgagcaaatccagttagtggccagaatgaagacccacggacagggccagggcaaaggtatataagcaggttgtacggcacttgggtttcgcattttcctccgccgaacggaaaactctataacgcgcatcgcccgacttagcctcgaattgcccagttgcatttgccaggaatcaaagaaatccactaatccacaatggttgtatccgtgaaggtctttaagaaggccacgcccaacggcaaggtcaccttttatctgggacgccgcgacttcatcgaccacatcgactactgtgatcccgtcgatggagtgattgtggtggaaccggactatctaaagaacaggaaagtctttggccaactggccaccacctatcgctatggtcgcgaggaggacgaggtcatgggagtgaagttctccaaggagcttatcctgtgccgggagcaaattgtgcccatgaccaatcccaacatggagatgacaccgatgcaggagaagctggtccgcaaactgggcagcaacgcctatccgttcaccttccacttcccgcccaattcgcccagctccgttactctgcagcaggagggcgacgacaatggcaagcccctgggcgtcgagtacaccatccgggcatttgtgggcgactccgaggacgatcgccagcacaagcggagcatggtcagtctggtgatcaagaagctgcagtacgctcccctcaatcgtggccagcgtctgcccagctcgctggtcagcaagggattcaccttctcgaatggcaagatcagtctggaggttacgctggacagggagatctactatcatggcgagaagacggctgccaccgtccaggtgtcgaacaactccaagaagtccgtgaagagcatcaagtgcttcattgtgcagcacactgagatcaccatggtgaacgcccagttcagcaagcatgtggcccagctggagaccaaggagggctgccccatcactccgggcgccaatctcaccaagaccttctacttgattccgctggcggctaacaacaaggatcgccatggtaggatttggatgtgatagttgtgattctggatagtttctaatggattatttaattgtgaactcaggtatcgccctggatggtcacttgaaggacgaggatgtcaacctggcttcatccaccatggtgcaggagggcaagtccacgggagatgcctgtggtattgtcatctcgtactcggtgcgcattaagctcaactgcggcactctgggaggtgaaatgcagacggatgtgcccttcaagctactccaaccggcacctggtaagctttagaagattacttgaacttgacttctagtttgtaattcctttgatgtggtataggaaccattgagaagaagcgctcgaatgccatgaagaaaatgaagtccatcgagcagcaccgcaatgtgaagggctattaccaggatgatgacgataatattgtattcgaggacttcgccaagatgcgcatgaacaatgtgaacatggcggactaggccaccgatcttcaatctcttctagctctgttgtgaaccgaattgaactaaatcgaaagcactgaaaatttgttgcagcagtctctcgtggaggccacaatctttgtattataatcgtatctataatgtaactttggtggatctggagtttgtacccgtacatatgcatgttgatgagttgaacagacctcgtgtcgctatattataaatgtgttatggctatcaaaagcactcaccttttctctcgtttgcgatgtagtatccaaaagtgattcggtaaggattcggtttttggtagtggattgttcttggcggtgctgtgggtttcaacttcagaagtcgaatgatctaaacaactgcgcagctcgacgacgaaggatctgctggcaggaattctaagggtgatttttcaacgatgacagggggttgaaaagcccaatgcttataggtcacatcgtaggctttcaaccccttgcaagaagcaacaggctgccaggatatgtgttccaccaatcaggatcaaccagaactggatatggccggctctaacggtcaacggaagttccaagctccagatgttgacaatgcgtttgccaaaatacacaatttttgtgtatgctaaatagcccaagcttttgaccttgatgatggctaaggccgccagctgccagcagtttgattctaggtctcatccccgtcagtctagctgattttcctcttttttttggttttttctattttacaattttctcgcattttatttgccatatcttatataagccctgcagctgaccgttggagcattgcacaatccggggcagcagcgtcgatcgatttcacacaccgctgactgctgggcaagtgacttccggcttttggccaagccccgaaaagtggccaactataaatggctatgttgttgtcaaaatgctgccacaaatttgacgagagtgcaacgcgatggatctgccaattggaaagttaaacggactgctaaagatgcaaatattcctcctgcaattgttgcttttcgtttcgccggcattgttgcagcagccacatgtcttttaccatccaagacaattgtattacgattcaccgcgtcttcgtcgctttgagtatggtgccgctgccacgcccattgtgggcggctatagtccggctcctccgccggcgattcactttcagcagcagacgccacactttcagctgattaactatcggccga

SEQ ID NO: 12683 - DNA, 1642 bp, DROSOPHILA
aacaagtgcataacgagcaaatccagttagtggccagaatgaagacccacggacagggccagggcaaaggtatataagcaggttgtacggcacttgggtttcgcattttcctccgccgaacggaaaactctataacgcgcatcgcccgacttagcctcgaattgcccagttgcatttgccaggaatcaaagaaatccactaatccacaatggttgtatccgtgaaggtctttaagaaggccacgcccaacggcaaggtcaccttttatctgggacgccgcgacttcatcgaccacatcgactactgtgatcccgtcgatggagtgattgtggtggaaccggactatctaaagaacaggaaagtctttggccaactggccaccacctatcgctatggtcgcgaggaggacgaggtcatgggagtgaagttctccaaggagcttatcctgtgccgggagcaaattgtgcccatgaccaatcccaacatggagatgacaccgatgcaggagaagctggtccgcaaactgggcagcaacgcctatccgttcaccttccacttcccgcccaattcgcccagctccgttactctgcagcaggagggcgacgacaatggcaagcccctgggcgtcgagtacaccatccgggcatttgtgggcgactccgaggacgatcgccagcacaagcggagcatggtcagtctggtgatcaagaagctgcagtacgctcccctcaatcgtggccagcgtctgcccagctcgctggtcagcaagggattcaccttctcgaatggcaagatcagtctggaggttacgctggacagggagatctactatcatggcgagaagacggctgccaccgtccaggtgtcgaacaactccaagaagtccgtgaagagcatcaagtgcttcattgtgcagcacactgagatcaccatggtgaacgcccagttcagcaagcatgtggcccagctggagaccaaggagggctgccccatcactccgggcgccaatctcaccaagaccttctacttgattccgctggcggctaacaacaaggatcgccatggtatcgccctggatggtcacttgaaggacgaggatgtcaacctggcttcatccaccatggtgcaggagggcaagtccacgggagatgcctgtggtattgtcatctcgtactcggtgcgcattaagctcaactgcggcactctgggaggtgaaatgcagacggatgtgcccttcaagctactccaaccggcacctggaaccattgagaagaagcgctcgaatgccatgaagaaaatgaagtccatcgagcagcaccgcaatgtgaagggctattaccaggatgatgacgataatattgtattcgaggacttcgccaagatgcgcatgaacaatgtgaacatggcggactaggccaccgatcttcaatctcttctagctctgttgtgaaccgaattgaactaaatcgaaagcactgaaaatttgttgcagcagtctctcgtggaggccacaatctttgtattataatcgtatctataatgtaactttggtggatctggagtttgtacccgtacatatgcatgttgatgagttgaacagacctcgtgtcgctatattataaatgtgttatggctatcaaaa

SEQ ID NO: 12684 - protein, 401 aa, DROSOPHILA
MVVSVKVFKKATPNGKVTFYLGRRDFIDHIDYCDPVDGVIVVEPDYLKNRKVFGQLATTYRYGREEDEVMGVKFSKELILCREQIVPMTNPNMEMTPMQEKLVRKLGSNAYPFTFHFPPNSPSSVTLQQEGDDNGKPLGVEYTIRAFVGDSEDDRQHKRSMVSLVIKKLQYAPLNRGQRLPSSLVSKGFTFSNGKISLEVTLDREIYYHGEKTAATVQVSNNSKKSVKSIKCFIVQHTEITMVNAQFSKHVAQLETKEGCPITPGANLTKTFYLIPLAANNKDRHGIALDGHLKDEDVNLASSTMVQEGKSTGDACGIVISYSVRIKLNCGTLGGEMQTDVPFKLLQPAPGTIEKKRSNAMKKMKSIEQHRNVKGYYQDDDDNIVFEDFAKMRMNNVNMAD

SEQ ID NO: 12685 - DNA, 8731 bp, DROSOPHILA
agaaagcaacgtactcgggccgacactgtatcttattttagttccatctgttttgtattacgatagcttaagggtgtgttgcaaccaaccatctcgattaaatgtattagagtgccgcataacttttgtgtcaataaacaaaaacatttgtgaaagttacaagcttgcgaatttcaattgggtcttgcatatttttcttgtatttcttgtatactacagatataatgcgaagagcttaaactaaatggggaaatattcaagtttcgggcaaataaaaaccatatggattcattgaaagtatgtatgtatttatatatagacatgtacatgcacttcgatcttgcagttaaagtgtacagcattttacaattcaacacttacaacaacagcgcggctaattgttaaggttcgcatcctatgtacagcccacattgtacacgggaatctggtcatccatcgtcaatctatgtacatacatacatgcacttatccgcatccgcatccgcttatccggtcgggcaccacatcgcacttggcttatgtcttatcgcctaaacaatctaagtaatgactaaagatgcctggttgtctggcttacgatcttaccatcctaaaactaatgaaaatgtctcgcgtgtctacatgagtgtgcgtttgtatgtgagtgggtgttaagtttagttgtgtatattgctgcttggatttttttgattcctagattaagtttagtcaatcgaaagtgagatgtgcttggttggcgttcacattttatacaaggtcacctccatcagcgttatcgcaactagagacaatcgaaatatgcgtacaaataagtttaaaacaatttataatatagcacaactctcgctccttggttagtccaatttggttttgcccgcaaacaaacatgtgctaagcaccaagccgaagaatcgtcctccgggtgtcattgcaggacaagccgtgcacgtacacaatgatataactgcctaactaaacattaagtcgttagtagcgctatgttgatttccttgaccattttgacgcggtgcagcatccgctgcagtgcgtcctgccccagagcctgcgtcgagtaccaaaccggcgagtcgggcacacacgagcgctccggctgcagataaaagacatcattgcgggtcttcacgctctccgggctgttaaacaaacgtaccatgattaacaatcgattcttgtaattattaagcatactaactaaccatttggagagataaaattcgtaaaggcggacgggacagcgcagcggattctcttcattctcctgctgctcgtagactttcttcttccgcggattggcatctgtttgaaaaaaagttaagtaagagctcagtttctgtgcatacgaagcttagttaagagcttacccagacccgcctgcggtggatagaatcgtaagagcacgtttcgtgagccaggaactttggaattctgtgatgagcgcttccagtgcttcattatgtgcgagaaggataactgcatgtgctcctccacggtctgaaaaaccaaacgcaatttagcccaggtcaacaaatgcggcatcgtttactcctaccgtcagattaaagtgcttggtgttaaagaacattagcgtgctcagcagaacatgcggcgaatgggcgccaagttgcttgcactcccacaagtgctcctcctccacgcgagtgacaatgtattctgtttaggtgtataaagatgtggttacgctggaactgactcatttcaagttgattcaacttacgcgaatcgttgtaaagcacggagaacttgcgcgccacctcgtcaaggcactcggtaaaccgctcgtagtacggatcatagaatatgttgtctatgcgtccattcacatacagatattgctgaatgcctgaaggaagagattccaataaaatcaaatggtacatgtgtaaacctggggagtaactacatacccaacacaaggtagtagatggtgtccggcgcgtattccgtcccgttgggcttgcgcacttccttgacgaagaggcaaagcgagtagttcaactcgtcggcggtcatttgaagcagctccgtcttgaagggccgccggcgcatcgagctcttctcgatgtccgcgttcttcgtcatcacccactgcttccatgcgttcaccccgaaggtgtacttcaggaacatttgggcgtcgggcttctcctgcggctgctgtgcctgctgcgactgctgctgcagggccgagtgatccatctcgccgccgcgctgccttttcaccggcgagcggctgttgcggttgggtgggtccatgacgacgcctacgccgcgcttgcgtccacgtgcggttctgaaagtcatcacatttaagtacttgagtattgatctctgattgccatctctcttaactcaccgctgcgtggcatcaagcatgtgatgctgctgatctagatgatgtactcccatttgacccattccgtcgtgacccatcggcgactggctgctgatcgtattcgccgtcatcgacgtttccagatccaccgtcgaggtctggtgatgattgtcgtagtcgcctgtggccatcttgagggctatctgcagcatatcgtcgccgtagggattatgtccggctccgctaacgtccaccacttgctgttgttgctgctgttgggcgacggactcgaggctgttctggtactgcagagctaccaggcccggatccggcttgatctcgttgtccgaatcggagtccgattcgtgcttctcctctgccaccatctcggccatcataagcaactccgcctccagtggatcctctggcatcttgtcctgtatcttcttgatctccttaagtatgccttgcgcggtgttgcgcgtggtgggtatgaaaataggcaccgggattggcagcggaatgggcactggtacggggaacggagccgagtacatgtacatgggttgcggcacgaagatgggcaccggaaccgggatgagcaccttgttggagtagtctttctccgtctgggtggcgcaatcccgcacatccggactacactgctcgccctgggtcaccgttaagggcttacagcttatgttcacgtttcgcacagccttgggatatggtggcactgtgatgatcttggtctccgttaccgtagccggcccgaaatccatagtcgtggtagtatttcgcctgaccggaatgcccatgtgggagctgccacctgacatcgtgggcgatggtgaacgcgccgagtagtctacagcgtgcttgcgtggccttcctcgctgtgctggcggatggacacccggcatggacagcggcggtgatgaggttcccgattcccgtggacgtccacgcttgcgacgaaccgtcagattgccgatccgggcttcggtttcgccgctggcgagcgattgcaccgtggatataaccggtagcatggtgccggagccggatttcttgcctccaacgccaccttttccagtctgcaattatcggggacattaattatatgcaacttaggtatgatacttaattaatttacgttaattcccattttggtggacattgaatgaaattaggattgcaattgaaacttgaattgaaagccaaattgaagtaaatgtattaataattaagcgagcaggtaaaaaaaattgcaaatacttcgtttacgttcaatattttaacacttattgcatggctatcattcgattgtaaaaacttaaaaaaaacccagtgtgtacccttttagtttattatttagtttttgactcacgtgggagagcttcagtttgacacgtttgggcaggcccgtgggaaatggtgccgcattcttgttgcctcgattggattgctgctgggacttggagctgccggcgctactgggcggtaggtcgctgtccagcgtgaggggagcgcgggcgaactgattctggaactgcatcacacactggtaggtgcaaaagttgcgcatggaagcatccgacatggtcaaatgatactgtggcgtattgaagttggaacaattgtcgcatttggtaaccgccctggcggagatgttgcagctaacgccgtgcatggtcaggcagttgatggagcaggtgagcgtctcctgatcgtgcggcccaccaatctgatagatcatgtcaaagttgtacttcttcaccttgcaccactggcaggagacgatgtgcctgttgacgatgatgtacacatttatgcagacccgcgagcagaagaccttcggtgactgctgttcgttgtagatggtgtaggactcggcgctccgccgctcaaagtatttggagcacatggcacacggatcagcgttcacgttgctcacaaacttaaaggcggagaagcagggattcgagcagaagtagtgctctctgtcctccagcagcatctccaccctcactggcttctggttgttgcacacaccgcagacatcggtgcgtagttttcgtcggggattgcacatgctttcgtagcgacggaggcaggattgcgaacagaagtccttgaactgatccttgtcacccaccggggcaaggaagccctcctgcccgccgctgatgtccttctggcagcaggagcacgtcttcagacccttcttaaaggtgttaaggcagccggcgcagcagaactgccgcacatcgaaaccgaatcgcacgcagtacttgccaagcgctatggagctcacctcctgcttgcaggtctcgcaggtggagccaatggtgcgctgatagctgcccaggcacacctcattgcagaagtccatggtctcccacatgagctgcttctcgtccgtattgatatccgcctcgcagtcggcgcagcgccttcggaagctttcgatcctgtccaggcgcgccgtctctgcctcctccaccgtcctggccaccacgctgccgtcggtccgtttggtgggcgaattttgcggtggctgcagcgttgtggcgccaatgttgcgcactcgaatcgagtgccgcttcagcttgaatttatctggctcctcagcgttgagcagattgaagcaatcgtcattgcaaatgtagaagcagtcctggtcctgtttaatgaaatatttgcaccgcgtcttatccttgcactgcaggcaatcttgcgtgttggctggagtagcttcctcctcggcatctccgccctcgccatcggcgctagcctccgcttcggcggcgccttcttctcgaaccacttcctcgaccaggaacttcttgcggcgtacaaagtacttgccgggttgatcttctagcagggcgtcgacacaggcggtatcgcagatgtactcgaacccactgggagcagcaggcttttgccgagcctcctcctcctccccctcctcagcgttctcctctgccttatcgttttccttctccttatccatttcttctgactcctctggactcctgtaccgaaacccacaattcttttcatcgccacactgtttgcacttctgaacgctgccaacgatccaactaatgatgattttcggcgtggaaccaggttcacccgctccggcactggaggattcctcggctgtgggctcgtcgggatcgggaacatcgccaccggcctcctcttcgttagctgctgcagctactccatctgctggcaaaaaaaggggatttacgttatatacattttaataagcaatcgttctgtatgctaggagccaattttgtaataacaaactaaatttaaagcaagaattaaatgaatagaatgcagtcgaatgaagcagttagtgagttttgcccaggaattaacccaatctgctcaccttctgcaatgcctgttgccgccgacttagctccagcttgagcatctgcaggcaaaatggatagagtagatgtgggatagggcatttcaagtcttagtgtggagcacttaccagttggcgtggttggagatacgtcggtggcgtcaacggcagctgcactgtcgtcttctggatcggcggcggcatctgccggggactttctatcgttatcgggtgtcttggcttgccgctcctcggcttcctcctcttcggcggccttctcggcattctcgcgggccagttccttctcagcttcagtcacttccgtttcttgatcatcgggaataaggcaaacatctgattcctctggctccaaaacattttccactgtgtctataatgtaaatagttcattcatttagtcttttataaacatgcatcaaagaagtactaagacttaccatcgccatgttcggcctcaccagtttcctcggcattttcatccacctgctccgattccgcatctccttctgcatccggatcatcttcatcggcggccgcatctttctcccgttcatcaggatcttggccattttcctgctcctctaagcttgtgtccacctcatctcggccctccggtggctctgcatcctccgcctggtgtgaatctgcgcccacggactgcatatctacatcatctgtcgcctctcgatccagagctgcgtcgtcttctgcttcctgctcagcttcaccttctgcatccacctcgccttcatccacatccattgcttcgggtgaagcgggaccgccgtccacagcatctgcttcggcggccgctgcctccacctcttccgcagtggcctggagggcatcagtctcctcctccgcctcctcgggctcttcctgtggatctaccctcacggcttctgtttgtggctgctcatcctcaccgccttgcggctcctcgttgggcgttggctcctcggcgggctcctccgcatccacgggatcagctggtgtactagccgccttatcccgcgactggttatcatcggcgtctaatgatccctcggagatctgttcgaagtcgtcatccgcctccttggaaggaggcggtttgctttcctgcgcagctgcatcctccgctggcggcgaggcgggcgtatccagagtttcactggccgccggagcagtctgttgtcgatcctgatcctgttgttcctccgacctgggggtggccgactccggtcgcgcattggaatcggcgccgaacgagtccaaactggatatctcctccatttcgctgcttgattttttaaccgactttcgctgtacgtttgtttatatagacatgaaaactgcaacaaaaggaaaacaaacaacaaatggttagggctcgtctatcgataacattcgcggcgcggcggactatcggctggccagggccccacaccattgccgcctaaaatgtgtacacacacacgcacaggcacaccgacgcacacacacacacactgagcccacggtacagtgcacgaaaaaacaaaacatgcgcctccagagaacaaaaaaagtggggaaaaaaggaggagtgtgtctgtatgcgccgctctgccaggcaattaatattactgcacttgcattatcttttttggccgcgttgcatgggcggcttttccgtactttttttgctgccttgccgtacggtacttcgataatccgcaatccgagcgccgactttttttttcggacagcacgagtttgttgtggtgagcgcgtctccacaggcgaattaactgcctttcaccgctgcgcgtgcgggcacatcattaacggtcggttcacggtacgcgcaaaacttttcatcaattaccaaacacctttttgcactgtgcaatttctcgctttctggccactgtgtgaattttcggctttatgcgagtaaaatggcgcactagtgtaccaaatgcggccctcgcataacgcgttcgcttcttggctggtatctgccggaaaataccgaaaatggcgcataagaaaataccggcgtgagtggtgcaaccggttggcagcactgctcgtttatctttttgaaaaatgcttctaaagtttggatcgcttttgatcaataggaaattattgaaaactacaacttaaatatagactgtctttcatctaagcttccccttagatgagcttccagtttgccatatgcaaaagatacccaatacaatgctaatgagaactgatattttattggcttattttttttaaatttttgggttttatgcgcgaagcttttgggaattccaagtagttttctagttttgattgatgaatccctcggcgtccagaagaacattggggaaatacttgataattttggtgaagtgcgggaatttttgcgtgttggcgaatgtaatctcattgatctcctgatactgctttaaaatcgtgatgagttcatcgggaggcactgcatccgccaccagccagtgctggatggcgtagtttagagcatagaccgggagtttcattaaactgggttcgtggatcaatgatgcgccttcctctatgattttctaaaggataactaactaaattaaggctccattttatattccaatctactaacctcgatgcaaacgcgctccacatcgatgatgttatgccggaatgctaggtcgaaggcaggaaagatgccatccagaggcaattcctgctcctttagtttctcagcaaaggagcgaaggagctccggcatgttgtacgcgcaggacaggatgaacatatcccccaccagcttcagctggaccagcggcgaggtcacctcgaaggtgtatatgaactccaggaagatctccacgctctcgggcgaaaccccattgatctggagtacgccgttccagtccttgttctggtacacgtcctgctccagtttgt

SEQ ID NO: 12686 - DNA, 5287 bp, DROSOPHILA
actcgcataaagccgaaaattcacacagtggccagaaagcgagaaattgcacagtgcaaaaaggtgtttggtaattgatgaaaagttttgcgcgtaccgtgaaccgaccgttaatgatgtgcccgcacgcgcagcggtgaaaggcagttaattcgcctgtggagacgcgctcaccacaacaaactcgtgctgtccgaaaaaaaaagtcggcgctcggattgcggattatcgaagtaccgtacggcaaggcagcaaaaaaattttcatgtctatataaacaaacgtacagcgaaagtcggttaaaaaatcaagcagcgaaatggaggagatatccagtttggactcgttcggcgccgattccaatgcgcgaccggagtcggccacccccaggtcggaggaacaacaggatcaggatcgacaacagactgctccggcggccagtgaaactctggatacgcccgcctcgccgccagcggaggatgcagctgcgcaggaaagcaaaccgcctccttccaaggaggcggatgacgacttcgaacagatctccgagggatcattagacgccgatgataaccagtcgcgggataaggcggctagtacaccagctgatcccgtggatgcggaggagcccgccgaggagccaacgcccaacgaggagccgcaaggcggtgaggatgagcagccacaaacagaagccgtgagggtagatccacaggaagagcccgaggaggcggaggaggagactgatgccctccaggccactgcggaagaggtggaggcagcggccgccgaagcagatgctgtggacggcggtcccgcttcacccgaagcaatggatgtggatgaaggcgaggtggatgcagaaggtgaagctgagcaggaagcagaagacgacgcagctctggatcgagaggcgacagatgatgtagatatgcagtccgtgggcgcagattcacaccaggcggaggatgcagagccaccggagggccgagatgaggtggacacaagcttagaggagcaggaaaatggccaagatcctgatgaacgggagaaagatgcggccgccgatgaagatgatccggatgcagaaggagatgcggaatcggagcaggtggatgaaaatgccgaggaaactggtgaggccgaacatggcgatgacacagtggaaaatgttttggagccagaggaatcagatgtttgccttattcccgatgatcaagaaacggaagtgactgaagctgagaaggaactggcccgcgagaatgccgagaaggccgccgaagaggaggaagccgaggagcggcaagccaagacacccgataacgatagaaagtccccggcagatgccgccgccgatccagaagacgacagtgcagctgccgttgacgccaccgacgtatctccaaccacgccaactgatgctcaagctggagctaagtcggcggcaacaggcattgcagaagatggagtagctgcagcagctaacgaagaggaggccggtggcgatgttcccgatcccgacgagcccacagccgaggaatcctccagtgccggagcgggtgaacctggttccacgccgaaaatcatcattagttggatcgttggcagcgttcagaagtgcaaacagtgtggcgatgaaaagaattgtgggtttcggtacaggagtccagaggagtcagaagaaatggataaggagaaggaaaacgataaggcagaggagaacgctgaggagggggaggaggaggaggctcggcaaaagcctgctgctcccagtgggttcgagtacatctgcgataccgcctgtgtcgacgccctgctagaagatcaacccggcaagtactttgtacgccgcaagaagttcctggtcgaggaagtggaccaggactgcttctacatttgcaatgacgattgcttcaatctgctcaacgctgaggagccagataaattcaagctgaagcggcactcgattcgagtgcgcaacattggcgccacaacgctgcagccaccgcaaaattcgcccaccaaacggaccgacggcagcgtggtggccaggacggtggaggaggcagagacggcgcgcctggacaggatcgaaagcttccgaaggcgctgcgccgactgcgaggcggatatcaatacggacgagaagcagctcatgtgggagaccatggacttctgcaatgaggtgtgcctgggcagctatcagcgcaccattggctccacctgcgagacctgcaagcaggaggtgagctccatagcgcttggcaagtactgcgtgcgattcggtttcgatgtgcggcagttctgctgcgccggctgccttaacacctttaagaagggtctgaagacgtgctcctgctgccagaaggacatcagcggcgggcaggagggcttccttgccccggtgggtgacaaggatcagttcaaggacttctgttcgcaatcctgcctccgtcgctacgaaagcatgtgcaatccccgacgaaaactacgcaccgatgtctgcggtgtgtgcaacaaccagaagccagtgagggtggagatgctgctggaggacagagagcactacttctgctcgaatccctgcttctccgcctttaagtttgtgagcaacgtgaacgctgatccgtgtgccatgtgctccaaatactttgagcggcggagcgccgagtcctacaccatctacaacgaacagcagtcaccgaaggtcttctgctcgcgggtctgcataaatgtgtacatcatcgtcaacaggcacatcgtctcctgccagtggtgcaaggtgaagaagtacaactttgacatgatctatcagattggtgggccgcacgatcaggagacgctcacctgctccatcaactgcctgaccatgcacggcgttagctgcaacatctccgccagggcggttaccaaatgcgacaattgttccaacttcaatacgccacagtatcatttgaccatgtcggatgcttccatgcgcaacttttgcacctaccagtgtgtgatgcagttccagaatcagttcgcccgcgctcccctcacgctggacagcgacctaccgcccagtagcgccggcagctccaagtcccagcagcaatccaatcgaggcaacaagaatgcggcaccatttcccacgggcctgcccaaacgtgtcaaactgaagctctcccacactggaaaaggtggcgttggaggcaagaaatccggctccggcaccatgctaccggttatatccacggtgcaatcgctcgccagcggcgaaaccgaagcccggatcggcaatctgacggttcgtcgcaagcgtggacgtccacgggaatcgggaacctcatcaccgccgctgtccatgccgggtgtccatccgccagcacagcgaggaaggccacgcaagcacgctgtagactactcggcgcgttcaccatcgcccacgatgtcaggtggcagctcccacatgggcattccggtcaggcgaaatactaccacgactatggatttcgggccggctacggtaacggagaccaagatcatcacagtgccaccatatcccaaggctgtgcgaaacgtgaacataagctgtaagcccttaacggtgacccagggcgagcagtgtagtccggatgtgcgggattgcgccacccagacggagaaagactactccaacaaggtgctcatcccggttccggtgcccatcttcgtgccgcaacccatgtacatgtactcggctccgttccccgtaccagtgcccattccgctgccaatcccggtgcctattttcatacccaccacgcgcaacaccgcgcaaggcatacttaaggagatcaagaagatacaggacaagatgccagaggatccactggaggcggagttgcttatgatggccgagatggtggcagaggagaagcacgaatcggactccgattcggacaacgagatcaagccggatccgggcctggtagctctgcagtaccagaacagcctcgagtccgtcgcccaacagcagcaacaacagcaagtggtggacgttagcggagccggacataatccctacggcgacgatatgctgcagatagccctcaagatggccacaggcgactacgacaatcatcaccagacctcgacggtggatctggaaacgtcgatgacggcgaatacgatcagcagccagtcgccgatgggtcacgacggaatgggtcaaatgggagtacatcatctagatcagcagcatcacatgcttgatgccacgcagcgaaccgcacgtggacgcaagcgcggcgtaggcgtcgtcatggacccacccaaccgcaacagccgctcgccggtgaaaaggcagcgcggcggcgagatggatcactcggccctgcagcagcagtcgcagcaggcacagcagccgcaggagaagcccgacgcccaaatgttcctgaagtacaccttcggggtgaacgcatggaagcagtgggtgatgacgaagaacgcggacatcgagaagagctcgatgcgccggcggcccttcaagacggagctgcttcaaatgaccgccgacgagttgaactactcgctttgcctcttcgtcaaggaagtgcgcaagcccaacgggacggaatacgcgccggacaccatctactaccttgtgttgggcattcagcaatatctgtatgtgaatggacgcatagacaacatattctatgatccgtactacgagcggtttaccgagtgccttgacgaggtggcgcgcaagttctccgtgctttacaacgattcgcaatacattgtcactcgcgtggaggaggagcacttgtgggagtgcaagcaacttggcgcccattcgccgcatgttctgctgagcacgctaatgttctttaacaccaagcactttaatctgacgaccgtggaggagcacatgcagttatccttctcgcacataatgaagcactggaagcgctcatcacagaattccaaagttcctggctcacgaaacgtgctcttacgattctatccaccgcaggcgggtctggatgccaatccgcggaagaagaaagtctacgagcagcaggagaatgaagagaatccgctgcgctgtcccgtccgcctttacgaattttatctctccaaatgcccggagagcgtgaagacccgcaatgatgtcttttatctgcagccggagcgctcgtgtgtgcccgactcgccggtttggtactcgacgcaggctctggggcaggacgcactgcagcggatgctgcaccgcgtcaaaatggtcaaggaaatcaacatagcgctactaacgacttaa

SEQ ID NO: 12687 - protein, 1655 aa, DROSOPHILA
MEEISSLDSFGADSNARPESATPRSEEQQDQDRQQTAPAASETLDTPASPPAEDAAAQESKPPPSKEADDDFEQISEGSLDADDNQSRDKAASTPADPVDAEEPAEEPTPNEEPQGGEDEQPQTEAVRVDPQEEPEEAEEETDALQATAEEVEAAAAEADAVDGGPASPEAMDVDEGEVDAEGEAEQEAEDDAALDREATDDVDMQSVGADSHQAEDAEPPEGRDEVDTSLEEQENGQDPDEREKDAAADEDDPDAEGDAESEQVDENAEETGEAEHGDDTVENVLEPEESDVCLIPDDQETEVTEAEKELARENAEKAAEEEEAEERQAKTPDNDRKSPADAAADPEDDSAAAVDATDVSPTTPTDAQAGAKSAATGIAEDGVAAAANEEEAGGDVPDPDEPTAEESSSAGAGEPGSTPKIIISWIVGSVQKCKQCGDEKNCGFRYRSPEESEEMDKEKENDKAEENAEEGEEEEARQKPAAPSGFEYICDTACVDALLEDQPGKYFVRRKKFLVEEVDQDCFYICNDDCFNLLNAEEPDKFKLKRHSIRVRNIGATTLQPPQNSPTKRTDGSVVARTVEEAETARLDRIESFRRRCADCEADINTDEKQLMWETMDFCNEVCLGSYQRTIGSTCETCKQEVSSIALGKYCVRFGFDVRQFCCAGCLNTFKKGLKTCSCCQKDISGGQEGFLAPVGDKDQFKDFCSQSCLRRYESMCNPRRKLRTDVCGVCNNQKPVRVEMLLEDREHYFCSNPCFSAFKFVSNVNADPCAMCSKYFERRSAESYTIYNEQQSPKVFCSRVCINVYIIVNRHIVSCQWCKVKKYNFDMIYQIGGPHDQETLTCSINCLTMHGVSCNISARAVTKCDNCSNFNTPQYHLTMSDASMRNFCTYQCVMQFQNQFARAPLTLDSDLPPSSAGSSKSQQQSNRGNKNAAPFPTGLPKRVKLKLSHTGKGGVGGKKSGSGTMLPVISTVQSLASGETEARIGNLTVRRKRGRPRESGTSSPPLSMPGVHPPAQRGRPRKHAVDYSARSPSPTMSGGSSHMGIPVRRNTTTTMDFGPATVTETKIITVPPYPKAVRNVNISCKPLTVTQGEQCSPDVRDCATQTEKDYSNKVLIPVPVPIFVPQPMYMYSAPFPVPVPIPLPIPVPIFIPTTRNTAQGILKEIKKIQDKMPEDPLEAELLMMAEMVAEEKHESDSDSDNEIKPDPGLVALQYQNSLESVAQQQQQQQVVDVSGAGHNPYGDDMLQIALKMATGDYDNHHQTSTVDLETSMTANTISSQSPMGHDGMGQMGVHHLDQQHHMLDATQRTARGRKRGVGVVMDPPNRNSRSPVKRQRGGEMDHSALQQQSQQAQQPQEKPDAQMFLKYTFGVNAWKQWVMTKNADIEKSSMRRRPFKTELLQMTADELNYSLCLFVKEVRKPNGTEYAPDTIYYLVLGIQQYLYVNGRIDNIFYDPYYERFTECLDEVARKFSVLYNDSQYIVTRVEEEHLWECKQLGAHSPHVLLSTLMFFNTKHFNLTTVEEHMQLSFSHIMKHWKRSSQNSKVPGSRNVLLRFYPPQAGLDANPRKKKVYEQQENEENPLRCPVRLYEFYLSKCPESVKTRNDVFYLQPERSCVPDSPVWYSTQALGQDALQRMLHRVKMVKEINIALLTT

SEQ ID NO: 12688 - DNA, 4852 bp, DROSOPHILA
ttgggagagaatacgaggaacgatatcatcgaatgggttcgagaggacttccgtagaaacgatgcgatgtgcgtgcatcggtctttcctggtggtcaacaatgccatcttccagcttgagcatgttgtagatggtatcgccggtgatctttccaaaaagcgtgttcttattctgcagctccggtgtcggagcaaatgtgaagaagaactgtgagccattgtcatcctttccagaatttgccatgccgacgaggccacgacgcgtgtaccggagtcgggagtggaactcatccttgaagggctgtccgtatatggactcgccgccggtgccgtcgccattcggatcgcctccctggacaataaagcccttgaccagccggtggaattcggtgttcttgtagtagccctctaggcagagttgcacaaagttgcggcacgccttcggacactcccgtgcccacaactcgatgtctatgtcgcccacagtggtcttaaggagcacctttcccgacgtgggtggttcttggatgtaaatattgctcattttttaacaaaaatcaaaacaatctcaacggcagtgtgaccgcactccacgctttacaaaataccaacaattcctcgaacacttgtttttttttaatatcgttaaaaaaatttaataaaattataacaatttaaatttatatcaattaatggtgtaaagctagtttgattttatttttattctaaggtttcatatctgtaagcctccattggaaatgctataagctctcatgcaaaggaattaagtaaaaacctgaaattaaacatacttttaaaaactatgtagtcattgaaatcccaaaacatttttttacgctatcccttagttaatattaaagactactttatcctgttcgattattttcgttgctgtagacatttaaaattcgttactaggcaaccgtatcgtttacatatcaatagttctttttactttttaccattggttattattcacaatgaatttcaacgacgatccactggctgaactgctcagcgataatagcctggataatgacaacttctttgagacgccagcgggagtgggtcacaagaagccagccaaattggcgaagcccaagggaaaactggaggatttgtttgggattcaggaggagacggaggcggatgtccagggacagggaacgggtgccagaaagacacccaatgccatcagcacgccgagaattgtgaagcagaagccatctatctcactggatgatgatctggtcgaggacgatgacttgggttttgatcccaaacgacccaagagtggcggcaccaaaaggagccttttcgatgatctgttgaccagcaacgcggagcccaagaaaaacattttcgatgagattctggcgggagatgccgtcaaacgtccggccactagcaaaccatccatgtcgcgccaatccacggacaccaccacggacaactcgcaggcgaggcccaagacttctaccggcagaagaagctcagcgcaatcggccaccattaatatgaatgccgatccgttgggcctttttggcagggatacgaatgctactgtttcgggaatgtccactcccgtttcgaaaaaacggggaactaccgcggattggttgggtctggagcaggagccggatcagcgaccgataacaccgaaagcgcagaccgccaaggcgcagccctcaagtgaaagtccttccaagaatacagccgacatcctgcgcctgcccgactccgatgagaacggtatggagcaggaggcggaaatggccgccgtgcccgccccatccgtcgtcactgccgccacccaaaatatcctcatgcttagcaatctcaacctggagagtaaccataaattcaatgccctgcagcagcaggaggcacaattggtgattgccgcccaaatgaagagtcaagagcggactctattggagatgcagcgtcgccaagaggatcaggatcgaaagtttcaggcattaatccaacagcagctgcagcgacagcagcaaatggaggagcatataaaaggccagcaggagcggatcaacatgcacctccagctgatgatgtcgcagccagtgcgtgtacaggatgtggtgtccacaccgccgctcgtggagaaaccggaaccggaaccggaaaggaaggagcaccacaaggcgaccagtcaggaacaggagcatttgcttctgctagaaatggatgccaaacgcaatctgctggagaaacagcgactcgatgagctggtggccaacatgaaggtcaactatgagcaggagatcgaaatgatagattcttcatataagtaagttttaaccagctgctgaaataataatgcaaatgagtaagagaatttaattttatgtccagaaaacaaatcaaggtgctggaggagcacttgtccgtcgtagagaaacgactcaaggacgagaatagcgagttacggcagtactacatcgaaaaactggagaagcagaaggaggactatgtggagcagatttccagcctgcgacaagatcatgaggatgaggtgcgcaagctgcgtcaatcccacgagctggacctcgagggtattcgtcaggctaaaatggtggagttgtcggcggtgcaggatcatggaaattatctggacacattgcgtctggcgtccagcaatcttcaagaacttcgtgacgggatgagtgacaaccaggaaagggaacggcagttggaggcgcgagaacgtcgcctggccgaccaggaaaggcgtctaaagatggacgaggagacggccgacgatgagaagcgccgcctgatggaactggtgagcaccttggagctgcagctgggccgtttgtccaaggagtcagccgaagagaactggcagctccgtcaacgaatgtccagcttggaagcggagcgcaaggctttcgagcgcgaaaaagaattccatcgcgagcaaatgcagcgggacgagaagcgtgtggaggatcttaaagcactgcagcttgcggaaatggaacgactgcaccacgatctccaggaggagcgcaatcaactgacagtggaacgccagcagattgaactaagacaacagctcaatgagcacggcgacccagacagagatcgccgggaactggaggcccaactgcaggtggcacgcgaagccattcggcgggcggatgaggagcgggatcgctaccacaagctgcagcgcgaaatggagcagcgcaagcgccatcttctggataaggagcacgccctaaatctcaaggaggacgaactgggccaagccaccggcgcctaccgcctagccactagtcgccaacacttggccgagcagaaggctagggaggcggaccagctgctccaggccaagcttaaggtcatggccaagcgggcccaggaaatcgcggaaaaggaggcacagctggcccacgaacgaatgctggtggcgcaggatcgtatggctttggtcaatctgaagaagcagatttctcgcagcaggtgtgcaatctgcaaaatgggtgcggaatcggcggaaatcgcccagcgaagggcaaatgtaaatcccacagcagccaccgatcttcaactgcctcaagtgacacccagtcatgcggagctgctgcttaaaatgtcccaggaaccgggacaggtccagagtgacattgtggatcgaatgctggacgaaaacatcgaagcctcctaccgcaggatgtacaatgcgccccccagtagttcaatcgatgatcccgactatctattgacgttagctggtgggctggacgacgactccaaggtggccatggatcacggcctgaatgtggacgaagcatttatgtagatattgtggaaaaatttgtggaagcacaaataataacaactgagataaataaatgtattacttggcaattagtataagttttataaacaaactatgaagatacaagattacatatcgctcgaaagttaagtattttgttattcgttagaaactcaataaatttgaattgatggagtgaaacccggctacatgattagccaatactcaaacatctgttcgatgtatctttcatcgatagttgccaaacaatatcgattcgtttaccatcgctactgcttgttgcattccgttttgtgttatttcgtgctgttcgtgtttaaagttcttgcgcacaagataattgttttttttttattgtaaattaactgatttgtacataatatgtgatggtgcaagaaaatctaagaaaataacgttttgttcagtattttggtgttgcgtctattccgttttttgtcactgttttctgttcgtgtttgtgtatggtcgtttcgcatgtatgtgtgtaggtgtttaggtgtgtaggaggataaaacaactctcctaaaaacaaaaaaaaaacctttggttaagtttaaattaattgtgattcgtcaaatataacaacaaccgaggataaaagtgtaaaactattaaccggatggtctatgttcgtagccccgtcaagggaaaacctcaaccaaaaagagactagcaacgggtgtaaaaagcagcggaggtgacacctcaaaaagcaagtaagttggcaatatgcggatgagaatcacaaagcagaagtcaagtctgcatattaatgactatctccattattattttctttcgcccttccaccgatattcgttttttttaaattttattcttacgttctccggaataaattggcattcaattgggttcatttattgtttatgaatattgtttttaaaaattttttcgcaatctattgatttaccttaacctttgccgcacggaaccctctcttttgctctctcttcctcgc

SEQ ID NO: 12689 - DNA, 2787 bp, DROSOPHILA
atgaatttcaacgacgatccactggctgaactgctcagcgataatagcctggataatgacaacttctttgagacgccagcgggagtgggtcacaagaagccagccaaattggcgaagcccaagggaaaactggaggatttgtttgggattcaggaggagacggaggcggatgtccagggacagggaacgggtgccagaaagacacccaatgccatcagcacgccgagaattgtgaagcagaagccatctatctcactggatgatgatctggtcgaggacgatgacttgggttttgatcccaaacgacccaagagtggcggcaccaaaaggagccttttcgatgatctgttgaccagcaacgcggagcccaagaaaaacattttcgatgagattctggcgggagatgccgtcaaacgtccggccactagcaaaccatccatgtcgcgccaatccacggacaccaccacggacaactcgcaggcgaggcccaagacttctaccggcagaagaagctcagcgcaatcggccaccattaatatgaatgccgatccgttgggcctttttggcagggatacgaatgctactgtttcgggaatgtccactcccgtttcgaaaaaacggggaactaccgcggattggttgggtctggagcaggagccggatcagcgaccgataacaccgaaagcgcagaccgccaaggcgcagccctcaagtgaaagtccttccaagaatacagccgacatcctgcgcctgcccgactccgatgagaacggtatggagcaggaggcggaaatggccgccgtgcccgccccatccgtcgtcactgccgccacccaaaatatcctcatgcttagcaatctcaacctggagagtaaccataaattcaatgccctgcagcagcaggaggcacaattggtgattgccgcccaaatgaagagtcaagagcggactctattggagatgcagcgtcgccaagaggatcaggatcgaaagtttcaggcattaatccaacagcagctgcagcgacagcagcaaatggaggagcatataaaaggccagcaggagcggatcaacatgcacctccagctgatgatgtcgcagccagtgcgtgtacaggatgtggtgtccacaccgccgctcgtggagaaaccggaaccggaaccggaaaggaaggagcaccacaaggcgaccagtcaggaacaggagcatttgcttctgctagaaatggatgccaaacgcaatctgctggagaaacagcgactcgatgagctggtggccaacatgaaggtcaactatgagcaggagatcgaaatgatagattcttcatataaaaaacaaatcaaggtgctggaggagcacttgtccgtcgtagagaaacgactcaaggacgagaatagcgagttacggcagtactacatcgaaaaactggagaagcagaaggaggactatgtggagcagatttccagcctgcgacaagatcatgaggatgaggtgcgcaagctgcgtcaatcccacgagctggacctcgagggtattcgtcaggctaaaatggtggagttgtcggcggtgcaggatcatggaaattatctggacacattgcgtctggcgtccagcaatcttcaagaacttcgtgacgggatgagtgacaaccaggaaagggaacggcagttggaggcgcgagaacgtcgcctggccgaccaggaaaggcgtctaaagatggacgaggagacggccgacgatgagaagcgccgcctgatggaactggtgagcaccttggagctgcagctgggccgtttgtccaaggagtcagccgaagagaactggcagctccgtcaacgaatgtccagcttggaagcggagcgcaaggctttcgagcgcgaaaaagaattccatcgcgagcaaatgcagcgggacgagaagcgtgtggaggatcttaaagcactgcagcttgcggaaatggaacgactgcaccacgatctccaggaggagcgcaatcaactgacagtggaacgccagcagattgaactaagacaacagctcaatgagcacggcgacccagacagagatcgccgggaactggaggcccaactgcaggtggcacgcgaagccattcggcgggcggatgaggagcgggatcgctaccacaagctgcagcgcgaaatggagcagcgcaagcgccatcttctggataaggagcacgccctaaatctcaaggaggacgaactgggccaagccaccggcgcctaccgcctagccactagtcgccaacacttggccgagcagaaggctagggaggcggaccagctgctccaggccaagcttaaggtcatggccaagcgggcccaggaaatcgcggaaaaggaggcacagctggcccacgaacgaatgctggtggcgcaggatcgtatggctttggtcaatctgaagaagcagatttctcgcagcaggtgtgcaatctgcaaaatgggtgcggaatcggcggaaatcgcccagcgaagggcaaatgtaaatcccacagcagccaccgatcttcaactgcctcaagtgacacccagtcatgcggagctgctgcttaaaatgtcccaggaaccgggacaggtccagagtgacattgtggatcgaatgctggacgaaaacatcgaagcctcctaccgcaggatgtacaatgcgccccccagtagttcaatcgatgatcccgactatctattgacgttagctggtgggctggacgacgactccaaggtggccatggatcacggcctgaatgtggacgaagcatttatgtag

SEQ ID NO: 12690 - protein, 928 aa, DROSOPHILA
MNFNDDPLAELLSDNSLDNDNFFETPAGVGHKKPAKLAKPKGKLEDLFGIQEETEADVQGQGTGARKTPNAISTPRIVKQKPSISLDDDLVEDDDLGFDPKRPKSGGTKRSLFDDLLTSNAEPKKNIFDEILAGDAVKRPATSKPSMSRQSTDTTTDNSQARPKTSTGRRSSAQSATINMNADPLGLFGRDTNATVSGMSTPVSKKRGTTADWLGLEQEPDQRPITPKAQTAKAQPSSESPSKNTADILRLPDSDENGMEQEAEMAAVPAPSVVTAATQNILMLSNLNLESNHKFNALQQQEAQLVIAAQMKSQERTLLEMQRRQEDQDRKFQALIQQQLQRQQQMEEHIKGQQERINMHLQLMMSQPVRVQDVVSTPPLVEKPEPEPERKEHHKATSQEQEHLLLLEMDAKRNLLEKQRLDELVANMKVNYEQEIEMIDSSYKKQIKVLEEHLSVVEKRLKDENSELRQYYIEKLEKQKEDYVEQISSLRQDHEDEVRKLRQSHELDLEGIRQAKMVELSAVQDHGNYLDTLRLASSNLQELRDGMSDNQERERQLEARERRLADQERRLKMDEETADDEKRRLMELVSTLELQLGRLSKESAEENWQLRQRMSSLEAERKAFEREKEFHREQMQRDEKRVEDLKALQLAEMERLHHDLQEERNQLTVERQQIELRQQLNEHGDPDRDRRELEAQLQVAREAIRRADEERDRYHKLQREMEQRKRHLLDKEHALNLKEDELGQATGAYRLATSRQHLAEQKAREADQLLQAKLKVMAKRAQEIAEKEAQLAHERMLVAQDRMALVNLKKQISRSRCAICKMGAESAEIAQRRANVNPTAATDLQLPQVTPSHAELLLKMSQEPGQVQSDIVDRMLDENIEASYRRMYNAPPSSSIDDPDYLLTLAGGLDDDSKVAMDHGLNVDEAFM

SEQ ID NO: 12691 - DNA, 5523 bp, DROSOPHILA
ttccggcacgtgtgcgctgttgagtatttatttttaatataatcattccgcccacttaaaatgcccactttatgtatctgggtgacctgattttgccaaatagagtttacagattatttatatcatttttatttattaactaattattcaacaaataaattggtgattaaagttactaattgtacttcccttttttatctgtaacctcctcaagttccagttaatcaaataaaaggtttcctttacgcaaaagcttgttaattcaagaactaatcgctttgccttaacttatcggccagaggcacttcaaaatgtattgataatcaaaatggagaatttacccccatcaaatgggggcgttgttttggttattaagccccatttatagattttaagagcggtagttgtatattttacggcctctacttgttactggggaaaattgggttttgattacaaaagtcggctgacatctatcgaattatttgaatttgaatgaagtgaagtataaatctgattgagcttttcaacattgaagtgagtctacttggagatgtctaagttgcatccgttgaagataagattggatttagttagatttacataatattaactcttggtaacttataactaaattaactgtcggaggttgtacgataattaatcttgagagcaaaaagtgtcgagcatacacgcgaaaactcaagaataccacttggcactcgaaaaaaccgtttttatcactagtattagtgatggagaaattgaaactttcctgtacacaagttaagtaggttctaagctcgcgcggaaatcccccatgtgcctcatcaacagggatatatggattcttattttactatccgataatgtttcttatgttccgaccccacttaagtttattcctttttaattggcttatgtagttgatcggctcgtatcaaattaagtacttaactaaagtgcttgactaaactgtttataagggaatggttatcagaaaattttcaccagttgagtcgcaaaatgtatagatcacacatcgctgtcatttgtgccttcgtgggcatattcgtggggacagttgtccagtctgctcctttttccaatgatcctgcagaggtcccaaacttctatgaattgttcaataatcccgatgcacacttatccttgaccaatggtcccgacacggtatgtttgactcacctttctttagattattgtattaaatatatgctctctgcagatccatttcatcgaggaacatggttatccagttgagcgacactatgtgaccactgaagatggctacattatcagcctcttccgaattccatactcgcacaatatccaaaaccagcaagaaaagaggcccattgctttcattcaacacggtctttttgccagctccgacttttggccaagcttgggaccggatgatggacttcctttcctgctctccgatgctggatacgatgtttggctgggcaatgctcgtggaaacagatactcgaaaaaccatacctctcgtctgacaagtcatccggacttctggcgcttcagttggcacgagattggatactttgatattgccgcagctattgactataccctgtccacggagaacggacaggatcagaagggtatccactacataggacactcccaaggcaccacggttatgtttgtgctgctgtcctcaagaccggaatataacgacaagatcaagacggctcacatgctggctcctgtggcatttatggatcacatggacgatgttatggtcaacaccttgtctccttacctcggttttaacaatatctactcgaccctcttctgttctcaagaattcttgccccacaacgatttcgtcctggctctgatgtacagtgtttgtcttccggaatcgattgtttacagcttttgcagcagcagtaatgaaacaactactgaggaaggaagaactaattcggtgagtacatcgaattcctttcttatttatgtatttatttattcatattatctatttaccaaaaagaccgcctctgcgttgacttctggagtgatgcctgctggtgtttccacggatcaaatcctgcactacatgcaggagcatcaatcgggacatttccggcagttcgattttggcaccaaaaagaatatgaaggtctatggaacggaagccccagaggattacccaactgagctaatcacggctgagatgcatctgtggtattcggacagcgatgagatggccgcagttgaggatgtcctgagggtggcggaaacgctgcccaacaaggtgatgcaccatatggaggatccactatgggatcatatggacttcgctctcaactgggaggtgcgccaatatatcaatgatccgattgtagccattctaaacgagtacgaggggaagtgatacggacattgtcctggtgcttaacttaacttagttttaatctaggtccacttcggttgatcctatcatatcatatcataaacggatgtataactctttagcattgaacagatttgcacctcaagctcgacatttatttcattcatacttaatgtacacatacatgcttactcaaatcataagaaatcactcgatttttcttagtaaaagtaacttccccattaacaagtttgggttataaaatatacgactactgctttttaaatctaaaagtggtttcttaatcttaaacctttgaagggggcacacttttttttagattttctggactggtcaagtggctaaatagttgataagctagaattaatgaggcacgtcgtttttgaatacgtcaaactaaataacttttaaaataggtaatttattgttcattcagaattttatgttttataatttgccgaaattcatgaaatataaatgttctaactattaactatttgagtatttatttcgttctgtttattacttttagattagcactttctgttatttgtggattatcttgacagtctaaatatatattatcaaagcaccgatagtaagagctacttgaaactaaaccacccaggaacttctacaaaagctgaaagtcatgtgtttaccaacagtcagtacacatcggaccatcgaggacataagtacatagaatgaaccgattcacgggaagtttacttgtcctggttgctcttgccgtgggagtttactccgcggccatagatggaccgattgatttctacaaactgtatgacaatccagaggctcacattagcctcaagagtaagataacaacggtcagtttgatttaaattagaatttaatgaaatttaattagtatttaattatatttgccgaccttaggctgaccgcactgccgctcacggatatccttcggagcaccatcacatagttaccgaagatggttacatcctgggagttttccgaatcccctactcccacaagttgcagaaccagaacgaaaagcgacccattgtccttcttcaacacggattgacgagctgttcggatgcctggattttgcaaggacccaatgatggtctgccatatttactggcggatgcgggattcgatgtttggatgggcaatgctcgtggaacttcctattcgagaaatcacacgacgctctccccggatcatccaaatttctggaaattcagttggcatgagatcggcatctacgacataaccgccattattgactacgcccttagcacggagaatggtcagggccaggatgccatccattatgttggacattcgcagggtacaacggtattttttgcactaatgtcttggattcccgaatataacgataagatcaaaaccgctcacatgtttgccccggtggctataatgaaaaacttgtccagcggattagtgcgttctgtgggtccatatttgggtcataggaacacatattcggtgctttttggatcacaggagtttttgcctcataatgagttcctcatggccatattctttaatatctgccaaccggactttatgttgcgtccagtgtgtgaaagtgccatggagaaactttatgcaggaggtcgtgtgaatatggtgagtattattttgcaaaaaaaaaaagtaaaataaattctaataattgtaaaatcattagactgctatgccggaaggtatggccacccatcctgcaggctgttccaccgaccaaatgttgcactacctacaggaacagcaatcgggttacttccgtctatttgatcatggcaccaagaagaatctagaagtctacggaactcaggaacctccagagtatcctgtagagttgatcaattccttggtgcacatgtggtatgccgatagtgacaatctcgccgctgtggaggatgtcgagcaaatagccgaaagattgcccaataaggttatgcaccgcatggcggatacggaatggaatcatggggatttcgccctgaactgggaggttcgtaaatatatcaacgagccagtaattgacatcatgatggaatacgagttaaagaacattggcacgtgataaataggttccctaatctctaatataccttatacctgcggtagtcggatttattttaagtttacacataagctagtcacatttaaccaaaagttatttacagagagaaaatattaaaaaatacttacaacctatatatcgttgcatatagtttaatcgacttcaacaaacgaaagccgatattaaaataaatacagaaacaagttcggacgataagatgtgcagcttaactctttacgaactttagcttatggatggccaacttttcagacgcttttccttgtaaccacaatcgcttttcattccccccggcctcttcacacattcgaacagagaaatacatttgatttttccactcggccaacttctgattgccagttgatagccggccagccgaaggaataatgcatattcaagcttttcattcccatttcatggttcttggcatcatcgcaactcccccaagggccaagttgatttctgggctttcgtctgggcataaatgggcccgggtggatatctaaaaaaaaaaaaggcagagcaagatattaaaacagagtctggcttctggctaatggatgctggtagctggcaagttcaaggccacgacttgcgtgggcgatggatactccctggatccgaatttggatttgatttaattggtcttaatttgtgggccgtgtaatcaatggcactgaatagttcagtctgccaagaaatacgaatgcgattacttaactagattaattgaagtttacatggcagtgtgctaattttggaattgtgttttcggcatttaggtagaaattaaagtattttttcctccgcgaaatgttctttagcacttagtcaacgaggcgtggcaagtaaaaaacacacggaagcgttaaattggctcaagtgtgcacatcgaaaaacacacacaacaactataaagatataagaaaaggaggaggttgcgactttaagatacttactaaagggtaaattgggtatactt

SEQ ID NO: 12692 - DNA, 2543 bp, DROSOPHILA
aaaattttcaccagttgagtcgcaaaatgtatagatcacacatcgctgtcatttgtgccttcgtgggcatattcgtggggacagttgtccagtctgctcctttttccaatgatcctgcagaggtcccaaacttctatgaattgttcaataatcccgatgcacacttatccttgaccaatggtcccgacacgatccatttcatcgaggaacatggttatccagttgagcgacactatgtgaccactgaagatggctacattatcagcctcttccgaattccatactcgcacaatatccaaaaccagcaagaaaagaggcccattgctttcattcaacacggtctttttgccagctccgacttttggccaagcttgggaccggatgatggacttcctttcctgctctccgatgctggatacgatgtttggctgggcaatgctcgtggaaacagatactcgaaaaaccatacctctcgtctgacaagtcatccggacttctggcgcttcagttggcacgagattggatactttgatattgccgcagctattgactataccctgtccacggagaacggacaggatcagaagggtatccactacataggacactcccaaggcaccacggttatgtttgtgctgctgtcctcaagaccggaatataacgacaagatcaagacggctcacatgctggctcctgtggcatttatggatcacatggacgatgttatggtcaacaccttgtctccttacctcggttttaacaatatctactcgaccctcttctgttctcaagaattcttgccccacaacgatttcgtcctggctctgatgtacagtgtttgtcttccggaatcgattgtttacagcttttgcagcagcagtaatgaaacaactactgaggaaggaagaactaattcgaccgcctctgcgttgacttctggagtgatgcctgctggtgtttccacggatcaaatcctgcactacatgcaggagcatcaatcgggacatttccggcagttcgattttggcaccaaaaagaatatgaaggtctatggaacggaagccccagaggattacccaactgagctaatcacggctgagatgcatctgtggtattcggacagcgatgagatggccgcagttgaggatgtcctgagggtggcggaaacgctgcccaacaaggtgatgcaccatatggaggatccactatgggatcatatggacttcgctctcaactgggaggtgcgccaatatatcaatgatccgattgtagccattctaaacgagtacgaggggaatttacttgtcctggttgctcttgccgtgggagtttactccgcggccatagatggaccgattgatttctacaaactgtatgacaatccagaggctcacattagcctcaagagtaagataacaacggctgaccgcactgccgctcacggatatccttcggagcaccatcacatagttaccgaagatggttacatcctgggagttttccgaatcccctactcccacaagttgcagaaccagaacgaaaagcgacccattgtccttcttcaacacggattgacgagctgttcggatgcctggattttgcaaggacccaatgatggtctgccatatttactggcggatgcgggattcgatgtttggatgggcaatgctcgtggaacttcctattcgagaaatcacacgacgctctccccggatcatccaaatttctggaaattcagttggcatgagatcggcatctacgacataaccgccattattgactacgcccttagcacggagaatggtcagggccaggatgccatccattatgttggacattcgcagggtacaacggtattttttgcactaatgtcttggattcccgaatataacgataagatcaaaaccgctcacatgtttgccccggtggctataatgaaaaacttgtccagcggattagtgcgttctgtgggtccatatttgggtcataggaacacatattcggtgctttttggatcacaggagtttttgcctcataatgagttcctcatggccatattctttaatatctgccaaccggactttatgttgcgtccagtgtgtgaaagtgccatggagaaactttatgcaggaggtcgtgtgaatatgactgctatgccggaaggtatggccacccatcctgcaggctgttccaccgaccaaatgttgcactacctacaggaacagcaatcgggttacttccgtctatttgatcatggcaccaagaagaatctagaagtctacggaactcaggaacctccagagtatcctgtagagttgatcaattccttggtgcacatgtggtatgccgatagtgacaatctcgccgctgtggaggatgtcgagcaaatagccgaaagattgcccaataaggttatgcaccgcatggcggatacggaatggaatcatggggatttcgccctgaactgggaggttcgtaaatatatcaacgagccagtaattgacatcatgatggaatacgagttaaagaacattggcacgtga

SEQ ID NO: 12693 - protein, 838 aa, DROSOPHILA
MYRSHIAVICAFVGIFVGTVVQSAPFSNDPAEVPNFYELFNNPDAHLSLTNGPDTIHFIEEHGYPVERHYVTTEDGYIISLFRIPYSHNIQNQQEKRPIAFIQHGLFASSDFWPSLGPDDGLPFLLSDAGYDVWLGNARGNRYSKNHTSRLTSHPDFWRFSWHEIGYFDIAAAIDYTLSTENGQDQKGIHYIGHSQGTTVMFVLLSSRPEYNDKIKTAHMLAPVAFMDHMDDVMVNTLSPYLGFNNIYSTLFCSQEFLPHNDFVLALMYSVCLPESIVYSFCSSSNETTTEEGRTNSTASALTSGVMPAGVSTDQILHYMQEHQSGHFRQFDFGTKKNMKVYGTEAPEDYPTELITAEMHLWYSDSDEMAAVEDVLRVAETLPNKVMHHMEDPLWDHMDFALNWEVRQYINDPIVAILNEYEGNLLVLVALAVGVYSAAIDGPIDFYKLYDNPEAHISLKSKITTADRTAAHGYPSEHHHIVTEDGYILGVFRIPYSHKLQNQNEKRPIVLLQHGLTSCSDAWILQGPNDGLPYLLADAGFDVWMGNARGTSYSRNHTTLSPDHPNFWKFSWHEIGIYDITAIIDYALSTENGQGQDAIHYVGHSQGTTVFFALMSWIPEYNDKIKTAHMFAPVAIMKNLSSGLVRSVGPYLGHRNTYSVLFGSQEFLPHNEFLMAIFFNICQPDFMLRPVCESAMEKLYAGGRVNMTAMPEGMATHPAGCSTDQMLHYLQEQQSGYFRLFDHGTKKNLEVYGTQEPPEYPVELINSLVHMWYADSDNLAAVEDVEQIAERLPNKVMHRMADTEWNHGDFALNWEVRKYINEPVIDIMMEYELKNIGT

SEQ ID NO: 12694 - DNA, 6488 bp, DROSOPHILA
ttatgtatgtacgtatttacccagaatacacgcacatgacatacgttacacgagccacacatttaactaatcgaataaatgttgaatttaatgtatactaatattataaatcgatcgatcgacctaagaagtatgtaaaacgcgggaacattgcaaattatgaaatatgaatgagaatgtgcgttcatttcagatccaagcccaaattgataatttaagtccacgacagccgatgcatttgttgtttaagtttgagaaaagtctattgtttatattgttaaggacacacgtgttacgcctaagtttatttattattagtttaacgaaatctgttgattacttttaccacaagaaaccacacatcacgttctctaagcaatcaccatgagttcctctcatcaatgttaactgcatcaccggaaacaaaatactaacacggctttaattactctgtttgttacatgatcccaaaaaacagttgaatggactacccataattactaataattaattgttattgcgaatcctgcaaccgttcgaaccaaacagatcgactgacgaaaaaaagaaaaacaacagctccaacacgaaaacgaatcaaatgcgggtagaaatataatagaattgctttcgccgcgaaagttaagcgattaaaaagtacgttttaagagaaaaggcttgggaactagatgttcaaagcaatgtgtcgtgtccatgttgtttcgaaaacgacatacctgttcgggaataatattgtgaaacctaatacctaatcgatgaaaaaccaaaacattttgattcataatgttatgtacattttaaatgtaaaaaaaaaaattaaatacaaaagcacaaaataaacaaaaacaataccctcaataaagatttttttaaccccgttaaagataagtgttttgactttaaagggcgggtattccccggatttaaatccattatcttagcctaataaaattcgatgcccggccaaataagaaaacagttagttaaaccaagagtagatcaaatgtactgtttattcataagtataatatagtttggttgtatctgatgcatcttcgagtttttcaacttctgtgtgagaattacacgattgacggtacaaaatacaaaaaaagagacatacacatatgtactgtatagtataattatatgtataatcgtattttataaaatcataaaatactcttcatatagttgtttggttgttttgtagtatctttttttttttatgttttccactcgttttaatgcaaagtacaaatattaaaaactcgcttaatgcgctcgaaatagtttttcacttcatcaaaaattttccctcttagcatctcccacgcgaaaactgaatgcatctcatttgtggcttacgtttagttaaataaacatttatcgtttttgttttgttttgttttgtgtttagttcggctcttgtaatgtagtttcgcttccaactcctattggcggcctggtctctctgtatttgatagatttaatgggaacataactctcatcttgacgcctacgacctccttggaccccgggatccaacatccgattccgtttccgattctgttcctaattccactgattcacctgactcactcaccctcgcatacgacacaatctcgtccagccacagccgactctacacttgacaacacagttaacgaaataataacatacatctaggaggagggggtggacagaaacggacacaacttgaatatgtttacatatatcgatatatattttttgcttgcagtggctgactgattgatctgctctgccctagtttttacaaataataatgccagagttattactgttgtttacttcggtttataactacactagactgtatataaaatcaaatccgcatttgacattctacttggtgctgccttcccttatatctcgctgcatccctcctccgctgatcttctagctcaagctctctgttttctgctcatgtttgttgctggttgggtggtggtgcagcttcgtgtatccgatgttctggttgttcttgatgttgttgttgagtggttgttgttcagctcgttattgttgtaaaaggtgtgtatgtgtgtttgtgtgtgtttatgctgttgtttttgctgtgtgtgtgtgtggtaaagattttcatgttgttgatttgctcttttagagcaaaaggcatctggtcttcttcctctttttgacttgcagcgcggccctagttgccgtctcgaaaacatctcgcacaccctccttggacttagccgaacactccaaataggcaaaggcattaatcttctcggccatggcgcgaccctcctgcggcttcaccggctcctgcttcatttttgctagatcctgtaaaatcaagtttagtttagtgctgcaagttcacctcgttcaacagcgcgtatacgtacccgaattgtgttgggatcatttcgcaaatctttcttatttcctaccaaaatgattggaacatttggacaaaagtgtttgacctgcaataatgtagtaaggattagtatcatattttgatatcagattccatatagtcgaactgcaaaaacaagtaattcgtaattgggaaccacttactttcttcttatctatatctatcattataaattaaaggctgagaagtaaggaaatgattcagaaagtcaaagcaaattggctcatagcagactatttttagtgattaaactagaaataaccaacaattctattaaactttcctcgttctaaaccaaaaccagtctttcagatagcttcaatgacataaacaagaacacagagatgcatagtcttaaagattccatatcataagcaaatgcattcgataacttcaaaaatgtttaatatattttaactggagttaaaagttcaactttttccaaatttgcatcattacataaaaattaaaaacatattttgtctagacttgttagttccgtatagtatatatatatatagtaccatacttgtttacgatcgtctgatagaaactgttctgtaattccagttaaactcacctctggggtccatttttcaggaatattttctagcgaatcgggtgaatccactgagaaacacatcagtatgacgtcagtgtcgggatagctcagcggtcgtagtctgtcgtagtcctcctgcccggccgtatcccacaaggccagctccacctggagaatcggatgcggattatgattgagagttacgcttgcagttgcggtgtcgtcagggttatagatagatggggctttttgtggcacgggacggtgcgatgcgggctcggaggagaatgggacaagttcgagttgaagatagcatgagtgcgagtacgagagtgtgagcaaggaacttgacggaaatgccaaacgaattaatcacatcgaagcgaggcgaagtggaatgacgtgaacttgtgtgtatgtaaacgctatccaaacagaaacacaaacagaaactgaaaattgaaaacccgccatattgcgcagcaaaggcaaacacacagtgtttatttcgaaaaaaagcgcctgaaaatactgtagatcccaaatggaatatatgaacgaacatatagccaaatcatgacttgatgccccaatggaaaacgcacattacattccatagagtaagggagtgcgcggtggagcgggagagcgctccccccccttagaagagagtacaggtaggcagggagaaagagtaagagtgagagcgcccgagagagcagcagaaagagcggggggcggcgcaacgcattaaactgtatgtgcgcaacggacttgtataagacaaatacaaaataaaaagaaaagaaaacgagcggaaggaagggagcagcactacttctgtgtgtgtgtgtgtgctgccaactctctgttgagcatgtgtgcgtgtaagtgtggggaaatgtgcccaagtgtgacttaatcactgctatcaaaactttgaattcttcggaaaaatccaaatttgcactccacttaaccaaaaatgatcttaatttttcttttgcttttccagacacctttatttatggatgcgtctgtgggcatgaggcgatattgactcatttcattttacaggcgaagaaaaggaaatacaacgaccaaggtgtgggtgaagttgtgggtggcacaaacaagagaacaataaacacacacccatgggaacacacacccgcacacacacacacacacacacacacacacacagaggcgggtggaaagtgtaaggaggatacgcgcacttgaaaaacggaatgaattgagaatgcacacaaattataaaacgagatcagacgattatcacttggatggcagggtggggttatcaggggaggggggtcagccaccggttgggggtggcattcagagtggtggacgggacgggtagttaggggaggggcgggcctgtccgggaaaaggggcttacctgtttgccatccacctcgatgtcggccacataattctcgaatacggtgggcacatagacctcggggaactgatctttgctgaagacaatcagaaggcaagttttaccgcaggcaccgtcgccgacaattaccaatttcttgcgaatcgtcgtcattggaagttctgcaaaaggcaaaatcaaactgtagctagatgcaatgcaagtgcagcggatgcccgaggattccgagtccgattctgaatccgaatacaattttcgattccgaatccgagtcagccgttctgttttatatattcgcgaaaactgaacgagcgcctgttcaaaaaattatcaaaatgaaaaagccacacacacactcgcatacagtcacacgcacactggtggacacacagcacaaatacactcgcgcgctcgctctcttttccgatagccctctcccgctcgcgcacacacttagtcatacttgcggctggacggcgatctaatagtataaagtgtggggttctttcttatctggccattgtccattgtccgttagccgagtttttcccgtttttctttacggtttttcgcattcgcattttcattttggtcgcgtcatagggccgcccgcttctccacccctctctccaacactccaggaaactcctctctccgcgcccgtcccgctcacactttattccaaaaacatctcatcatccactctcggtatggctgtgtgtgtgtgtgtgtgcgtgtgtctgttcgcctctggctgggcgtgcgtgcatttgtgtgcgtgctgtgtggaattttttcacttctgctctttcggccacttacaatttatattggtgatttcacaacactcagcacgaattcgacacttaatttgcttacaaaatggcacaaatttgttgattcttatgcgtctaccgtttagctatatcgtataaaagttaatgcaattacaaaaattcgaattgaactcgacgattttttcccatgcaaaatgacgatgaacaatgttcatccgtttcatttctcggtagcgggatgaacgctcgatgaccaaccaacgccttcgagcgcagggctgttattaacccaatcgatagttctcatcgatggcaactctgtgcgcgttattcccatgaccgaccacgactggtaacaccgcacatatgttattcttgctcttcttcttaaatttgcggtcgcatggcccgggaagtattggtagttcagcaaaaaactgaaaaggaatgcttgacgaacatattctgaaagaaatgaaactgagcttccagctcaccgaacagcgagaactagcctctggtcgccgtaagccggaaaaaccacaacacccacctgctgttccaaagaaaaaagttatttcaaaggtggccagcaatcctgcaaagatttcggaaacaatgattcaaaaagcccagatggagtcgcccaaaaaatccaagaaaaataagacagccggcgcaaagagacctctttccaataatgtgtcgaatccagacagttcaccatcccagaagaggcttaaaaaggataataccctacccaaaaagaatcctgtaaataaatcctcaaatgttgcagctaaaaaatctgcagcaacaagcaaaagtgctaagcttcctattcccaaggttcatagtataaatggtatgcattagatccagaattacaacctcattttattttaatatatatgtatttttcagaattagctcctaagaaaaccaaagtcaagacgccaaataaaacaaaagaagcaagtttatctaagaaacataaggtaaatggaaacaagagctcaatgaaggtcgtacaaaatggtaaagtagtagagataattggtactgcagcggaaacaagtgacattgaaatgaattcattggatgattggagtgaagaagacgattatttaattgaaagtggtaaggaatttttaatattactcttgtttcttaacttaaactatgttttttagactctgaaaacgatgtagttgaagaaatagacga

SEQ ID NO: 12695 - DNA, 1973 bp, DROSOPHILA
gaaatgaaacggatgaacattgttcatcgtcattttgcatgggaaaaaatcgtcgagttcaattcgaatttttgtaattgcattaacttttatacgatatagctaaacggtagacgcataagaatcaacaaatttgtgccattttgtaagcaaattaagtgtcgaattcgtgctgagtgttgtgaaatcaccaatataaattaacttccaatgacgacgattcgcaagaaattggtaattgtcggcgacggtgcctgcggtaaaacttgccttctgattgtcttcagcaaagatcagttccccgaggtctatgtgcccaccgtattcgagaattatgtggccgacatcgaggtggatggcaaacaggtggagctggccttgtgggatacggccgggcaggaggactacgacagactacgaccgctgagctatcccgacactgacgtcatactgatgtgtttctcagtggattcacccgattcgctagaaaatattcctgaaaaatggaccccagaggtcaaacacttttgtccaaatgttccaatcattttggtaggaaataagaaagatttgcgaaatgatcccaacacaattcgggatctagcaaaaatgaagcaggagccggtgaagccgcaggagggtcgcgccatggccgagaagattaatgcctttgcctatttggagtgttcggctaagtccaaggagggtgtgcgagatgttttcgagacggcaactagggccgcgctgcaagtcaaaaagaggaagaagaccagatgccttttgctctaaaagagcaaatcaacaacatgaaaatctttaccacacacacacacagcaaaaacaacagcataaacacacacaaacacacatacacaccttttacaacaataacgagctgaacaacaaccactcaacaacaacatcaagaacaaccagaacatcggatacacgaagctgcaccaccacccaaccagcaacaaacatgagcagaaaacagagagcttgagctagaagatcagcggaggagggatgcagcgagatataagggaaggcagcaccaagtagaatgtcaaatgcggatttgattttatatacagtctagtgtagttataaaccgaagtaaacaacagtaataactctggcattattatttgtaaaaactagggcagagcagatcaatcagtcagccactgcaagcaaaaaatatatatcgatatatgtaaacatattcaagttgtgtccgtttctgtccaccccctcctcctagatgtatgttattatttcgttaactgtgttgtcaagtgtagagtcggctgtggctggacgagattgtgtcgtatgcgagggtgagtgagtcaggtgaatcagtggaattaggaacagaatcggaaacggaatcggatgttggatcccggggtccaaggaggtcgtaggcgtcaagatgagagttatgttcccattaaatctatcaaatacagagagaccaggccgccaataggagttggaagcgaaactacattacaagagccgaactaaacacaaaacaaaacaaaacaaaaacgataaatgtttatttaactaaacgtaagccacaaatgagatgcattcagttttcgcgtgggagatgctaagagggaaaatttttgatgaagtgaaaaactatttcgagcgcattaagcgagtttttaatatttgtactttgcattaaaacgagtggaaaacataaaaaaaaaaagatactacaaaacaaccaaacaactatatgaagagtattttatgattttataaaatacgattatacatataattatactatacagtacatatgtgtatgtctctttttttgtattttgtaccgtcaatcgtgtaattctcacacagaagttgaaaaactcgaagatgcatcagatacaaccaaactatattatacttatgaataaacagtacatttgatctactcttggtttaactaa

SEQ ID NO: 12696 - protein, 192 aa, DROSOPHILA
MTTIRKKLVIVGDGACGKTCLLIVFSKDQFPEVYVPTVFENYVADIEVDGKQVELALWDTAGQEDYDRLRPLSYPDTDVILMCFSVDSPDSLENIPEKWTPEVKHFCPNVPIILVGNKKDLRNDPNTIRDLAKMKQEPVKPQEGRAMAEKINAFAYLECSAKSKEGVRDVFETATRAALQVKKRKKTRCLLL

SEQ ID NO: 12697 - DNA, 2642 bp, DROSOPHILA
caccaggctctctcccccactggttctctctcttgctttctctgcctttctctttctctgtttacattgctctctctttgaggtagccgacgccggtccgacgtcatcgcaaaggtcaaagcaaagcagcgcgagtaactatataaaaaaccctacaattgcaccggaaaaaatggatttgcattcgaaattcataagtttatttaaaataaatattttattcatacatctttatttccaacaataattaatgacaaaaataaaatagtatatttagaacttgatttctaataaataaaaaaaaaagaaataaatattttaatctctaaaaatattccatatgaagtatacagtgatttaaaaaaagttacttttttgaaatcttttacagtacaatatggtgtagaacttgtttgagtgcattaaagctttttacgaaaatttaagggatcctgtaactggtgggttggccattctaaatgcctcgaggggcggtggtgcggatggcgtgtgggtgacttcggtgggtgtccaaccatatggtcaattcaatgcactgagtaaattgctccttggcggaggcaacgcttcatttggttttcaaattgaataggaagcgtcgcgacattgtcgggcgcctcgctgccacccactttcccgaatatatgtatactccccaccgcccttgcatttgaggattcgtcctccgctaattgagacatttgtcagtttgcgcaaatgagccaccatttctcaaaggcaccctctcattggccacgggaattaggagacggaaagtaaggacttattcccgacagcaatttcgtattttaatcgattatacccaatggacctattttaaatatttagatttaaaaacgctttaatgaaattttataagattttaatatcttttcctattttgggccaaatattataatagaacggacaagaaatttatcctgtaacaaatatatgtagcattggtttcttggatgtttttttttttttttttttttttttgacaagttcgaatatccttttgcgtggcttacttaaaaactgttcgcttaatcagcttggatggcgtttttcttatgtttgtggatgaactaggaatgtcctgcagtcggcccttttcagttggttttgactttaccaactgttccgttgtcttgacttgacttggcttcttattaatttttttctcagcgaccgacgataaaggagtcttgggtattaatttctttttctttttaagtgacttctccggagattcttctttgtcaagggcctccatctcagacatcaatgtctcgaaggtcacattcatcaaaaagtagcgaccttttgaatttacctttttttaaggtgtggtataaaaataagtttaagtatctcaccgtcgagtttctgcaggaatcccaagcgatggcccatttcaagggtttgtttcacaggctctttaagctcatcttgcgataattccgtatttttggctatggttaccactatttctcgcagtgtcgccggcgctttcaacaactgaagtgtgtgcactataatagccccattaaagttgggcatttttttcgatatttgtgtaattctgtataaacgtgtgctatcactaaaatcggttctaagaactgagagttacgtgcaaaacacaaaatacaactggccagctgttagtcagatttcagtgacaaccaagttctcagcatgctttaatttaaatattacaaaatcctacacttttaaataacacaattattttaaagaaatctattaattaaaagagaatagtacatattgatagaaaaatacctgtaccttgattgtactctgttcgctggcatttgaatccttggccaagtttggaccgccatccagttggtaacaagacttacgtagactggccgacgtcaagcgcttatctatcagccttgcagaagctggccaatataagcggatttagccatatctatcaataatccccgactcacaacaacaggagtggtaaaagaattgagcaaactttgccgctctctgttctccaatattggcttctgatatttacatcagggacgcctttctgctgacgtttttcgccactgctgtttctaatcagcgtggtctaaatatagaatccctgaccgcccacactttggtaatcgagcccagaatatataccatatggaggtttaattaaactgggttgtgcaaaaaagaaaaaaaaaaaacggcacaaaaaagcgaatgcaaagaaaacaataaaggatgtttatacgcacgccaaagttttcgttatcaatcatttttatagtggcaattaaagcctcaacagctgtcaaagtcaactgactaacaaagatgtcaatgctcagtcatcttcaacttcaggcaatggcgaaatcgatgaaaaggcgaacaaaaagcactaaacaaagttaaaatgttattaatgcctattaagtacaaaaactacgccagttccagtgctgccaaggacagttggaaagcagtgccgtttactcttgatattgacagtcaacggtaatttaatcaaaaagtgtcagagtttgccatatggctgccactgaaccgaacgtttgaaagtcaataaaaaaaatggttaa

SEQ ID NO: 12698 - DNA, 586 bp, DROSOPHILA
aaccgattttagtgatagcacacgtttatacagaattacacaaatatcgaaaaaaatgcccaactttaatggggctattatagtgcacacacttcagttgttgaaagcgccggcgacactgcgagaaatagtggtaaccatagccaaaaatacggaattatcgcaagatgagcttaaagagcctgtgaaacaaacccttgaaatgggccatcgcttgggattcctgcagaaactcgacggtcgctactttttgatgaatgtgaccttcgagacattgatgtctgagatggaggcccttgacaaagaagaatctccggagaagtcacttaaaaagaaaaagaaattaatacccaagactcctttatcgtcggtcgctgagaaaaaaattaataagaagccaagtcaagtcaagacaacggaacagttggtaaagtcaaaaccaactgaaaagggccgactgcaggacattcctagttcatccacaaacataagaaaaacgccatccaagctgattaagcgaacagtttttaagtaagccacgcaaaaggatattcgaacttgtcaaaaaaaaaaaaaaaaaaaaaaa

SEQ ID NO: 12699 - protein, 159 aa, DROSOPHILA
MPNFNGAIIVHTLQLLKAPATLREIVVTIAKNTELSQDELKEPVKQTLEMGHRLGFLQKLDGRYFLMNVTFETLMSEMEALDKEESPEKSLKKKKKLIPKTPLSSVAEKKINKKPSQVKTTEQLVKSKPTEKGRLQDIPSSSTNIRKTPSKLIKRTVFK

SEQ ID NO: 12700 - DNA, 17358 bp, DROSOPHILA
cagacagagatcgccgggaactggaggcccaactgcaggtggcacgcgaagccattcggcgggcggatgaggagcgggatcgctaccacaagctgcagcgcgaaatggagcagcgcaagcgccatcttctggataaggagcacgccctaaatctcaaggaggacgaactgggccaagccaccggcgcctaccgcctagccactagtcgccaacacttggccgagcagaaggctagggaggcggaccagctgctccaggccaagcttaaggtcatggccaagcgggcccaggaaatcgcggaaaaggaggcacagctggcccacgaacgaatgctggtggcgcaggatcgtatggctttggtcaatctgaagaagcagatttctcgcagcaggtgtgcaatctgcaaaatgggtgcggaatcggcggaaatcgcccagcgaagggcaaatgtaaatcccacagcagccaccgatcttcaactgcctcaagtgacacccagtcatgcggagctgctgcttaaaatgtcccaggaaccgggacaggtccagagtgacattgtggatcgaatgctggacgaaaacatcgaagcctcctaccgcaggatgtacaatgcgccccccagtagttcaatcgatgatcccgactatctattgacgttagctggtgggctggacgacgactccaaggtggccatggatcacggcctgaatgtggacgaagcatttatgtagatattgtggaaaaatttgtggaagcacaaataataacaactgagataaataaatgtattacttggcaattagtataagttttataaacaaactatgaagatacaagattacatatcgctcgaaagttaagtattttgttattcgttagaaactcaataaatttgaattgatggagtgaaacccggctacatgattagccaatactcaaacatctgttcgatgtatctttcatcgatagttgccaaacaatatcgattcgtttaccatcgctactgcttgttgcattccgttttgtgttatttcgtgctgttcgtgtttaaagttcttgcgcacaagataattgttttttttttattgtaaattaactgatttgtacataatatgtgatggtgcaagaaaatctaagaaaataacgttttgttcagtattttggtgttgcgtctattccgttttttgtcactgttttctgttcgtgtttgtgtatggtcgtttcgcatgtatgtgtgtaggtgtttaggtgtgtaggaggataaaacaactctcctaaaaacaaaaaaaaaacctttggttaagtttaaattaattgtgattcgtcaaatataacaacaaccgaggataaaagtgtaaaactattaaccggatggtctatgttcgtagccccgtcaagggaaaacctcaaccaaaaagagactagcaacgggtgtaaaaagcagcggaggtgacacctcaaaaagcaagtaagttggcaatatgcggatgagaatcacaaagcagaagtcaagtctgcatattaatgactatctccattattattttctttcgcccttccaccgatattcgttttttttaaattttattcttacgttctccggaataaattggcattcaattgggttcatttattgtttatgaatattgtttttaaaaattttttcgcaatctattgatttaccttaacctttgccgcacggaaccctctcttttgctctctcttcctcgcttcctattcctagccggttcgcattttcttatcttccattccgtccccgttcgcgacacggactcacacacacactagtgcttttgtgggtgtgtttatattaaacagctgtttcctatctgcatacgagattggcttcaatggggaaaaaatcaaaacgcttacatgctgacatatatatatacgtttatattgcatatattcgtatatatgtgtaaaatctgggaaatcagtactcgcagcattcattcacgcaaattgatgccgccgcttttgtttgtttttatatatttatttacaatcgcgcactcaattgcgcctttttgcgccactctgctgtatcgcaatcgcaaatttggagcgcttggatatggtttctatgtgcaaagtacacaagtatttaccacatttgtatgtacaaacaataagataaaatgttttgctgatgtttgtaccgaatgtcgaaactctgctaatcatacttaatatcatgcttgcataatgatgttcgaacttttctattagaagttgatattttttaaaatataaaattaattcctgtccctgccctggctatcacaaatccttgtaattacgttttaaatgcagttgtcatatccttttaaccatttcgaagcttacaaatctaataaagcgatcaatctgttctcccctattttctgaatttctgaatcattggtgcccgctaatgacggctcattatcgatcgcgaatattcctttgcaacttaaaaaaaaaaaactagtgataggcacccccactctgtcgcaagtggtcttccccccatcgaatgctatctcacctgttcttcgtccaggtactcatatagtaccattgccatttacactgcataatcacttttatcaccgcctgttcgttatcgcagagataagcaatcccaaaagcaaacacctttgttcaacaacaaataggcattggaagagaaaatacgaaaataattttaacaaaatttggaaatcgctcacattttgttctggttcccattcgcagctcaacggaccggacgctttagacgaggggataatgtcaaatcaagcgcatatcgactacgacaaacaattccaggatgacctggccaaggcgaccgccctgagtctagagcagcatgccctcgatgactacaggcgaaacaagaagtacggctccgggtatcagcaaagctccaccgttgctggccgagattaccaggcggcgcaacgtagtcagagcctacatcaaccacgacggcactcggaggtgcatcaggtggccatcagtccggagaatgcggaacgatcgcgcacaccgccggcccagggaacggataacgatctgatctgcttcgcaagtcccaccagcaagcagccagagagtagcagtccctttggcaaacttatagaggatctgcagcggatgcagccgaccaatccgcagtcggccctggtgccaatgggtccagttgcgtcggcttcgattcctcctcaatacggctttccacctcatcagcaacgtccaacggctgctcagcccacaccgtacggcatggttgcaggtggagttgttggtggaccggcttacggtgacctgcagttggtgccttaccaaccagctgctcagcaacagaggccactaaacagcgaggagctgcagcggctgtacagcatgcccgctcaaatggccgtggttccagtgccgcagccaaacgcctatatgtactatcccggagctgtggttactccatacacggctcccattgttcccggatcggctgcttttatgccgccgcagtatcccgcacagggatatggctttggaggtgcttacacgcacatggatttgcgtcgaccccaatcgcaaccagctccccaacaaacagcaccgacaacaagtcatcatcacagccaaccgtccaaccattccacttcctcccccgcagaggccaatggagtagccttcccagcgcgtcgccaagtgccctcgactgtcggggttagctctagtagccacactggaaacaatggtcattcctcggtcccacgcaggggcaacgatttgatcgacctcaaccacgaggactagtatgtatccactagtgttcagaaatgattagttcgtgtttttaacattcaaacatcctgctttgcagctcccgtgtgagtgtgctggaggcattcgatcccctgctaaacgacaatactggtaagcagcctcaatgttgtaattaacgtgtagctcccggtcctcgttgaaatccccccacatttttcgcaccgtaaactaaacttgaaatacagtcgaaaactcgtgtgttgcgatttttggccagagcattcatttgagctgcaaataaaaattattggcataataacattagtggatttttcaactcaatctctaggagagaggaatattaaattgaataggaacaagcacacgattttgtatttgtatggtatttactaataggttttattaattttatatttatcccattatttgtttagcaacaattagtttggctagatatacgagatcctttttagaattgcccgtagcaagttgtcgctcgcctttagttaagaattaaactgaatgtttccgtttctctatattgcagtgtcgaaaaagtaatccattttaattgtcctctactactatcagtactactactaccaaaaatgcaaaaaagcaactactttacacccacaacaactacaccatctaaagggtttcggttcagattggttcgtttcggaggcaatgacagattagtgtctataacagcacttacttagaccaccttattacacaaaaatactaaagtaatatatatacatatatgtatgtgccctcatatcgaaattcgtgccttccgctattgccggaataattttgaagtcagcttatatatcgatgtccaaaatgtcgtattcaactagttcgcaatgtttggaattggtttctatgtatattcccgcgactgaaaacttcaaaatttaaaagaatttaacgactgtcaattgaaaagtgatgaaatgagaagaattagtcacttctttttaataaccatgtattacgaaatgaacaaattgtgatttgctgctacatatatccattaatacacttatatacaaaaataaatacatacatatgtttaattctatcgtgtaccattgtgagagaacaaataaataatttcttaaacaaattgcagtctgttgttgttttattattcgtttagccgcttgcttccatttcccattaaaagattaaataacgcacattcacgcttctctaactaataattgacaatagatttgaagcttttcgagcatatgtatgtatttatttatttcattctggctagattggaaaatcaactaactctttactatgatttgcattcaagtcgttgcacttttgtcaaattacttgtacgcttaccctttttgttttgctggctttcaaagttcccgccaaagtagcaatgcatttcaaacagatgtatttaccaaacgcttttaaaataacgacgtgtttagcaaatagctttcccttttgtggcaaatgaaacagatgtatgggcaccagaggggacagatttagaatgaatataaacaaagcgatttaaaaatacacacttaggtacagtgattatacattgttagtacatacgctcttctttttaagaatttgatattcattttaatataggaaaccattatcatccgcaaaaactacattttgcgcttttttttaaacataaaccctttgtacttttgatatatacgaccttatttttaaaaaaatttcgaatgatattggttccactgtactgggtcagcgtgggcgacgaatgacagcaatcacaattagcttttagcgatggcactcgcctcggatttgttagcgtagatttgcgaagcgttctcgcattgccagtggtgctagtccaaccgatccacatcgcactgctgcgactttaggggccgtctcatttatttttggccacacgatgtgatgtgcccggattctcgcagtagtaggcctcggctctcgagcatatttgcataactactggcgatattcgcggtgtgaactggatttaacccggaactgatcatgcactcactacttgcaggcaacgacaccgcctccgacagcacttcctactatgcggaatacgatccctttgattttctgtacagcggagatgcagcaacccaatattccgatccaatgtatgaggcagtcaacaggtgggacaaaactgtggccaccgtgagtccgaatgttggtctaatcggttggcgccaagattttctgagccagccatctacatcttcatcgcaatatggtgttgcgccgccagaggagagtctgaagcttgcggagaacggatctggaactatctcgcctcctccgccgttgccgccccggaaccagcagtgctatgaatcaaaccaggcagccatgccggtctccaggcctcctcagtcttctgttttgacggacagctacacctccagcattccggccaacgtggtgctggaccggcggaaaacttgtacacgactgtacgaattgatcagcgaccagcgcactgatgatcccgaacttttggaattttaccacatggtaaaggaggtgagggcacgctatccgcatgacgatgcgcccaccaatgtgggacatgttgtggccgccgagtttaattatcactacatgatggacaccagcatcaaagtgattgtgcatccggctctaaatacacttcaatcaacggtcctggctgcgtccatgggcaaggaacaggtgaagggatatggaatgccagtaacattcacttgcgatagtaagtataatactaaaatgtttgaatgcctctctaatgtttgcattttgtccaaaagttgattcggttgtggcacaggtggtggcacaagctttggcctcgctggagggacaagtcaagggtaccgtcacagattatgcggtcaaggtgggtacattagattgaagatttttgcaaacggaaagttgaaataattctttattcacagcccattggtcttctggagtggctggcacccacctcgagactgagtcagctggagtgcgtgcacaatagcttccaattggagaaggatgtacatttgggcctgtgtcttagtacggcggcaaacatgcaggctattgcacgaactgagcgggatgatgagcacgatgcggatttgctgccggaacatcttcttcccaacgaggtggtgccaattgtgacctacgacaatatgatgatactcatcgaaacgctggagatggagattgacaagctggaatcggcggccgacggagtacccggacggagtgtcgtgagctgctccggagttgtccaagcagtgaaggccatatgcgcactgctcggttcaatcgacacaatggaaattgcacgatgtgttgccgatctgaagcgcatttgcgaggtggagcaaaagaagtactcgacgggcgctagcaacccagagattgtgagtgactatggtgattacgctcaagttgtactccgcccgcgctccatgctggagcagatcaaggtcaagtgcaacgagctgcgagatgcagtgcaagagctggttgaattgtatgcgaatgttttccgggtggcattctccgtgaagacgcccgattactcaacaagtaagagtgctaatgggaaacaaatttcctttgtttacttaacttatacgtacttttacagcacccatacccatttcctgcgtgtccaaaccaattgtggtatgcattagctgcctacacaggccgctgccgaattggaagttcgacgattattccctgtgcgtacaaatcgtttatggaacgcgcctgctgtcgaagccgaatgtgctgacctgctccaacgatacaagtggaggcctgtttcctcgtcttaacttcagtgcctggctgactttcgatcagcatcccatctgcactctgcccagggaggcgcgccttacgttcgtgttgtatggaaaacaggcggccagcgaaggcgaacccaacgccgatcagaatggagagaggcgtcaggtgaccactgaactgggttggtgttcgatccaactgtttgactttaagcgagtgatgatctgcggcccctacttactgtctttatggccaccaatgacggacaaaatgcttggaccagctccggctcgaggctgtcatccgcaacccgacttttgccccgttttgagcattgaagtacctccgtatggaggacgcattgagtttcctgagcaccaggaggtgccaaaacctgcaccacagttagtacagcacatatacaaatggttgaaaatagttctaatgtaatcttgtaatcctcgctagctacgattttgcctctctggatgccaatcttcaagaggagctgctggacaccgcagagctgggctacacaggagccacagaacgacgtgaagtgttctgggaaaaacggctctacctgcagagctatcccaatgccctgccaaaggttcttcatgccgctcacagttgggattatgccaatttgatcgatttgcatgcgctgctgcactcctgggcaccactctcgccattgcagtcgttggagttacttctgccacgatatccggatgctaaggttcgcgagaaagccgtggagtggatctccaagatgcccaacgaccagctcgtcgactttctgcctcaattggtgcaaagtttaaaacatgacacatacgaaggctcggcaatggctcgattcttgctgtccaaatgcctggagtcaccgcgctttgcccatcacatgtattggctgcttgtacacagtctgcctgacgatccccacaactctattggagcagcgatggtggatcaggagtatgacgagtctcaggttacccaggtccgttactaccgccggaacaaaatgatgctgcgtgctttaatggcgatttgcggcgaaaagatgcttcagcgatttatgtaccagcaccgaatgtgtcaggtaataggtttcttaaaacattgaagaaatcaccgaagacaagtctcgattttgccttattcatgattataaatgatatgttttgtgttcacagaaacttactactattgcggagtcggttaaagaggctaaggagtcgatgcgtcaaaaaagcctagccgcaggcatggacgaggtgcaccaagacttactggagcaacccacttgcctaccgctgggaccagaactggaggtaactggagtgagtgtgcgtaactgtagctactttaactccaacacgctgccgctgaagatcaactttgtgggacctgatgccgaatctttaccggctatctttaaggtaaatattcattcacaaatgatatgtataaactatataactataaactttcttagtgcggagatgacttgcagcaggatcagttaactatacagctaattaggattatgaacaaaatgtggttggccgaacgattggacctgaagatggtcacctttaattgtgtgcctacgggatacaagagcggtatgattgagctggttagcgaggcggaaacgttgagaaaaattcaagtagagtgcggtctgacggggtcctttaaggatcgcccgatcgctgagtggttaggcaagcagaatcccagtcctctcgagtaccagagtgctgtgcgaaattttacgctatcctgtgctggatacagtgtggccacgtatgtgctaggcatctgtgatcgccacaatgacaacatcatgttaaagacttcgggtcacttgtttcacattgactttggcaagtttcttggcgatgctcagatgtttggaaactttaagaggtatttaaattgatgaagtttttaacttttgaagacttttacatattatttatttcccacagagatcgcactccatttgtcctgacttccgacatggcttatgtcataaatggcggcgataagccctccacagactttcactatttcgtggacctatgttgtcgagcctttaatatcgtgcggaaaaatgctgatctactcttgcacaccctggcccacatggctacagcaggcatgccgggagtaaactccaatgctgtgcaatatgtacgacgcgccctattgccatctcaatcgaatcccgaggcagctgccacatttgccaagatgattcaatcctctttgaaaagctggttcacgcaattcaatttctttctgcacaatctggcccagatgcgtttcaccccagacgagggatcaggagagctgctatcgttcgtgccacgaaaatatacgtacgtttttgtatcctttagtttatcacttttatctacaaatgtctccggtttcagaatgcagcaggatggtcgcttgaagattgtaaaggtggtgtgtttccagaagcattacagcatggaaaagttttatatgtatattctggaagtgacgcgacatggacagcccgatccgacacatttgttccggtcatatcgggaattcacggaattccatcagaagttatgcatgcactttcctttggttaaactgcacaggtaagtttcagtttgtctaatttttagaccacaagtagtgttattagtttgattcgctttaaaaactaatgacattgataacgtgctgacttcttgtgtctatcaggcgcattatctagacattaaataatggcaaaaatgtgattcgttattgattcacctcccattggaggaaagtttgaacacatttttatcataaatggatttcctgccattactttattattttatgtagtcaacatgatatggcaatttttcagtgatatgtatgtacataaataggtcatagtcatttggctaaatttaacacatagaatactgtatttactaaggaagtcaagacttgcggcagtttcctgttttcggactagtcatcggtattgtttctaacagcgtttgtcctaagtgtcgcagtcatggagcgatgttggctgatagctcgtccaaagccattatcgtcatcactgtcttcctgggagacctgggatccgaataggctgggcactccagtattactcggttcaaaaatgatcgaacgctgcgtgggagttggctgttgcatcggctcatcctcttcagactcatcacctgatgttaccacctcagcggactggtagtactgcagattatccacatcaaagcggactttgagcgatttcggatcacgtttggcaggttctggagctgatcgtgctccctcctccccatcggtatcactggaactggagctgggaagctcttcaggttgatagcacgcaaggggagaagtactaccacgaacattgagggatctggctgatttggtagacctgggcgcgggctgaggagcttgacgctctgatggcaccaccacagccatttcctggcacaaggcctcgaaattggggatttcattgctctggttgacttgagaaccgtttatctccacctcattaacatccagatccgcgtatagatcctcaatgctcattacataattggatgtcttggacctttgttgcattacctcggtgtagtcgggcaatttctgaccgttctttgcaatatctagccgcatcagggattcgtaatctggtagatagggcagaccaggatcgtatggcggtggatttataatgggagctggcggctcaggctcgaatatatccattctcggctctataagctctagttgatggaacagaccctccacctgttccacatcgtccagtctgacggcagcctcattaagcgtcgcctccacagtgggcacttgctctaagctattcggatgcagagaccaattgggctctggcacatccaccacggcgtctaggttggcaaagttctcccagtcctcgtcgatgctcttgccaaatcctggtggactactggccgccggcagctgcagctgatccaaatccaggatgtcggcttcgttcatcacgaatgacgaacgtattcgcacgaaatcactgtcgtgctcaccttgtggtaattcaaggttttcaaataggccattttgaaaggtgggctgtatactaggagtcgcttccgcttcgggacttcctgctatgatttccacgacaaaagctgagtctgtattgctgggtcccccaaagggatcggtatcatttggtgcttgcggttcatctttcgattccgtttcttccttgggtatggctcccctatgaaccacagcggtaactgacatcgctcctcccaaaccatcatctggagttagtaactccggaacgggatcctcaggagtgagaatttccggcacatcatcaactggctcgaacttcacatagcggccgctgttcttgcttcgcaactgtgttggtctagtgggcgcagtcgttggttttacactaaacaactcgtacttttcagcaaagtgatcgaagttgggcattcccagttcgctaggaggctcgggagctgtgtcgacagaagctgcaggtcctgaaggcttggatgcagcagctcctctcatggtcctgggaggtggagcagggatggattctagtatcttaggtagtgaaactaccgaggcagtttcagctagtacttctgattgtagtggcggagaaggtggcttgcgggtaggtggagcggtgtagaattcatagtgctcactgtgcacctccagtcgttgtgcctccgacttctctcgataggaaactggtgattcttccgtggatttgggctgtcttgggctggcgccatatagttgcagatttggaacactgccactgatgaagttgttccctgcagggtaggattttgtttaaaaaatagtttccaaagtgaaaggtcgtcgaaccattcaatatcatttcgactgtagtttcaattgaatggttaccgtttcctatcttcacctgtcgttgctgatgccgatggccatgggctttcgaattcctcgagattgcgacgtcggaacactccatggacagcagtatcggtgccgttaacctgggaaattgcacaaattgtactttaggctattacgatatattcggaattatattagcaccgagcacatcagctgtggattcagctgtttgggctgatcacttgcatgcgtcaccagtggaagttctaagtggtttacacatgaccacagacacgccagctcagacgactattaaaacacgttcataggaaaggggattttgggttttgtttcgagctgtttaagaacatattatcatagatgaatcattaattattgaagttcgattatagtgtcgtcctaaccctgttcctttaagatacatttaacaattttgctctttgcacatcatttattggttttattcaatcgatttcctctttactatacacacttaggagtttgaatgaagaacacccattctacctgagattcaaataagtgaaagcttgcgatttgcattcctcacgcccccatcgctatcttcaatccccaacttacacactctctacaatcatatagccgcaacacctgtgaatgtttgtgtttgtgtttgtatttgccctgccttatcagaaccactcgtcgctggatcgctgagtgtcgtatatacagatacatatgtatgaatattggtatgggtatagctttccttgtggtggtatcggtatcacattaacctttattaactgcgtgcatcgggtgttaagttcttttgatttgcatacgcacctgcgattcgaaagctgcgtaacgtggcggcggttgttgctgctgctgattctgctgttgccgctgcacctgcgatcgctcgaaagtcagtcgccgccggaagccgaagaacttgatccccagcagcgcgaatatcagccccatgagcaacatggccgaggcaagcatggggccaacaacaagaacggcctgttgacctgctggggaatgacggggttggtgaaaagtgtgggcatctttcgagctggccacctaccttggcccacattcttcagctgggccatgtctttttgtctcaccagcaaatctgttggctcggcattctggataaagtcgctggttggcacagtcgccctttgttttgtggccaaaagtgtaatgaaacttcaccacgtcgctaatcggaccgctctcggctccgctaaccagctcgctcgtcgactgattgagcgctgacgttggcgcaacagcttttggcagcgtagtcgccgcttatcggagcgattcggcccgatatcgtttactcggcccgctcttctttcacccactatatggggtctgctgctctcggtctctttggttctccgattctccggttctccgattctacgatttggtgaaatcagtctgcttcattcgtcgatttatcagctattagcggtgttacctcggcgacatgggcagtgataagcaatcgcgaatttgtactatgatttgtcaacgcaccttgacaaaccactgactatataaaaaccatgaaatgtaataataacttgaccattttatcttcggtgataaaagccgccttgtaattgggaataatgtgatagtgtaaacatttaattatgagcttacactaccattttgaattgattacagcatataaagttctaattatttataatgtaattaacagcgtagcttatgtttataattagttttcctacgttgcaatttgaatgtttttaatatatttcagtctgccggctggtgtgcatgtgggccgttccaatatcaaatccgtggcagaaaaacgactacctcttattcagcgatttttgaaatcgttgttcgatgcgtccgaggaaatagcccattccgagctcgtttacacattctttcacccgctgctgcgcgatcagcaggaagccaagcttgggatgccgaagataaagggtaaattacgatgcactaatttccaaattgcattgcaatatatatatatacggattttgcagaggtgaagcaacaaccgtcgcgggataatccccacgagattggccaaatacgactatcgctgcaatatcaacgcggcgtacttactgtgatggtgggtagatggtagataaaccccattttgataaatattaatcgagcctatacgtattgcagatacaccacgccaaaggactgcccatgttacagggcggtcaggagcccaacacatatgtgaagtgctacctaaaaccggatcccaaaaaggagaccaaacgcaagaccaaagtggtgcgcaagacctgtgtgcccagtttcatggaaactgtaagcagagactgattatcctggattatctttttaatttgtatttataaatctttttagttggagtaccgaatgccactgaatattattcaagagcgccgccttcaggttacggtttggtcgcacgacaccctgcaggagaacgagctgcttggaggcttcgatatggatctgtcgaagtacgacctgcgacaggagctcgtcgactggtatcgcctgggcgcggtgtccaggaactgaccagatcctagggacgagctcttttgaacctcttgggacactctgcctaccgacaatcaggcctaggataatgcaatactaatatatgtttgtgcctgtcttctttcgatcgcaataatacttacttactcgaagtgattgtacattccatataccaatattaaaaataacataacagtagtagtattatttcgtaaaatgtgtgcctcaaatgtaaatattttataatgaccgcaaacaacattcttttggacatctgaatgtaattataactataaagtatagaacatgcttactctatttacatttaaaatcaatcaattttattgtgcaccttgggaattcagaaaatgaattatattggtagtttgtttgaatcgttctgtcgtcggcacctggctattgttcttttgaagtagttaaatataaaagttcagtattatggcttaaattctataagagattattaaaaaccttctagctcgctggtctgtaatatctaaaattaaaacttgcacgaagaataatcattactaacttttttgcacttttctaattacttaaagtaaaaagagaactaaaatttcctaaagaaattaggcattgcaagcagaataacgcacagatacagattctttctgattgtattttgtttctcacttaatattcacaaaattgctttcagtgtctcaatgagatggcatccaaagcaaactcctgactgcgtctaaaacaaatttacaaagttatagggaattactatcagagagaacaagaactaaaagtgtcttaaaaaattaaacgaatattgtaaaatatataataagagcacacacacaccgcaaacaacaaattatatttttatagaaaaaagaaacattcaaaagctacttctgcctgagcatttcaaatagtactttgatactgattaaaaactacctaagacgtatctgatgttttcataaaattataattaataggaaaaaattaaatttctgtaagtgttgaggaatcgtaaaaatgttagctggcggtaatcacttttggcacaaatatatgagcataaaaaaaggcatacaaccaatgcagttttgattataaaccgggtttgcaactacctaagtctgctgattcttctattcacatttacaagctaaaacgaatctacattgccttagaagtattatttttgttgaaacgtttgtaatatttgagaaacagtcagctgtgttccttctgtctgagttttgcttaaagcgttcaaattttgtgatattataaatttaaattgtttaacgagcaaacaccgaaatggcggctgccaacatggagaagggtgagctgatgaaccaggtgaaacaacagatcgcattggccaatgcccaggagatgctctcgaagatgacggagaagtgcttcaagaagtgcatccagaagccgggaaaatcactggactccaccgagcagcgttgcatttcgcagtgcatggatcgcttcatggacgcctggaatctggtgtcgcgcacctatggcaatcgtctgcagcgtgaacagtacaggaccatggaatcgttggagatgaccagctaggactagcagctaggattagcagctagattgcactcatcttgcaattaaaatcgaatttattttgtttgtgatccaatctcgagtcgctttttaatctactgacagtccagcccttaactgcacgcttatcgcagcagaggtgatagccggctgattatagggaatgcaattgcaagtgaagaccctcccggggattgagggtgctgtctatgggtctaagccgatagcttccagcttgatatgagcacttttcctgatcgttatcgtgtttggaatggtctcgttagctaacggatgagcaagtgctcggctcactggcccaaatgcagtttgcccggagacgccggttaacccagcactgaaatgtgtagtttcgagaccactctaatccattgcagcattttcaacaatatgcaaattcatcccgattttcttgccaactaactccgttgggttttttcttacattgccatttggacattg

SEQ ID NO: 12701 - DNA, 6871 bp, DROSOPHILA
ctactgcttgttgcattccgttttgtgttatttcgtgctgttcgtgtttaaagttcttgcgcacaagataattgttttttttttattccccgtcaagggaaaacctcaaccaaaaagagactagcaacgggtgtaaaaagcagcggaggtgacacctcaaaaagcaaatgtcaaatcaagcgcatatcgactacgacaaacaattccaggatgacctggccaaggcgaccgccctgagtctagagcagcatgccctcgatgactacaggcgaaacaagaagtacggctccgggtatcagcaaagctccaccgttgctggccgagattaccaggcggcgcaacgtagtcagagcctacatcaaccacgacggcactcggaggtgcatcaggtggccatcagtccggagaatgcggaacgatcgcgcacaccgccggcccagggaacggataacgatctgatctgcttcgcaagtcccaccagcaagcagccagagagtagcagtccctttggcaaacttatagaggatctgcagcggatgcagccgaccaatccgcagtcggccctggtgccaatgggtccagttgcgtcggcttcgattcctcctcaatacggctttccacctcatcagcaacgtccaacggctgctcagcccacaccgtacggcatggttgcaggtggagttgttggtggaccggcttacggtgacctgcagttggtgccttaccaaccagctgctcagcaacagaggccactaaacagcgaggagctgcagcggctgtacagcatgcccgctcaaatggccgtggttccagtgccgcagccaaacgcctatatgtactatcccggagctgtggttactccatacacggctcccattgttcccggatcggctgcttttatgccgccgcagtatcccgcacagggatatggctttggaggtgcttacacgcacatggatttgcgtcgaccccaatcgcaaccagctccccaacaaacagcaccgacaacaagtcatcatcacagccaaccgtccaaccattccacttcctcccccgcagaggccaatggagtagccttcccagcgcgtcgccaagtgccctcgactgtcggggttagctctagtagccacactggaaacaatggtcattcctcggtcccacgcaggggcaacgatttgatcgacctcaaccacgaggactactcccgtgtgagtgtgctggaggcattcgatcccctgctaaacgacaatactggcaacgacaccgcctccgacagcacttcctactatgcggaatacgatccctttgattttctgtacagcggagatgcagcaacccaatattccgatccaatgtatgaggcagtcaacaggtgggacaaaactgtggccaccgtgagtccgaatgttggtctaatcggttggcgccaagattttctgagccagccatctacatcttcatcgcaatatggtgttgcgccgccagaggagagtctgaagcttgcggagaacggatctggaactatctcgcctcctccgccgttgccgccccggaaccagcagtgctatgaatcaaaccaggcagccatgccggtctccaggcctcctcagtcttctgttttgacggacagctacacctccagcattccggccaacgtggtgctggaccggcggaaaacttgtacacgactgtacgaattgatcagcgaccagcgcactgatgatcccgaacttttggaattttaccacatggtaaaggaggtgagggcacgctatccgcatgacgatgcgcccaccaatgtgggacatgttgtggccgccgagtttaattatcactacatgatggacaccagcatcaaagtgattgtgcatccggctctaaatacacttcaatcaacggtcctggctgcgtccatgggcaaggaacaggtgaagggatatggaatgccagtaacattcacttgcgatattgattcggttgtggcacaggtggtggcacaagctttggcctcgctggagggacaagtcaagggtaccgtcacagattatgcggtcaagcccattggtcttctggagtggctggcacccacctcgagactgagtcagctggagtgcgtgcacaatagcttccaattggagaaggatgtacatttgggcctgtgtcttagtacggcggcaaacatgcaggctattgcacgaactgagcgggatgatgagcacgatgcggatttgctgccggaacatcttcttcccaacgaggtggtgccaattgtgacctacgacaatatgatgatactcatcgaaacgctggagatggagattgacaagctggaatcggcggccgacggagtacccggacggagtgtcgtgagctgctccggagttgtccaagcagtgaaggccatatgcgcactgctcggttcaatcgacacaatggaaattgcacgatgtgttgccgatctgaagcgcatttgcgaggtggagcaaaagaagtactcgacgggcgctagcaacccagagattgtgagtgactatggtgattacgctcaagttgtactccgcccgcgctccatgctggagcagatcaaggtcaagtgcaacgagctgcgagatgcagtgcaagagctggttgaattgtatgcgaatgttttccgggtggcattctccgtgaagacgcccgattactcaacaacacccatacccatttcctgcgtgtccaaaccaattgtggtatgcattagctgcctacacaggccgctgccgaattggaagttcgacgattattccctgtgcgtacaaatcgtttatggaacgcgcctgctgtcgaagccgaatgtgctgacctgctccaacgatacaagtggaggcctgtttcctcgtcttaacttcagtgcctggctgactttcgatcagcatcccatctgcactctgcccagggaggcgcgccttacgttcgtgttgtatggaaaacaggcggccagcgaaggcgaacccaacgccgatcagaatggagagaggcgtcaggtgaccactgaactgggttggtgttcgatccaactgtttgactttaagcgagtgatgatctgcggcccctacttactgtctttatggccaccaatgacggacaaaatgcttggaccagctccggctcgaggctgtcatccgcaacccgacttttgccccgttttgagcattgaagtacctccgtatggaggacgcattgagtttcctgagcaccaggaggtgccaaaacctgcaccacactacgattttgcctctctggatgccaatcttcaagaggagctgctggacaccgcagagctgggctacacaggagccacagaacgacgtgaagtgttctgggaaaaacggctctacctgcagagctatcccaatgccctgccaaaggttcttcatgccgctcacagttgggattatgccaatttgatcgatttgcatgcgctgctgcactcctgggcaccactctcgccattgcagtcgttggagttacttctgccacgatatccggatgctaaggttcgcgagaaagccgtggagtggatctccaagatgcccaacgaccagctcgtcgactttctgcctcaattggtgcaaagtttaaaacatgacacatacgaaggctcggcaatggctcgattcttgctgtccaaatgcctggagtcaccgcgctttgcccatcacatgtattggctgcttgtacacagtctgcctgacgatccccacaactctattggagcagcgatggtggatcaggagtatgacgagtctcaggttacccaggtccgttactaccgccggaacaaaatgatgctgcgtgctttaatggcgatttgcggcgaaaagatgcttcagcgatttatgtaccagcaccgaatgtgtcagaaacttactactattgcggagtcggttaaagaggctaaggagtcgatgcgtcaaaaaagcctagccgcaggcatggacgaggtgcaccaagacttactggagcaacccacttgcctaccgctgggaccagaactggaggtaactggagtgagtgtgcgtaactgtagctactttaactccaacacgctgccgctgaagatcaactttgtgggacctgatgccgaatctttaccggctatctttaagtgcggagatgacttgcagcaggatcagttaactatacagctaattaggattatgaacaaaatgtggttggccgaacgattggacctgaagatggtcacctttaattgtgtgcctacgggatacaagagcggtatgattgagctggttagcgaggcggaaacgttgagaaaaattcaagtagagtgcggtctgacggggtcctttaaggatcgcccgatcgctgagtggttaggcaagcagaatcccagtcctctcgagtaccagagtgctgtgcgaaattttacgctatcctgtgctggatacagtgtggccacgtatgtgctaggcatctgtgatcgccacaatgacaacatcatgttaaagacttcgggtcacttgtttcacattgactttggcaagtttcttggcgatgctcagatgtttggaaactttaagagagatcgcactccatttgtcctgacttccgacatggcttatgtcataaatggcggcgataagccctccacagactttcactatttcgtggacctatgttgtcgagcctttaatatcgtgcggaaaaatgctgatctactcttgcacaccctggcccacatggctacagcaggcatgccgggagtaaactccaatgctgtgcaatatgtacgacgcgccctattgccatctcaatcgaatcccgaggcagctgccacatttgccaagatgattcaatcctctttgaaaagctggttcacgcaattcaatttctttctgcacaatctggcccagatgcgtttcaccccagacgagggatcaggagagctgctatcgttcgtgccacgaaaatatacaatgcagcaggatggtcgcttgaagattgtaaaggtggtgtgtttccagaagcattacagcatggaaaagttttatatgtatattctggaagtgacgcgacatggacagcccgatccgacacatttgttccggtcatatcgggaattcacggaattccatcagaagttatgcatgcactttcctttggttaaactgcacagtctgccggctggtgtgcatgtgggccgttccaatatcaaatccgtggcagaaaaacgactacctcttattcagcgatttttgaaatcgttgttcgatgcgtccgaggaaatagcccattccgagctcgtttacacattctttcacccgctgctgcgcgatcagcaggaagccaagcttgggatgccgaagataaaggaggtgaagcaacaaccgtcgcgggataatccccacgagattggccaaatacgactatcgctgcaatatcaacgcggcgtacttactgtgatgatacaccacgccaaaggactgcccatgttacagggcggtcaggagcccaacacatatgtgaagtgctacctaaaaccggatcccaaaaaggagaccaaacgcaagaccaaagtggtgcgcaagacctgtgtgcccagtttcatggaaactttggagtaccgaatgccactgaatattattcaagagcgccgccttcaggttacggtttggtcgcacgacaccctgcaggagaacgagctgcttggaggcttcgatatggatctgtcgaagtacgacctgcgacaggagctcgtcgactggtatcgcctgggcgcggtgtccaggaactgaccagatcctagggacgagctcttttgaacctcttgggacactctgcctaccgacaatcaggcctaggataatgcaatactaatatatgtttgtgcctgtcttctttcgatcgcaataatacttacttactcgaagtgattgtacattccatataccaatattaaaaataacataacagtagtagtattatttcgtaaaatgtgtgcctcaaatgtaaatattttataatgaccgcaaacaacattcttttggacatctgaatgtaattataactataaagtatagaacatgcttactctatttacatttaaaatcaatcaattttattgtgcaccttgggaattcagaaaatgaattatattggtagtttgtttgaatcgttctgtcgtcggcacctggctattgttcttttgaagtagttaaatataaaagttcagtattatggcttaaattctataagagattattaaaaaccttctagctcgctggtctgtaatatctaaaattaaaacttgcacgaagaataatcattactaacttttttgcacttttctaattacttaaagtaaaaagagaactaaaatttcctaaagaaattaggcattgcaagcagaataacgcacagatacagattctttctgattgtattttgtttctcacttaatattcacaaaattgctttcagtgtctcaatgagatggcatccaaagcaaactcctgactgcgtctaaaacaaatttacaaagttatagggaattactatcagagagaacaagaactaaaagtgtcttaaaaaattaaacgaatattgtaaaatatataataagagcacacacacaccgcaaacaacaaattatatttttatagaaaaaagaaacattcaaaagctacttctgcctgagcatttcaaatagtactttgatactgattaaaaactacctaagacgtatctgatgttttcataaaattataattaataggaaaaaattaaatttctgtaagtgttgaggaatcgtaaaaatgttagctggcggtaatcacttttggcacaaatatatgagcataaaaaaagg

SEQ ID NO: 12702 - protein, 1876 aa, DROSOPHILA
MSNQAHIDYDKQFQDDLAKATALSLEQHALDDYRRNKKYGSGYQQSSTVAGRDYQAAQRSQSLHQPRRHSEVHQVAISPENAERSRTPPAQGTDNDLICFASPTSKQPESSSPFGKLIEDLQRMQPTNPQSALVPMGPVASASIPPQYGFPPHQQRPTAAQPTPYGMVAGGVVGGPAYGDLQLVPYQPAAQQQRPLNSEELQRLYSMPAQMAVVPVPQPNAYMYYPGAVVTPYTAPIVPGSAAFMPPQYPAQGYGFGGAYTHMDLRRPQSQPAPQQTAPTTSHHHSQPSNHSTSSPAEANGVAFPARRQVPSTVGVSSSSHTGNNGHSSVPRRGNDLIDLNHEDYSRVSVLEAFDPLLNDNTGNDTASDSTSYYAEYDPFDFLYSGDAATQYSDPMYEAVNRWDKTVATVSPNVGLIGWRQDFLSQPSTSSSQYGVAPPEESLKLAENGSGTISPPPPLPPRNQQCYESNQAAMPVSRPPQSSVLTDSYTSSIPANVVLDRRKTCTRLYELISDQRTDDPELLEFYHMVKEVRARYPHDDAPTNVGHVVAAEFNYHYMMDTSIKVIVHPALNTLQSTVLAASMGKEQVKGYGMPVTFTCDIDSVVAQVVAQALASLEGQVKGTVTDYAVKPIGLLEWLAPTSRLSQLECVHNSFQLEKDVHLGLCLSTAANMQAIARTERDDEHDADLLPEHLLPNEVVPIVTYDNMMILIETLEMEIDKLESAADGVPGRSVVSCSGVVQAVKAICALLGSIDTMEIARCVADLKRICEVEQKKYSTGASNPEIVSDYGDYAQVVLRPRSMLEQIKVKCNELRDAVQELVELYANVFRVAFSVKTPDYSTTPIPISCVSKPIVVCISCLHRPLPNWKFDDYSLCVQIVYGTRLLSKPNVLTCSNDTSGGLFPRLNFSAWLTFDQHPICTLPREARLTFVLYGKQAASEGEPNADQNGERRQVTTELGWCSIQLFDFKRVMICGPYLLSLWPPMTDKMLGPAPARGCHPQPDFCPVLSIEVPPYGGRIEFPEHQEVPKPAPHYDFASLDANLQEELLDTAELGYTGATERREVFWEKRLYLQSYPNALPKVLHAAHSWDYANLIDLHALLHSWAPLSPLQSLELLLPRYPDAKVREKAVEWISKMPNDQLVDFLPQLVQSLKHDTYEGSAMARFLLSKCLESPRFAHHMYWLLVHSLPDDPHNSIGAAMVDQEYDESQVTQVRYYRRNKMMLRALMAICGEKMLQRFMYQHRMCQKLTTIAESVKEAKESMRQKSLAAGMDEVHQDLLEQPTCLPLGPELEVTGVSVRNCSYFNSNTLPLKINFVGPDAESLPAIFKCGDDLQQDQLTIQLIRIMNKMWLAERLDLKMVTFNCVPTGYKSGMIELVSEAETLRKIQVECGLTGSFKDRPIAEWLGKQNPSPLEYQSAVRNFTLSCAGYSVATYVLGICDRHNDNIMLKTSGHLFHIDFGKFLGDAQMFGNFKRDRTPFVLTSDMAYVINGGDKPSTDFHYFVDLCCRAFNIVRKNADLLLHTLAHMATAGMPGVNSNAVQYVRRALLPSQSNPEAAATFAKMIQSSLKSWFTQFNFFLHNLAQMRFTPDEGSGELLSFVPRKYTMQQDGRLKIVKVVCFQKHYSMEKFYMYILEVTRHGQPDPTHLFRSYREFTEFHQKLCMHFPLVKLHSLPAGVHVGRSNIKSVAEKRLPLIQRFLKSLFDASEEIAHSELVYTFFHPLLRDQQEAKLGMPKIKEVKQQPSRDNPHEIGQIRLSLQYQRGVLTVMIHHAKGLPMLQGGQEPNTYVKCYLKPDPKKETKRKTKVVRKTCVPSFMETLEYRMPLNIIQERRLQVTVWSHDTLQENELLGGFDMDLSKYDLRQELVDWYRLGAVSRN

SEQ ID NO: 12703 - DNA, 9670 bp, DROSOPHILA
cttgccttgtttatataaccatgttaagtaattaatcaacaagctatttggctctcaatacgtggtcattatctttatgtcaaaccgtttttttccccacatactgccataatttagataactcaacctgcgaaaaatgtttaatttatcagccacaagaggtagcgatgatataacgaaagtggtgtttggctaaaaaagaaaactgcaagcatggccaaatgaaacaaaaagaattgaccaagaacaaatgctatgaacttcacccggtggccatgaatttggctaaagaaagttgagtatttcagctacgagtgctgccatcagcaaaatgtgaagcactcaaagaggtaaaaataattgcaattattcaagcgtggttaacgctcgcccccaggggttccaccttggctaattgatagattggcacgatctgatattagctgataaaaacatgtttactatttcaaagtcaacaagtgggagcttaaaaaagtgttgaggttcggttccttgcttgaaccagttgggctgtaagctatcagccagtgttaaaaagtatcgaaagggattaatggaaatccatatgaaggtttctacattttaattactttttatattatttggcttaaaatataaaacgaaaataagtaaaatatttttaatttgattgtaacatcatttgttttatattatagatagcataagtaatagactctttgtcttattaaatacatacattttgtacgtcctgcagaatgttttgttttacgttctacaaaaggcagttacatctttgaaaagctttccgctttaaaatcttgtggtgctcttgaaaaagctctagcagtgctggaaaatgctctccaagagacagctttcattccgctctctcattttgtttagcattcgccgtagccgttttattgtcaagcttgagttggccagttaattaataacaagagctcgagagcggttttcaatctcagagttgttttgaccgcgttgccatttggacgtcgccgcatttaacgcatttgttccgccaatattcgcaccttatattgcgcgtcctgtccgcataggaaaatcgaaaatcaaccccccagcaactccacctcctccgcctcttccgctgccttttttggccaattgcaaaagtttgccaacagtgaaacgtgaaatctttgaatttacctttgcaaaaaaaaaaaaaaacgaaaacgaaaaaattgaatatctccgtgccgttcgaggcgtgtaattttgtgtgtatttttgcggtaagttgcgttaacaacattatgctccatagaaagcacattttggccattgtgctcgtagattttacttcactcttgcctttgggcaatgcgcatgcgcagcgccgttgacacactttctgcccccaccgcacctggtttacccggccagcgtgccacaagcaacttatggctctctggcttttggccataaaaacaattaccacttggctgcatttcgtcagcgcgtgcgtctcgataccaaacagccccgccctcccgatggtcatctatatatcccagaccatattaccattcataatctccgcaagctcaccactttggcacttcgatcttcggtagctgataatatttgtgtggctaagtaaagtgggaattgcctaaggcagatgggcgggtggttggcatattacaccatttgagtgtgtgaaaatgtgtggttccaaattatttaagagctgtttcgctgtggcaagtgaagtcgttttgaatggcgcacaataatggaaaaaaagtgttactttgtagtgcttttgctgagcattttgttgcagcgtcgttacagtgtggtaatttgaaactattttaattgtgcatagttgaacttaatgaagcgtttgagataacttgtaacggtatgcacagtgctatatttgaaattataagctataattgtttgttagttttcttgcttgttcatttaaaatagagaacgctgagaaatatttttatgcaggaatattgtacttaagctgagataaaatttaaaaataatttatttaatttagtttcttcaaagtattctgttcttcgcattaagataatttgaaggctaactacacacttttcaaagccgtcctttatagcgtggttatactgtcaccttcataatgcatgcaaatgtaacacaattgaaatgcaaattgatggtactgatgtccctttcgcacccagcattagtgacaattttctgtctcgctccaactggcttcaatttctgtttattcaagggatcgatggtcgtagtttataaatatttcagaccccaatcagccgattcagtgggcaatgaaaacatttgctctattgacactaaaacattgacagagtttataatgatttgcccgtattaacatcgcgatttgggcattttatttagatctcatatttgactattgcaaactccgcttaattctctatatacacatataacaagcgaccttgtgggttctcagccgccgaaaaaataagtgaactcaaaaccagttaaacatcttacggccgatcgtgttgtgtgtgggcatgaaatttacccaaattgttaacattttgtcaaatgaaggataccataccatagacttgcgaaaatatacaataagccgttattgaatctgaaaatttacatatctctgaatactactctatcgacttcgtacttggaaccgaaggcgattttttatagccacgttcgtacgatcgagtctgttaattttggcattgtgaaagaaatcgaaaccggctattcctgctcctcgagaatcattcgagtcgagtatttatttatcttttgagcagtcggttcagtgaatgagccaagtaatgcaggtgctgaatcgtagtgtcatttgcctactgttgttggcccagatcatgttgttgcaagagtttatagtagaactgtatgaacaaactgtttctttagtaacgacctaacatgttcagttgttctataaaaatctataaaaataccattattatattgcagtagtaatttaagcatgcacgtgcttttaatttgccttaagtaacattcttacatcttaagttgttctataaaaaaaaccattaaatagttaaagtcgccatcgttagggttgttgaaagttcaaaagtcatttgataccctaaacaggttattctggatatttcctagcttgcggataattgagaccgatttgcatttaatgccttgatcgctttcattgattggcttataaccgtctaattactatggaatcacacatgtttatatcattacattaaaaaacgaagtcctccacttagccaaatagattgatatgcaaggcacgagaaatgcattagacttttgatcagagctgacattgtactatatataccgtattcaccaactggattgacccatttaaaaatcaggggcgcgactaagccgatagcaaagtgggctgtaatttattagctggatcatttagtttatagccgaggtgttttagttttaataaactctctattaaagctaagattttgattgattaatggtgcagttaagccagtgtacatatacttttcaatcgattaagtatagttgtttgtagacacaatttaattaaagagtcgaattaaaagattgtttttgcgatataaaactaacattattttttatatgcttttggcatgttcatgtcttatcgctttcacgttttgtaaaaaacgataaacaattgtagttgaatctgtcatgaaaacaaaatctacagcggaattgttagataaacttcccaagggtatttataacttcgaattttctatatctatttggctttgcattttgcttcgtcatttgtggcgctgcaaaatggtaaaatgcataaggaaaaacagcaatttgcatcaaatagccggctagttgatggtattgatcatttttcatatgacttgtttatttatgcatatcatgttggctcggagtattgagtgcattttttttcgtcttataaaaaaagcattgttttggatttttctttctaatactttaatgcccggcagttaagttggaattgattagacatcagtttgctttcgggattacttctgttgtttgctaatctatatacaataatagctcgtttatatgagtggacataacccgattagactttcaagctgaatttgaatgttcctttgttctgttttcttctgcgttgcgataccagttatcagcttatttaaacgaccgactactactggattaatgcccaattgcaattcgtttctcggggccacaatttccgcttgccagtgacagtaagtgaaacgcctctgttcgattcggttgcgtctaggctaacgaaaggccacataagttcaagcagttaaagtgaaataatccccagtggagcacaattgttgaggcaggtgaagttggggcacataatgccagctattaaatgggtatcgcacggagcacgccggtggtaattatttgcttgcgtcagactttgatcgacggttgaaagttttccttcaatggaaaacatcagattctgccgaaagtgcatccgggaggttgggttcgcagtacacttttgtgggtcataaaaaaaaacaaacagggctcacaattaagctagctgagaacgggttttgttgttgaggtatttttctgttttaattaaaattgtgaagtacaaaatacccattcgttaaagtccagaagctatttataaatcagatatcagatatcagtttacaagtcagagataagtgtttatagtttaacgaaatgcaaaaaattccatcaaaggactttttgaacagagtaccggtttttcgttttaactttccctttaaggaataatgaactaaactagttaaaaaggcattaaaagcaggtatcactttcaaggatgcgttcgatgactcgaacttaagaccaaggtctgtggaatctcgtttttatatagattctgttgcctataagcatttcacaatgatattccctacccaaagaacgataaatatcagtggaaatatttacattcatttttaaaacgtgtccctgaggcacaagatcacttaaaagtaaaactccatttaacttgattgctccctactcaaccgacatatcttaaaactgaaggaacgataaaaaccggattcgttttaagctgagtcactatgattctgaacaatggcactaaccgatataggtgactaaatttaaattcgattttttctaaatgcataaggcgcgaacagaatgatattaagtcaccaagcaaagttcatttcctcgcaattagcaccaattcgctatttgtcagataatgtgacgaaatttaaataaaacttggctaattagttctactgtgataaacaaattagcttaaatgaagttcaaactttagtaaattgcacatacggatgtgttatttttttgacacattattacatgatattaacccttttttctgtcgttttctgtcaattcacttgacatattgcgtgcggttaattgtcaattattttactcacgaaacctgtgccaaggaaatgtcccaaaaccaagattacgattattttactttattttttttttttttttattatattattttcgcatgtcacacccaaatttttgtcactcattttcccactttaattggattttacaacatcagaagacaagattgaccaacaaattagtatgcgcataactttatgggctgttgaactccacggcaaagaccaagtcaaacacaaaggcccaaaataaataaaagcataaattacccaagattcattgacgaaatttctggaagccacgaaaattaaaaagccgcaacgcatttgccggaatgacaaatctacctctatgctggctccaagtttttcaagttttacggcttcaatctactatactatactaataatatcaaacaatctttgctcttggccttgacttttaccttcattcgcgttgaccgcacaaaaaagtcaatatcaaaaaaacgtactaattgctttgaatcataagagcagcagtaaatcaaatttaatggccaacaccgatttgcactactctgcggctcaatccaccgaccaagttctttaacttctcaacttcgagtccgaatttttctgtgccattgtcaagtccttcatgacagggcatagatcacaagtgctacgtcatcgagtcgattttgaccaattttgttttagcagccaaggtgttgccaagtcgtctgcgagccaaacagtcgagacacgtacttgttgatatgtatcatacatatagagagatcgagtgttcaaagactgttcaaagactaagaaaatccaactaataatagttatgtttttctttgttctaaaacgtgtatttgttaaaagttaatgttgactttatgtagctataaaactattataatgacatacttataaaaaagaacttaaatttcagcactcaaactcttctttgctggtgcttttaatatttttacaaattgatggcacacttatacaaatttaaacatctaaataatttaattccgttaggatatgacaagtctttaaaaaaatcatgataaatgacctaagaagtgcagcaaacgccctgaccgaatttctataacctttgcggtgagggtatccaacgattttggccatcgaacgcacgttttgcgaccagttttgggtgctattgtctatcagtctatctatttctatatctatatatatttacccgtttgtccggcgaactcttcttccgttgtggcggttttcggcgacttttgcctatgaagatcagttttgagtcatacataaacatcgaggtgtatgtgtatatttatatatattaaaacagtttccattggagcgaggcattgaactgttgccgcttttgctttctgcttggggttttggccctgctgcggaagtaacccagttgtgccaatcgctttgaggaaatggttgccaaaccactcaaaatgtttgagccgagaccaaaacaacttcattctcgttcgcagcttgaaccggtgaacaactagcgccagatcgcggcatccagatcacacaacatatccacaccatgggcaaggcagagtgcattagctacgatgagcacaagttgccctacatcgatctgggctcggcacagatccgcatggagaaggaacaagcgccggaatgggcactgaagaaggcacaggatgagttgcgggaagtgcccggcgtcaaggagcaggccatcaaggaactcagggaactcattcaaagtgggtgaaagcacatgcacgttggttaataaaatttaaaaaaaaaattccaaattaatagatgaaaagtacctgaacctgccattggatgatgagtatatgatgatgttcctgcgtcccacccattactatccagaaagtgccttgaaaagggtgagtaatttgttgaaacatgcaagctttaaatatatatattttttatttattttctcttacattatgtacagctcaagaacttttatcacatgaaattgaagtatggagccgcttgcgagaacataatccccagcaagttgagaaacgttttcgaggcaaatattctgaatttgctgccccaaagagatcaacacggccgtcggcttttggtgctggaagctggcagtaagtttggctcttaaaaacaactaaaaaaatgtctataaataattgaattactccagaaaaatggaagccatcgcaagtgcccttggtggatctattccgcggcattcaattgaccgtactgggttctatggtggagccctactcacaaatttgcggctcagttgtcattatcgatatggaaggtaataaattctaggcaggaaatacaaattatacaagttacttaatacatattaaccattttgcagggctgccacttagccacattacacaatttacaccgtcatttgccgccatgttgctggattacattcaagaatgcatctgcatgcgtttgaaagcagttcacatagtgaataattcatatatattcaatatgctctttgccgtattcaagccattcattcgcgaaaagctgcgcaagagggtaagtttgaataagaaatacatgaaataatgttaagttatatgtaataaattcctatttggtagatcttcttccatggcaaggactacaagtccctgatctcccatattgaggcgaaggctttgcctccgaaatacggtggttctgccacatgggaactgccacacggcaaagttttgggcgaattctttgagtgctattccaaggattatgaacgtaagatattcataaacagcaatatcaggctttatatactaataaacttaactttttttttttttagtggctgacagctatgggtatactgaggggtataagatgaagaagtaatagtacaaggaatagtccaaaactaaccccccaaatccgcacaatcctcccttccccctttcgattcgtattttagtcacttaagttgggtcatttgtgatattgcaaatattgtcgtacgttaagtaatagtctctttgccctttaaatgtaaggttaagaaaattattcacaataattaaaatgatcacgatacaagctcatgagctaggcattaaagtggataccatatatactatatattttgtataattgttattgaactaataaagatgaaaaaaatgttgttaaaattcaaaacaaacgttgtgagctgtaatgaaataaaaatagttatgtgcaatcttacccacttaacctactaaaatgataatttcctttgtagttgaagattttatttgacacgaaagccatgggtcaagaaatcattttaatacaaaacatatctaataactaaggaatgtaaaaagagtattcgttagctaagcgaagtccaccagacgtttcgacttcgaaggctatctaatctttggcataggcacgggaatgcttgcaattttcagttgggtgttttagagtgtcactaaactatgagctacgactaaagcactaggacggcttaactatctaaatggcgtgaatgtggcggttctgttcaatcctgcttattgtcgctgatggctgtggatgcagtggccacactttcacccgtctgggatttaataatggttggcttacggcctttttcgaggagcggagaactgtccggagatcctttgacactcttttcgcacaccaaagtggaggccttggacttcagttcctcagcactggagaattgagagcgactcttatactggccattcgttttggttttggtcctcagatcgtatctacgatttcgacaggaagccaatagaatctgaaccggagtccagcagagtagagttatgcctacgatcaagcaaattccggcgaatatatgtccggagagcatgacaatgggcagcaccttcagttgatctgccatatctggagtgattcttactttctgttcgaaccatacgagtgggaaaaatatccttggtattccagtgtataagctaatgccttggattggctccacgagcatattcacttgaaatcgggcagccacctccaggggaataccagtacttggctgcacaaccatataaaactcg

SEQ ID NO: 12704 - DNA, 1421 bp, DROSOPHILA
ccgcgttgccatttggacgtcgccgcatttaacgcatttgttccgccaatattcgcaccttatattgcgcgtcctgtccgcataggaaaatcgaaaatcaaccccccagcaactccacctcctccgcctcttccgctgccttttttggccaattgcaaaagtttgccaacagtgaaacgtgaaatctttgaatttacctttgcaaaaaaaaaaaaaaacgaaaacgaaaaaattgaatatctccgtgccgttcgaggcgtgtaattttgtgtgtatttttgcgatgggcaaggcagagtgcattagctacgatgagcacaagttgccctacatcgatctgggctcggcacagatccgcatggagaaggaacaagcgccggaatgggcactgaagaaggcacaggatgagttgcgggaagtgcccggcgtcaaggagcaggccatcaaggaactcagggaactcattcaaaatgaaaagtacctgaacctgccattggatgatgagtatatgatgatgttcctgcgtcccacccattactatccagaaagtgccttgaaaaggctcaagaacttttatcacatgaaattgaagtatggagccgcttgcgagaacataatccccagcaagttgagaaacgttttcgaggcaaatattctgaatttgctgccccaaagagatcaacacggccgtcggcttttggtgctggaagctggcaaaaaatggaagccatcgcaagtgcccttggtggatctattccgcggcattcaattgaccgtactgggttctatggtggagccctactcacaaatttgcggctcagttgtcattatcgatatggaagggctgccacttagccacattacacaatttacaccgtcatttgccgccatgttgctggattacattcaagaatgcatctgcatgcgtttgaaagcagttcacatagtgaataattcatatatattcaatatgctctttgccgtattcaagccattcattcgcgaaaagctgcgcaagaggatcttcttccatggcaaggactacaagtccctgatctcccatattgaggcgaaggctttgcctccgaaatacggtggttctgccacatgggaactgccacacggcaaagttttgggcgaattctttgagtgctattccaaggattatgaactggctgacagctatgggtatactgaggggtataagatgaagaagtaatagtacaaggaatagtccaaaactaaccccccaaatccgcacaatcctcccttccccctttcgattcgtattttagtcacttaagttgggtcatttgtgatattgcaaatattgtcgtacgttaagtaatagtctctttgccctttaaatgtaaggttaagaaaattattcacaataattaaaatgatcacgatacaagctc

SEQ ID NO: 12705 - protein, 311 aa, DROSOPHILA
MGKAECISYDEHKLPYIDLGSAQIRMEKEQAPEWALKKAQDELREVPGVKEQAIKELRELIQNEKYLNLPLDDEYMMMFLRPTHYYPESALKRLKNFYHMKLKYGAACENIIPSKLRNVFEANILNLLPQRDQHGRRLLVLEAGKKWKPSQVPLVDLFRGIQLTVLGSMVEPYSQICGSVVIIDMEGLPLSHITQFTPSFAAMLLDYIQECICMRLKAVHIVNNSYIFNMLFAVFKPFIREKLRKRIFFHGKDYKSLISHIEAKALPPKYGGSATWELPHGKVLGEFFECYSKDYELADSYGYTEGYKMKK

SEQ ID NO: 12706 - DNA, 4159 bp, DROSOPHILA
agtacaggccaatgggcgagttgaattgcttgtggaagacctaaaatcgggggatatatgtacacaaatgtaagtaaaacccattacaacttacacttaaattaaatacaatcaatttcgtaacaggattagaacaaagactacaggtcacgaattcgaaatgttaacattgaaaatatcaattttaaatgtagaaaactctagtttttgtaattttccattatgtgggtgtgactttaagaagtcccctgtacttacgcggccagtgtcggcttccgaaccgaccaccttgtgcagcatggtgtcggccacgcgctgcttcatgatactgtcatggtagtcgtgtcctgggtgggcgcgcacagccgggttggggtagtgcctcaagtaggactctgtcgtgggcgcatccttcttcactttggcgccgggcaggaccagcggagttgtacggtagggctggaaagcggatcggtgaagattaacgactttgtttacgccgaaatggggcacacatttggccgaccagccgttgcggcaaatgataatataaataaatcagacagagattaaaagagtttctagaaatcaccagatctttgcccactgtgctacgtatttctccttcgagcgtgtgtgtgcataatttttttcgctatatctaaattccattttatgtgcgcccgtttatatactttaaaaatatcccatagccaggggaaatatttttaggcgcttacgtaagcgtgttcaacgtccagcgatttgtgttttctatctgccgcggaccattttatttttaccaggccgtccacacgcgagtatgtaagtaattcaatataggcggactgctgtttgaaatgttgtaactatgcgcgcctaatcgataggcgatcgacaataggcagctctgggctagagctgccagatgaccagaccaggcttgatcagctgttgctcgtggcgaatggcaaactcaatttgcgcgcttttttaactgtgactgccagctgaaaattgtaacgcacgctgtggcttatttaactcgtatttaatagtaactaactgctgatcaataaactaagctaaagaatggctgccgtacgccgctccacgcgccttagtagcatcagcaaagcgaccgccgcctctccgctgccgccgtcgacgcagacgccgcgtcgctcggaagtttggaaacgcaggcagccgaaaaaagtgcttgccgatagcgacgaggaggaggaggtggtgacggcgatctatgacctgaccagccccgtttcagagaacaacgagaaccgcaacgtgctcaacaaaatggacaagatctccaggcgcaggacatcgcaagtgcaggtggctcaatcggagctgccaaagacgccacgcagcacaaagaaaacagtccaatcagctggcagttcacgggccaaacgtgaggaggaaaaccgtgaggccaccgctagattcttggagggcgaacaggattcggaggtggacccgcttcatggatcgccgccgaagcagaggaagttgcagccactgccacagcacctgatcagtccttcgcggctgctggacagactcagcatcgacgagcgccaggaggaagaggtggaggcgaccacacacaagactgaaacggctgagcagcagccgaaacatcaagccaaggacgaggcaaagcctcggccaaaacagcaggaggatccattagcgcaaaagcagcaggagaaacctccaacaaagcagccgaataaaaaccaaactaaagaaaaaagcaatatccaaaccaatgaggaaacccaacagaataacctgccatctccctcacgcaacaaataccaaaacgccagacgagtgctcaacagcgccgagacacaaaacttgccaggacgtgagtcccagctccaagagctacgtgaattcttcagcaatcacctggaaagccagacttccggcagcctctatgtctccggtcagccaggaacaggcaagaccgcctgcctatcgctactgctgagagatcccgacttctccaagcgtctgcaacgtgtgtacattaactgcaccagcatagcaagtgtaggagcagtttacaagaaactatgcaccgaactgcagctcaaagtcagcggtcgcacagagagagatcacttggaggccattcagcgtcacctaaagacagcaaagcgaatgcttctgctggtgctggacgagattgatcagctctgcaccagcaggcaggaggtgttgtacacgatcttcgagtggccagctcttcccggctccaggatactgctcgtgggcattgccaatagtttggatctcacagatcgtgcgctgatgcgactgaatgcaaggtgcgagctgaagcccagactgatgcacttcccgccctactccaagcagcagatcgtggagatattcaagtcgcgtctggctgaggcggaagtgctggacgtctttccacccgtgaccctgcagctgctggccgccaaggtgagtgcgatcagtggagatgtgcgaagggccctggacattggacgacgagtggtcgagatagcagagcagcagaagcgcgatggcgaaaaggagttcaatatgaaggccctgcagctggagggcaaggatgcggtggaggccaaggaaaagcaaggtaaaccttcgtttctttagtatataaagataaatttatagaatgtgttaaaaagaaatcctatcttgactatttcagacactctaaagcctgttcaggtcacccaagtggctgcagtgctgaacaaggtctacggtgcctcacagaatctggaggaggacatcgaggcatcatttccgctgcagcaaaagctaatgctgtgcaccctggtgctgatgctgcgcaacgagcgcaacaaagacatcagtatgggtcgcctgcacgaggtctacaggagagtgtgcgccaaacgcaacatcctggccctggaccaagcggagttcactgggactgtggatctggtcgagacccgaggcattctgcgaatcatgcgcaaaaaggagccgcgcctgcacaaggttctgctgcagtgggacgaggaggaggtgcatgcggcactgagcgacaagcagctgatcgcctcgatcctcagcgataccgcctgcctgagcaagtgacgatctggacgattacctctaggaaatgagtgtgcccgacaaaccgctggttaattgcgcatttttctcattttcattcaccttggggacgaacgtatatgtataggaatactttttgacgctaattttaaaattcgtggctggcgcaagcactgaaatattttgaaatatcatttgacggtcactttcgacattttctgctattttctgactattaattgaatcgattcttttagactttgtgtgtgtcataaatctaagtaaatgttgcgcccataatctatttctaatccgatccgttgaccaataagttatagagaatccccttcctgttagccctaagcaaataagaataaactagatagttccgcaatacataaaacgcaaaagtgaaaacgttttccactttcgctgcgccgcaagtttgaatcttgggtcgtgccaaaagttgtgaaaatcttagggaaagtctgttgccattgttttctgaggcgttttcagaacataccagtcaaattaacaccagtgcttctgaatttgtgtgggcttttgttggccatctcgacatgaaattaatttgttctataatcattttgtttatttatttgctggcttattgttgttcttcctgcgctctctgctctaaaaatatccccatttgagtggtatgaattacattgagcaccaccgacacaaccagagcgcaatgaaaaatatgtttcaaaaactctggttgcctttcgacgcgtattgacgaaaggcgaacaaatgtttgaataataagctatatgcagagaggccagctagatatatgcatgaatgtatctataggtatatggcgttctatattcctattcctcaaaaatacatatatttctgagggagcagtaaggcgaaaaacctcgaaaaacatacaggtctgttggcgctgccatttgcatttgaacttgaattccaagatcaaacggttgacggtaaaggtgaaatgtttcatctggat

SEQ ID NO: 12707 - DNA, 2081 bp, DROSOPHILA
tgactgccagctgaaaattgtaacgcacgctgtggcttatttaactcgtatttaatagtaactaactgctgatcaataaactaagctaaagaatggctgccgtacgccgctccacgcgccttagtagcatcagcaaagcgaccgccgcctctccgctgccgccgtcgacgcagacgccgcgtcgctcggaagtttggaaacgcaggcagccgaaaaaagtgcttgccgatagcgacgaggaggaggaggtggtgacggcgatctatgacctgaccagccccgtttcagagaacaacgagaaccgcaacgtgctcaacaaaatggacaagatctccaggcgcaggacatcgcaagtgcaggtggctcaatcggagctgccaaagacgccacgcagcacaaagaaaacagtccaatcagctggcagttcacgggccaaacgtgaggaggaaaaccgtgaggccaccgctagattcttggagggcgaacaggattcggaggtggacccgcttcatggatcgccgccgaagcagaggaagttgcagccactgccacagcacctgatcagtccttcgcggctgctggacagactcagcatcgacgagcgccaggaggaagaggtggaggcgaccacacacaagactgaaacggctgagcagcagccgaaacatcaagccaaggacgaggcaaagcctcggccaaaacagcaggaggatccattagcgcaaaagcagcaggagaaacctccaacaaagcagccgaataaaaaccaaactaaagaaaaaagcaatatccaaaccaatgaggaaacccaacagaataacctgccatctccctcacgcaacaaataccaaaacgccagacgagtgctcaacagcgccgagacacaaaacttgccaggacgtgagtcccagctccaagagctacgtgaattcttcagcaatcacctggaaagccagacttccggcagcctctatgtctccggtcagccaggaacaggcaagaccgcctgcctatcgctactgctgagagatcccgacttctccaagcgtctgcaacgtgtgtacattaactgcaccagcatagcaagtgtaggagcagtttacaagaaactatgcaccgaactgcagctcaaagtcagcggtcgcacagagagagatcacttggaggccattcagcgtcacctaaagacagcaaagcgaatgcttctgctggtgctggacgagattgatcagctctgcaccagcaggcaggaggtgttgtacacgatcttcgagtggccagctcttcccggctccaggatactgctcgtgggcattgccaatagtttggatctcacagatcgtgcgctgatgcgactgaatgcaaggtgcgagctgaagcccagactgatgcacttcccgccctactccaagcagcagatcgtggagatattcaagtcgcgtctggctgaggcggaagtgctggacgtctttccacccgtgaccctgcagctgctggccgccaaggtgagtgcgatcagtggagatgtgcgaagggccctggacattggacgacgagtggtcgagatagcagagcagcagaagcgcgatggcgaaaaggagttcaatatgaaggccctgcagctggagggcaaggatgcggtggaggccaaggaaaagcaagacactctaaagcctgttcaggtcacccaagtggctgcagtgctgaacaaggtctacggtgcctcacagaatctggaggaggacatcgaggcatcatttccgctgcagcaaaagctaatgctgtgcaccctggtgctgatgctgcgcaacgagcgcaacaaagacatcagtatgggtcgcctgcacgaggtctacaggagagtgtgcgccaaacgcaacatcctggccctggaccaagcggagttcactgggactgtggatctggtcgagacccgaggcattctgcgaatcatgcgcaaaaaggagccgcgcctgcacaaggttctgctgcagtgggacgaggaggaggtgcatgcggcactgagcgacaagcagctgatcgcctcgatcctcagcgataccgcctgcctgagcaagtga

SEQ ID NO: 12708 - protein, 662 aa, DROSOPHILA
MAAVRRSTRLSSISKATAASPLPPSTQTPRRSEVWKRRQPKKVLADSDEEEEVVTAIYDLTSPVSENNENRNVLNKMDKISRRRTSQVQVAQSELPKTPRSTKKTVQSAGSSRAKREEENREATARFLEGEQDSEVDPLHGSPPKQRKLQPLPQHLISPSRLLDRLSIDERQEEEVEATTHKTETAEQQPKHQAKDEAKPRPKQQEDPLAQKQQEKPPTKQPNKNQTKEKSNIQTNEETQQNNLPSPSRNKYQNARRVLNSAETQNLPGRESQLQELREFFSNHLESQTSGSLYVSGQPGTGKTACLSLLLRDPDFSKRLQRVYINCTSIASVGAVYKKLCTELQLKVSGRTERDHLEAIQRHLKTAKRMLLLVLDEIDQLCTSRQEVLYTIFEWPALPGSRILLVGIANSLDLTDRALMRLNARCELKPRLMHFPPYSKQQIVEIFKSRLAEAEVLDVFPPVTLQLLAAKVSAISGDVRRALDIGRRVVEIAEQQKRDGEKEFNMKALQLEGKDAVEAKEKQDTLKPVQVTQVAAVLNKVYGASQNLEEDIEASFPLQQKLMLCTLVLMLRNERNKDISMGRLHEVYRRVCAKRNILALDQAEFTGTVDLVETRGILRIMRKKEPRLHKVLLQWDEEEVHAALSDKQLIASILSDTACLSK

SEQ ID NO: 12709 - DNA, 2680 bp, DROSOPHILA
attagcttaaatttaaatcttatatcgttatatatgtatgtgtactcgtgtaaacctatggcttctacaaatgaatatcaataacataaatctcttaataaaaatgtgcattggcaaaacaatttaacacgcacaggacaccaaattacccagacacgaaaactttcaagcatactcaagaaaaaacgaacaaaatataaacgcaaagcataaaatgctttgatatttactcaatttatgatatattaatgtctaatccaatgcaataatcagccgaaacattttttgagtattgagagtaggaaagggttacaattttgaacgattgattaaaatactcactttctaggttcacgcataatttaagttcatataagccacaaataactgaccatatgcgagcaaaaatacttataacaattgtataataaaagtgcattaaacaaataaatgcaatatttataattggtggatgctgttttcttctaaattaacatttttcctctttgctggtgtgttgggttttcggactttaatatggtacacatatatttgatatttccatttcaaattttaacgcttctagccatatacatttttcttaaatttttaaaatttaggtatgatttaaattgtttcactcctaaaaattccacaaagataagatacaaatggaaatggaacagtggttgtggtctcgggtaagttcttgatagtcaagtttcttaccatcttaacacaggacatcataagaaatgttttaagtgcgatttgataaatgtttaaaaacaacatgtttaatattgattgtataaactttatgcatagtcttcccaaacatataatagaaactgtttcataacaaattccaaatagttgctatgtttttgcggccccacctcggcattggtattttcctgccagccgcgcatggtcacatcttttctggttgataaattccagggcctgtgaatcataataagttaagtaaaaagtgcagatacaacaaaccgcaggcagcagacaacaacccgacacccagacacaatggcagccacattgaagccctacctgaccgccgtgcgacactcgctgacggcggcgatgtgcctgcaggacttcccctcgcaggtggtggagcggcacaacaagccggaggtggagatctgttccagcaaggagctggtgctcacgcccgtcgtcgtgtcgcgcaacgagcgggagaaggtgctgatcgagccgtccattaactcggtgcgcgtgagcatcgccgtgaagcaggccgacgagattgagcgcatactgtgccacaagttcaccaggttcatgatgcgacgcgccgagtcgttcgtcatactgcgccgcaagcccatcgagggctacgacataagcttcctcatcaccaacttccacacggagcagatgtataagcacaaactggtggactttgtcattagcttcatggaggagatcgacaaggagatcagcgaaatgaaactggcggtcaatgccagggcacgcacctgcgccgaggagttcctcaaacggttctaggtaagtgttccacctaacagccatcgccattgagtcgacgccaacttactctcgcaaatcctttgcaggtgaaggcaaccagtatggacccggtcatgatgctttagtatttccaaatggattcaagaataaagacggattttgtattatttactcgactacaccagttttatatgctatcccgtttggccgcaccaccacatgaccactgcgttctcgtagagaacttccttctgattttgattcacatcggccggcgccggcaactccgtcgtttccgttccgtttaaggtcacgttgtccccttgggcactttggtctgtaaagtggaactgccccgagctggtggctagaatcggcatagccggattgagtgccactccgttgcagcagtctgaatgcaggggcagtacggaaggatctccgtattttttgagatcccaaacattgacgaatccccgtgtgtcaccgctagccagccaattgctgtcggatgcgaggtcgaattgaatacgctgattggtgtccacatggcgctgcaactccaccagtggctgcttgtagttgcgcatgtcccactgcaagatcttatcgcacttgcgagctccactgaacagatgccactccccgttgccaaactctccatagcgcagttgtgtgatgccgcccttgtgccctcccagcgtgaagagaggaccctgcttgtggctacaccgcaagtcaaagtgctggatgtagccatgccagttgccgcaggttagagtgtgcgggtgcgcagtggtctgtgcaatgcaggatatggcaaacttgacagggtaatcgtcgcaaaaacgtccgggtctacggagtagagtttgagttgcattaaatgagcgtacgaaaataagcagccgactcacctgctggtgtcgaagatcttgatgcagcgcttgtatcccgcatagatctgctcgccgtcatgggagaaggccaaggaaatggccgccattacttcgtctacggcatcgtacccactgtagctgcatcgcagggaaccgtcgaaggcatcccacatgtgtatgggttcgtgctgccgcgtggccagccacctgcgtgaaatgggaacggtataagattggggagagcg

SEQ ID NO: 12710 - DNA, 612 bp, DROSOPHILA
atacaacaaaccgcaggcagcagacaacaacccgacacccagacacaatggcagccacattgaagccctacctgaccgccgtgcgacactcgctgacggcggcgatgtgcctgcaggacttcccctcgcaggtggtggagcggcacaacaagccggaggtggagatctgttccagcaaggagctggtgctcacgcccgtcgtcgtgtcgcgcaacgagcgggagaaggtgctgatcgagccgtccattaactcggtgcgcgtgagcatcgccgtgaagcaggccgacgagattgagcgcatactgtgccacaagttcaccaggttcatgatgcgacgcgccgagtcgttcgtcatactgcgccgcaagcccatcgagggctacgacataagcttcctcatcaccaacttccacacggagcagatgtataagcacaaactggtggactttgtcattagcttcatggaggagatcgacaaggagatcagcgaaatgaaactggcggtcaatgccagggcacgcacctgcgccgaggagttcctcaaacggttctaggtgaaggcaaccagtatggacccggtcatgatgctttagtatttccaaatggattcaa

SEQ ID NO: 12711 - protein, 168 aa, DROSOPHILA
MAATLKPYLTAVRHSLTAAMCLQDFPSQVVERHNKPEVEICSSKELVLTPVVVSRNEREKVLIEPSINSVRVSIAVKQADEIERILCHKFTRFMMRRAESFVILRRKPIEGYDISFLITNFHTEQMYKHKLVDFVISFMEEIDKEISEMKLAVNARARTCAEEFLKRF

SEQ ID NO: 12712 - DNA, 4868 bp, DROSOPHILA
tgatgtctgtcttcggctgattgccgggactggtggcccagttgacctgcgaagagcattcgtttaataggtaataatcaattaagttctacataattaaaataacatgagggcttggtcgtggggaatgtgtgtgttgcaagagtgtagtttcgaacaaaatgaatgaaaatgaccgctgtccacttgataacttaagagaagctaatcagcttaccttgatttccttttcgaggaataggcgtttattcatggcggtcagagctgttgtggctgcctggtagttggaatattcgatgaaggcatatggatcgttgcccggttcccgaatgattttgcagcttttgacgggccccatggtgctgaagagggcaattagcaggtcctcggacactgagctatccaggttgcccacgtatagggtcttcggttgcgactcgtccatggctgtcggatgtcacgggactgtggcttttttgatctgattatacactaggctacagcgacaatctactgactctacactaaaaccggaattgcaactactgcacctggccgcattaatcggaaggggatgtatcaaaaatttgcagattaagttcctagctacgtacaaaatctaaagtgtctgctaattaaacaggtgtatttgcggcaatctaattggtgctagctgctaacaggaaactccaagagagatttgaatactttgattttctactactttcgacttactctcggcttggcttgatttttttggattatataaactttatatgctcaatctaggtaggttgatctatttgcttaacgctgaggttcgtcgtttattgctttattttgttcctaatctggcgcctaattgaaaatttcgttaaacatctatatgtatacgtataaatatatctgtcctaactaaacgctaatggagtgttttggaatatacgattagtcgcctaatatatatgtctataatcggttgacttcctttcctgggggcctgggatttggattcggggtttcttggtgtacactacttggtatttcagaattgctcgatccttcttcgatgatccggatgttgttgttgtgattataaatagttgtccgttccaatatacaggattgtataaatgtacatatgaatacttggttgcgactacttattcttgctcttgtacaaaaattagttagctaagttaaacagcgtgaaagttcgcaggctgagtgtacttttcgggtttcgaagctgacccctggaatcgttgctgctgtaaaagagagaggtaaatttgggttagttttgcgctgataaccggaagagtgggacaaggtctaatggcacatgatcggtgggccttaaaacaggcgcaaatgatatggatataaatcgactaccccgccccgcccccttttcgcatgatgggaacaaagaaggcggcaaagcagtgcagggacacgcacacacagacgcacgctcacacacactggcgcacacgaaaaacacggggagagtgagtgagctatcttcggagcgagagaggcgggtgggaaaggacaggggaaagagactgcctgtctttataacaaagcgaatggccaacaattgacaatagccattcattcgcaacaaatttgcgggccttgcaaaatgatttagtttataattaatatatttctgtattcacatttacaaatttttttttgggccactcacgcacagcacacagaaatgcacactcaggcacgccagcgagacgagggcgaaaggagaacgacgaaaatcgactagaagatgaatgaccgtcgataacaaaatgaggagaaagaaaaacagggaaaaggaagagaaagatgtgggaaattttgcgaaaccggcgggcgggtgacacacacggttgcattagattcgtgttcttcttcttcacactttgcgaaatcaaattttaatttgcatagaactaaacttgattttgattatttctgcggcggcggcgctagaaaatgtcagtcaaagtcacagaactgaagagacggcgaaaagggaatggcggggtggttttggttgctcatttgctgcttattttcttcgtctctttttcgcacacacactgacacattagcaccgacacgcacacacacacacgcagagagaggcgtcttgcgctggtctttttgtttgcgttttcctcacatgagtctccacttttcttttgcttttgcttttttccgcttttggctattgagtgtatttaaactaatgccaatataccaataccaagacgatttgaatgcgggacttttcatttgccttttcagcttgccgctatatgtacgtatatgtatgtatcttgttcgcttttgtgctgccatcttttaatgccgctcccccgccaccaacaaccgccacgcctccgccccgaccctgctgcctgacagcggtgccgaaaactgggcttaacaattatcgtccccgccgcactatagtgcattcgcttaatgtccattgttcagactcgaatttcgctgtcaaaattcgcactctcttcttttttctttaatgcgctctctgtgacgtggctgcgtttgtaaatttaccgcattttacttgctctgcactctgttcgcacacttcatttgacggtcaagtttagccgctaccggtttgtattaattttgcgaaactttcaaagttgttaggggctgcaaatgtacgttgaacgcgtcgctaaaattttaccttcgtcgtctaaaatgcgaactaattaatgagattttgtgtgcgagagccagggctgccaacttgctgagaaataaaaacgcaatggcggcaagatgggaaatgcaataaagagtatggacttgacaagatttttttataaaattacttacgtaggggtatttaatggaaattcagcgataatatgacaaggatcacacattaattcgcgactttaagttatttgaagcaacgttatcgaaaagggggcaaccctagggcaggcgataacgcttgcatcaccgctttctctctctaacacactcaccgcgggcgcaaatgcagcacaaagcagactagaaataacaatcgttatcgaaaaggtcgtcgaaatgggcataaatatttttataaacagtaaatatataatttcttgtggagatcacgttaaatgtgatgagctttacagtcggattgcggagaaaacagtgagtatgttatgtataattttcataagattttgcaatgtggcccttttttttacagaacctgcaaccaggggaatactacttagtcagcaatggcaagcgcttggagggagaaatttcatctggagatgttcactgcgttctccgccagctcggtggcaaaggaggatttggttccatgcttcgagccattggtgcgcaaattgaaaagacaaccaatcgcgaggcttgccgcgatctaagtggtcgccgtttgcgggatatcaacgaggagaagcgggtgcgcgcctggctggagaagcagggcgaacgggaacgggaggccgaggagcgtaaaaagcgaaaaatcgagaaactgctggccgtgcccaagcacgactttaaggacgataagtacgaggaagccagggctaatctgaccgagaaggtaaacgacgccttcgaggagggactcaagcaggccgaggagaacaaggagaaaggcgtcgaggaagcaacttccagtggcacaaagaggaaatcccccgccgtagacaagaccaaggcaaaaaagaagaaaaagggcacactctggatagacgatgacatctctggatccgactctgactctgacgacagcgaggaggagccaaaaacacagaaaaaagctatacaaaactagataaataacttttgaattaagtatgtaccaaagacgttcttatttcaaaatttacctgaaataaacataacaatataaatacttctcatttaaaatttgaaagatttagatttaatactatggggataattaagtaatttataaatatacatttaaaagagaaagaaaaatcacggtgacacaaactgtgaagaaacccaggccaatccccatttcaggttggttagcatgaatttcagtgccttggtccactgctcctccgagttaaactggattctgtaaggaaaccatcattattataggtaaaatctttaccatttctaaacctacttaatagaataggaatttcccgtggagggatcgatgatcttgcccttctccatcttgtagggcagcaggaactcggtgtcgcgcttctcgacctccttctggaactgggtaagacagtcgagaaaagctaccatggcagcatcaaacttggtgtcccagaaaaacttaaatccgccgctgccataaagcgggagctctcgattctcgccgagcacctcaacatacgaatgatttccaaagggtactacacgataccgctcgaaggtgagccctatcttacgagcaagcgcagagagcagaagcaccgtctggccccaagcggcgttgatctctgaccagtccacggatacagagggcaatcgacccagcctaaagttattaatggtaccgaaatgcccggcatgccagatgtgaaaggtgatgttgaatatgttggtgtcgcgcagtttgtccagctgctgtttcgagtaggcgatctgacactccagacttcgtttgtcatcctcggtgagcattagctcacgcctgtgcttggtatactcgcgccagtagctttcctcctgctcgtgcagctcctctcgctcctgttcctcctcggcaatggcatcatttagcgattgttcctcctttttgagctcttttagctccgacagaagctgttgctcgctgc

SEQ ID NO: 12713 - DNA, 1486 bp, DROSOPHILA
ctgggatttggattcggggtttcttggtgtacactacttggtatttcagaattgctcgatccttcttcgatgatccggatgttgttgttgtgattataaatagttgtccgttccaatatacaggattgtataaatgtacatatgaatacttggttgcgactacttattcttgctcttgtacaaaaattagttagctaagttaaacagcgtgaaagttcgcaggctgagtgtacttttcgggtttcgaagctgacccctggaatcgttgctgctgtaaaagagagaggtaaatttgggttagttttgcgctgataaccggaagagtgggacaaggtctaatggcacatgatcggtgggccttaaaacaggcgcaaatgatatggatataaatcgactaccccgccccgcccccttttcgcatgatgggaacaaagaaggcggcaaagcagtgcagggacacgcacacacagacgcacgctcacacacactggcgcacacgaaaaacacggggagagtgagtgagctatcttcggagcgagagaggcgggtgggaaaggacaggggaaagagactgcctgtctttataacaaagcgaataatatgacaaggatcacacattaattcgcgactttaagttatttgaagcaacgttatcgaaaagggggcaaccctagggcaggcgataacgcttgcatcaccgctttctctctctaacacactcaccgcgggcgcaaatgcagcacaaagcagactagaaataacaatcgttatcgaaaaggtcgtcgaaatgggcataaatatttttataaacagtaaatatataatttcttgtggagatcacgttaaatgtgatgagctttacagtcggattgcggagaaaacaaacctgcaaccaggggaatactacttagtcagcaatggcaagcgcttggagggagaaatttcatctggagatgttcactgcgttctccgccagctcggtggcaaaggaggatttggttccatgcttcgagccattggtgcgcaaattgaaaagacaaccaatcgcgaggcttgccgcgatctaagtggtcgccgtttgcgggatatcaacgaggagaagcgggtgcgcgcctggctggagaagcagggcgaacgggaacgggaggccgaggagcgtaaaaagcgaaaaatcgagaaactgctggccgtgcccaagcacgactttaaggacgataagtacgaggaagccagggctaatctgaccgagaaggtaaacgacgccttcgaggagggactcaagcaggccgaggagaacaaggagaaaggcgtcgaggaagcaacttccagtggcacaaagaggaaatcccccgccgtagacaagaccaaggcaaaaaagaagaaaaagggcacactctggatagacgatgacatctctggatccgactctgactctgacgacagcgaggaggagccaaaaacacagaaaaaagctatacaaaactag

SEQ ID NO: 12714 - protein, 232 aa, DROSOPHILA
MGINIFINSKYIISCGDHVKCDELYSRIAEKTNLQPGEYYLVSNGKRLEGEISSGDVHCVLRQLGGKGGFGSMLRAIGAQIEKTTNREACRDLSGRRLRDINEEKRVRAWLEKQGEREREAEERKKRKIEKLLAVPKHDFKDDKYEEARANLTEKVNDAFEEGLKQAEENKEKGVEEATSSGTKRKSPAVDKTKAKKKKKGTLWIDDDISGSDSDSDDSEEEPKTQKKAIQN

SEQ ID NO: 12715 - DNA, 6795 bp, DROSOPHILA
aaactgtgtcaatcgacgggcccctgccacgcccttgtccctcagcccaccgccactgacaggtggtggtgtcaatgtctggttagcactaaatatatttgcatatgtatattatgttccccattggcacacgttatcagcggccagtaattttcgcagaatcccgccgtttcgctttcgaggcgtccaaagtccggagaaggtgtttacgagtcgggttttcgatcgcttgacactccaccaggatctcgaatattgcccattgacgtcaaagaggcggcctttcaaaagcgttatcacgacctaaagtctgtctgctttattcttgtttttgtttacgacttttctcgaaaacacaacagaataccctggaaaaatgcgaagcttttaatacgatctatacttagatatgtctctgactcagagggtattacttccgtaaagattcagcagctattgccccgatttccgataagcatcgaactttgatttcgaaaattgattccggttcaaaaatccacatgcattgcaaatcaacactggtgtctatttgttttgatattttcccatcgacgggtccaacgtcacagccacgcccacttgttcctagcaagtgtaaaaacattttgtttacaacaattattacatgtggcgtatagattacaccgaaaggctaattgaaaacggaacacacagtgcagaatatgaagaatattgaataacaatcgctgcaatcgctctcaatggcataagcccccaaggggattatagtttacatagatcagtgccagatcggcgggggactatagctttacagggtacaaagtataaagtacgcgcagaatgttaaacgttcaagaggcatggaaattacaaaaagagtttagatttatggaaaatgaagctttatgctttaaaatataattttatagtaaattttatagtaaattatattttccattgaaaaatatcatagcatattgtttccctaagccaagtgctaatcaaaattttgggcataccttcaagaatgtaggtcatacaagtataaacatagacaagaggctggaaattttctaatctttgaaggcaatggaattactcatagttttgattgtttagtttggaacaaactttcggtacgattgtttatttgctagaaaacaaattttagcatagaattaacgtagaattatggcagatctatcttaaagaggacattatttggttatgccagactgttttgctccaattgtccttgacggtaagggtttttctgtttgtttgtgtgcaggtttcgctcggtaaagaatacagggatatatgtagtatataatattatgggctagcaatggcacttaggattagcttagcatacaactagtttaacataaggatctcgggcaaaagcatcactcagagcgctgcatgatcatctcgattttatcgccagcggcggcgatcagcggaacggtaagacagcaatcgaagtcctgcgtcttcatttcatttacctgagggtaaatacaatatacatgtataaaatgataaaaaaaaaaccaagcataacttcagaccaacctgcatgatccgatcgaagggcttcagtaggccgcacatatcggcaggacctccgctgcgaatcctgttgatgaagacgccacgctcgtacagtccatcggataccgagaatccatagtcatcgtacaccttgtccttgtacagggtgacatgaaacacccggggctttccactgcccgaattcccattgactgctccgccaccgttggcattcccgctacccgactccttgctggcctccgtattcgccgacggactccggggacgccgttgcaccttggcataaatggcctgcgtctgcggcagatgactgccattggccaaatcgtggctgcgcaggatcttcaggtcgaccagatcgccgagattctgcagcagactggtggcatgtgaaaggggcatgccctgcaccgagtgctcatcgatggccagcagctggtcacccacgtggatctggccattcttgtgagcaatgccacctgtttgttatattataaatgttttagtttaaaatattcataatattatttgtatgtagacttaccctctacaaggccactaatcgtaatggacttggtgatatcctcgctgccggccaaagtgatgccgagcaatcctcctttgggctccaagcgcaccgtgaagatgatctggtgcagactgctaccgctgctcttgctgctcgaactggccgccgatccgtacaccttgttctccatgggcggcggcaaggcggtgcagtcgacactgaaaaataatactcattcagaaaaaattttcagaacttataaacataatgtggactcacctggcatagcgattgagctcgtatccggggtacatttgctcctgctcgtcctcctcctcgggcaactcggtggttagactctgcgtattgggtggggccacataggatcgactgttgaccccggtggaccagctgttagccgcctggttacctccattcgagcccgatccagaccgcaactgcacggactgcagactggcatcgtccatgctgggcactcggaagtaatccggttgcggagtcctcgatttcagggacacgcaatctgcatacttgcccgccgtcacataggcactgctgtaaagatcgtgatccgtgcttgtggagacacccatgcccatgcccaagtttatgccactcgccgggcaattgctgtaaatcggactggacatgggcaggaagtcgggcaggacgatccgcttgatcgtcagcgtggtgaagtccgaggagctgtggctgggattctgtgatctgccctcctccttgagcagtgcgtccacgttgaaatgctgcactggatgctggtccacggcaagcagaatgtcccctgatcgaagggagccactgcgatgggcaggactgcccattttgacgtctgaaatgaccagaccaccatgactggaaccactcacactcagacccagtccacatttgccggccctgagcaatttgacactaaagacaccactggcgggcaccacggcatccggcatatcgaactcgatctccagttctagccagttggccggcgttccattgcttgctccattgcgactggatcctccttcgagcagttgcctcatggccgccgcatccaagctgtacatcttgttaatggccacgatgcgatctcccgcctgaatgcagccactgcgatcggccaccgaatccggcacgatctgagcaatggctacagcacccgatcctccagatccggataccgtttcagacaagataatgcccgctccatggctgcaatcgaggagaacgggaaagctctccgcccggcagaggcccagacccatgcccaagctgctgctgccatggatgccaccagtacccatcgatcctcccgtggagcctggagtgccgcatgcaggattctccaacggtagggaacttttcctcgcgaaacgctgacgctggcgacccgccgtcgaggatttacgggactccagtgtgctaaagctgtacttgggactacccaaggttgtatgacctgaaaggattagatataacgtctcatgaatttcttctagtaccaagggtttattaagcatattgtatacaagattcatagatccccccactacaaaagcgagtgggagtggtgcctcctcctcctccgcttccttctctctttccatttggctaagtaatttcccccttgaatatctgatacattcaatcacacctcccaccctgccaacttatggaagcttttaagaccttctccgatggctatgttggccttgtgccgaagactccactctggcgactgatccgcagcttagccagctgcgtgtcctctctgcccagaccacaatttatggcctccactctcctctgttattttctattccatttgctatttccgattcggcttcgatcgattgtcaaaaaaaaaaagagactattccgtctttcgtcttgggggaaacgattttggactgcgtcgctgcgtgtttgcttagcaaatggagggaaaaacttggaaaaacaattgattggctgcagcgagggtggatggaacggttcttggaagaaaatatatgacgatatcaagtggagaactgaacttatggtaggaaacaatactataatctgccgtatactgagtcttaaattgtataatattgtaactttaactttagtttctgactagtaacttcatctggaactcatggatctctcctcgctccaaactttataaggcctggcgtctctattgtttcagccgccgatgcttttgctgttcattagccgtgacgcccacgcagaccttcgtcgcgccgcttgggagcctggctgatttggccttgcagatttcgactgccagatagccgaaaataaaggaatgggagacgaagatgtggggatcttgcaaaccaaaaaccaatactcaccgcgacgtgccagcgcgtgagcgggcatgatctgcatctgcgtgtagccgcgacccgtgctggtgtccaaaatggtcatcacctcgtcgggactgaaggcggtatgctcgatcattgtgtcgtcgatggagagcacctgatcgccaacggataaggcgccgcaactggaacacaagccaaaaacgaaaacgggcacatgagaatggattctaacaaaatcgaagatatacaacctaccgatctgcaatgctggcgggcaggatactggcgataaagacgcctgccgattcctcgatcttctccccgctggaaggagtactggaaccggaaccggaagcgggcacagccgccgtataattgcacagcaccaggcccaacttgtcgttcatcggtcgctcgatctcgatgagcagcggtcccatcgagaactcaacgctctgcaccacagaaacatcgtactcgatggtcaggttggtgtagccggaaacatgaccgccgcacttgatgatctgctgcgcctccgccagcgtcttgccaatcagtgagacctgtgtggaaaaaatatattaaagacgatctatttcgaaacctattctaacgaaaatattgagtagtaatatttaaaaactatttttggcctggcaattttctggagaaagccaaagcggaaacggaagtgtcactcgaaatcgaaaacactcacattatcgacgcgcagcaaccgatcgcctggcttgatgcgaccggtcttatacactggtccatggggcctcacatgggtgacgatcagcgggtagtcggcaccgcccctcaacgtcaggcccaggcatccgctctcccgctccacggtgatctgcgccagcttcgaggtcacacaaaggctgttctgggaaactgctgcgccacccggaaaggaaaattaaaaaaaaaaaaaaaacaaagagtttgtggctgttgacaccgattttcatataggttaacctactgcattcgggcagagagtactcgatctccacgatggctggacacgcatccgatcctccagcgcagagcatgttcatcaccttctggttgctcaaaccaattgtcgatatgccgtcgatctggtggagacgatcaccgggcgccaggaagtccgccgcatgacccaccggatttagggagcccaccaccggtggatacgacagatcgttgcgttctagaggatttaagataaacagatgtatttaaaatatataagaagatattttaaagatgcagctttttatacgcattatcatagtacaggaaatttcccagatacgtatgttactgaatcagataaatcttagatagatagacctttggtaaaggccccaaaaggcctgtgagatcaatctcccttacagaccaacaccttggcgaattaattagagctcctcccgatgactgatggctctggaggttgaatgtggtagcccccccccccccccccactgattcactcctggtatccaccaattggatttcctgtggcgactctgtcagcgactcatcagccgacacacaggaaaaacgcatgaaaatcgagggggtaacactagatactcgtagtgcggcgcgtaaataaagaaattgggtaaaaaaatagacgacggccagtagtttggggccagccgcaatgggagcgctgctggcgtattgccaaaataaaaaaataaactaactaaagagctagccgccgaaaaatacaaaaaatacaaatataaaaaaaaaaacaaagtacaagaaaagaaaaattgcaagaaaacgggagggggggatggggggtagaaaaccgacgcgacgctttatgacaacacacatagctggctggcgaccacggataagatgataatggtgccggcgaatcgggattgggttatagggaggcaatgcttacgtcagagaccacaaggagtacccgtggcctaagtctaaggttaacccccaaaaagaaaaagacgacccttgcccacttcacttcacgccaaatcccccaacgcggcagattagtcaagagtacaatatccgaatgggtggactttatattctgattcagacgaaatcagacagagccacagcaacgggtgtgctaataggtgctagcttggattaatgctgctatatttagattatacaatttagtatatacacatgtttaaactgttttcttatcattttcgattgttttaatggcattaatatatgttctgcgtagtaactatagttttgaatgctactgtgcctgcgtgtacatac

SEQ ID NO: 12716 - DNA, 2913 bp, DROSOPHILA
atgataatgcaacgcaacgatctgtcgtatccaccggtggtgggctccctaaatccggtgggtcatgcggcggacttcctggcgcccggtgatcgtctccaccagatcgacggcatatcgacaattggtttgagcaaccagaaggtgatgaacatgctctgcgctggaggatcggatgcgtgtccagccatcgtggagatcgagtactctctgcccgaatgcacagtttcccagaacagcctttgtgtgacctcgaagctggcgcagatcaccgtggagcgggagagcggatgcctgggcctgacgttgaggggcggtgccgactacccgctgatcgtcacccatgtgaggccccatggaccagtgtataagaccggtcgcatcaagccaggcgatcggttgctgcgcgtcgataatgtctcactgattggcaagacgctggcggaggcgcagcagatcatcaagtgcggcggtcatgtttccggctacaccaacctgaccatcgagtacgatgtttctgtggtgcagagcgttgagttctcgatgggaccgctgctcatcgagatcgagcgaccgatgaacgacaagttgggcctggtgctgtgcaattatacggcggctgtgcccgcttccggttccggttccagtactccttccagcggggagaagatcgaggaatcggcaggcgtctttatcgccagtatcctgcccgccagcattgcagatcgttgcggcgccttatccgttggcgatcaggtgctctccatcgacgacacaatgatcgagcataccgccttcagtcccgacgaggtgatgaccattttggacaccagcacgggtcgcggctacacgcagatgcagatcatgcccgctcacgcgctggcacgtcgcggtcatacaaccttgggtagtcccaagtacagctttagcacactggagtcccgtaaatcctcgacggcgggtcgccagcgtcagcgtttcgcgaggaaaagttccctaccgttggagaatcctgcatgcggcactccaggctccacgggaggatcgatgggtactggtggcatccatggcagcagcagcttgggcatgggtctgggcctctgccgggcggagagctttcccgttctcctcgattgcagccatggagcgggcattatcttgtctgaaacggtatccggatctggaggatcgggtgctgtagccattgctcagatcgtgccggattcggtggccgatcgcagtggctgcattcaggcgggagatcgcatcgtggccattaacaagatgtacagcttggatgcggcggccatgaggcaactgctcgaaggaggatccagtcgcaatggagcaagcaatggaacgccggccaactggctagaactggagatcgagttcgatatgccggatgccgtggtgcccgccagtggtgtctttagtgtcaaattgctcagggccggcaaatgtggactgggtctgagtgtgagtggttccagtcatggtggtctggtcatttcagacgtcaaaatgggcagtcctgcccatcgcagtggctcccttcgatcaggggacattctgcttgccgtggaccagcatccagtgcagcatttcaacgtggacgcactgctcaaggaggagggcagatcacagaatcccagccacagctcctcggacttcaccacgctgacgatcaagcggatcgtcctgcccgacttcctgcccatgtccagtccgatttacagcaattgcccggcgagtggcataaacttgggcatgggcatgggtgtctccacaagcacggatcacgatctttacagcagtgcctatgtgacggcgggcaagtatgcagattgcgtgtccctgaaatcgaggactccgcaaccggattacttccgagtgcccagcatggacgatgccagtctgcagtccgtgcagttgcggtctggatcgggctcgaatggaggtaaccaggcggctaacagctggtccaccggggtcaacagtcgatcctatgtggccccacccaatacgcagagtctaaccaccgagttgcccgaggaggaggacgagcaggagcaaatgtaccccggatacgagctcaatcgctatgccagtgtcgactgcaccgccttgccgccgcccatggagaacaaggtgtacggatcggcggccagttcgagcagcaagagcagcggtagcagtctgcaccagatcatcttcacggtgcgcttggagcccaaaggaggattgctcggcatcactttggccggcagcgaggatatcaccaagtccattacgattagtggccttgtagagggtggcattgctcacaagaatggccagatccacgtgggtgaccagctgctggccatcgatgagcactcggtgcagggcatgcccctttcacatgccaccagtctgctgcagaatctcggcgatctggtcgacctgaagatcctgcgcagccacgatttggccaatggcagtcatctgccgcagacgcaggccatttatgccaaggtgcaacggcgtccccggagtccgtcggcgaatacggaggccagcaaggagtcgggtagcgggaatgccaacggtggcggagcagtcaatgggaattcgggcagtggaaagccccgggtgtttcatgtcaccctgtacaaggacaaggtgtacgatgactatggattctcggtatccgatggactgtacgagcgtggcgtcttcatcaacaggattcgcagcggaggtcctgccgatatgtgcggcctactgaagcccttcgatcggatcatgcaggtaaatgaaatgaagacgcaggacttcgattgctgtcttaccgttccgctgatcgccgccgctggcgataaaatcgagatgatcatgcagcgctctgagtatgcccaaaattttgattag

SEQ ID NO: 12717 - protein, 970 aa, DROSOPHILA
MIMQRNDLSYPPVVGSLNPVGHAADFLAPGDRLHQIDGISTIGLSNQKVMNMLCAGGSDACPAIVEIEYSLPECTVSQNSLCVTSKLAQITVERESGCLGLTLRGGADYPLIVTHVRPHGPVYKTGRIKPGDRLLRVDNVSLIGKTLAEAQQIIKCGGHVSGYTNLTIEYDVSVVQSVEFSMGPLLIEIERPMNDKLGLVLCNYTAAVPASGSGSSTPSSGEKIEESAGVFIASILPASIADRCGALSVGDQVLSIDDTMIEHTAFSPDEVMTILDTSTGRGYTQMQIMPAHALARRGHTTLGSPKYSFSTLESRKSSTAGRQRQRFARKSSLPLENPACGTPGSTGGSMGTGGIHGSSSLGMGLGLCRAESFPVLLDCSHGAGIILSETVSGSGGSGAVAIAQIVPDSVADRSGCIQAGDRIVAINKMYSLDAAAMRQLLEGGSSRNGASNGTPANWLELEIEFDMPDAVVPASGVFSVKLLRAGKCGLGLSVSGSSHGGLVISDVKMGSPAHRSGSLRSGDILLAVDQHPVQHFNVDALLKEEGRSQNPSHSSSDFTTLTIKRIVLPDFLPMSSPIYSNCPASGINLGMGMGVSTSTDHDLYSSAYVTAGKYADCVSLKSRTPQPDYFRVPSMDDASLQSVQLRSGSGSNGGNQAANSWSTGVNSRSYVAPPNTQSLTTELPEEEDEQEQMYPGYELNRYASVDCTALPPPMENKVYGSAASSSSKSSGSSLHQIIFTVRLEPKGGLLGITLAGSEDITKSITISGLVEGGIAHKNGQIHVGDQLLAIDEHSVQGMPLSHATSLLQNLGDLVDLKILRSHDLANGSHLPQTQAIYAKVQRRPRSPSANTEASKESGSGNANGGGAVNGNSGSGKPRVFHVTLYKDKVYDDYGFSVSDGLYERGVFINRIRSGGPADMCGLLKPFDRIMQVNEMKTQDFDCCLTVPLIAAAGDKIEMIMQRSEYAQNFD

SEQ ID NO: 12718 - DNA, 4009 bp, DROSOPHILA
cgagagcagatccttgcgacagatctcgatcatgcccggaaagtgattgatctgctggaagcgcttcatgttcttgaacagctctacgccgggaaacgaatccgaccagaggatgttccacatcttggactccttaaccaacttgtagcccagcgtcttggagatcttcccaatcatggcgtagcgcgagttggacacgcagatggtactcttggtttcgctgggggattatgttagatgcgttatccaataaggatccaaagctaaggaagatcacctggctggccgctcctcgtcgacgttcatgggaggattgagcacccgagtggggcattccactcggtaggtcttgttgttcagttgaatgaatccctgcagcttggcttcctcagcaggcattgggctgttttcaccagaagatggtccgtaatatggggagttatcatccacttgcttgtcggcggctgtcctcctcttgaggcaccgggtcttcttcatccggcggcgtggggacatgggctgcagtggcggtgattgctccggactgaaccattcccggtccaagcacggctgctcattaagagccatgtccagggcgcgaacaacgtgggtcctcttttcgcgatccttccgtattttctccttggagaagtggcgcagctcctgaatcctcttgaaaaacttggaattttttaaattcattgtctcgtccgctggtcgtccttgattaaaaattgaaaatttttcacgtgctaaaagctatatctataaaattgattcgtgtcaatggttagagccggaattctgcgtcacgaataaaaacaatattattttgcgatgattgtgttgtgaaaatgaaaataattataaccgaaatgacgctaaaatcaaaacgtagctccactggccacgtcgcttgagtcgtttgagttttaaatcatcgatttggggcatatcataaatttagtttctccgaacatcaaacataccactaacaactaagtgtacaaaaatatttaataaacaatagggtaagcatttacaatttaagcataacaataagtctttagggaaattttcgttggaatgttaaagttaaaaatatatattgcgattgatcacaaaatgtggaaatggtttacaaatggtccttcgagcttttcaagttcgtcaataaaatggtaacataataaggcccatctagtcggtaacaaacggttcgaaacgcttgagcaccgcgttcatggatgggcgatcctgcggatccagggcagtacagtgcaagcccgcctcgatggcgcacatgcacatgtccagctccttgcccatcggtgctgctaagtgcttctctagcagctccatccggttttgccgccactgctgcttaacgtagtccagcaaattcttcttcgtctcgttttccggcacgcgatccgtcacctgacgacccgtgaacacctccaacagcacaatgccgaagctgtagacgtccacgcccgtgctgagttgtctgaagttgcggaactccggtggcaggtagatcttagtgccgaaaactttattcacttccaccacagcgtccaaggacttgggaccctcgcgcaccagaccgaagtctccgatttttggctgcagacattggtccagcaggatgttggccggcttaatatctccatgaatcagcggtgtgcctcgcgccgtgtgcagaaagtagatgcctcttttggaaacgaaatgaaaagttaaagaagattgatagcactaaagaaacgataaatcccacctagccgtgccgaggctgatgctaaaccgctgctgccaggtgagtgctggtagtgggttttgtgccttatgcgctcgtaaacgagcctccagggagccgcccttcatcagctggtagacgaggcacggcttaccacctttgatgctgtatccgtagagggccaggatattgtcgtgccggatgctgtttaaatacttgagttcgttgtagctctgctgcagctccaccattttctggtcgatgttgggactgcggtagttcatcaccttgatggccacgtccagttgcttccatttgccgcggtacacgtctccgaatccgccctgtcccagtcgattatccggactccagccgtccgtggcgttttctagctccgcataatcgatctccagcaaggattcggctgcccgctgtacggtgctaatgtgtatattgcccagggactccaggctgggtatctcctccgttgccgttgtgctggtgcgattgttgtttgagttgctgacgcccgaggaggagggaaacggcgggccgttgtttactttggcactggaatcgggagcagcgcgcagctcgctgatggtgggcacgctcctcggtatgtacttgtgcagatcctcgctaacgtaatctttgatcagacgcatggcgttatgaagcttcaatctaaagtaagaggagtcatttctgggatctcggcggttattatctcaaactgactcactttttgaacaaagcaaacaatgtttgcaccgtgtgattgtactgaccgccccaaatgttgaggaactcattggaggctgagcggccacgctgcttctggctgcttatctgctccacctggtcgggatagagttttacggccgtggccagctgttgccatacgtctagggcatccaagtgggcacatagctgggctcgcacgggcaacggcagcagtcggatggccattgtgttgtccaagtgggaacgcgacctggtcctgttgccattcgcttggttttgggcctgcgcctcggcttcggcggtctggacgccactcatctttcacttatgggcgggcggttcaaccggttgcgactgattcatgcggctccggatgcaagagtgcccgttggatgaggggttggcggcgctggtaacctgttgcagcgaaacgaaaatcgcttttgggtaaattcccaacgcgattcgatgaaaacctgtggatgacttgttaacagcggcgcaacaagtgataaagcagcttaacagagcgaagcagtctggcaacgctgccaatgtctagcaaataatacactcgaaaaagtggtagatgcttaggagccactgtttaaaattcagaagtaaaaagaaagcagagtaattattaaaaaggtatttgctgtatgaaaatattaaatagattttaaataacctccacatattttatgtaatttgcacagtattttgtatactaaaatatcttaaaaaataccaaaggcaattagtgtatgaccaaatgagccttgcagtttggcggacatgcgtcgttttcaagtgccccgcaggtggccacactgctgacaccgtcacgaacgcatcgctatcgctaattcttcgcttcgcccatttataattcagcaaatacgtcaattagccccaccagcgaacggaaaagcctcaagctggcggagaaaaaggtccaaatggcgctatgccagacatcggtggtgagtgtgcggctggatccccgagatccggtaattgtgtcagcggcggtggctccattgcattcgacatatggaaggcatcctaccaaggagtttctccatttcctccagcttcacctccttccgccgcccacgcgggaaagtgaaagctttcccagtggtcatggtagttactacaaaacgatagttacaactgctgaaatccgagataccaaaactgcaaacctctcgggtgtggatgtgtgtgcatgcgagtgcgtgtctgtctggatgtcgctgtgttagtgcgttcgttgccttgcagttttgtatgtttcttgccctctggattttccgattttcggcttttccgcgtagtacttcaaactcccatggggggttatatttagcagtaatacacgctgcgtagcttgtgctattatctacaagtcggggcctccttccttatcgtccgctgataacgcaaaacaaactattaataaaacaagcaactggcataccggtgtatatatat

SEQ ID NO: 12719 - DNA, 1888 bp, DROSOPHILA
ccgctgttaacaagtcatccacaggttttcatcgaatcgcgttgggaatttacccaaaagcgattttcgtttcgctgcaacaggttaccagcgccgccaacccctcatccaacgggcactcttgcatccggagccgcatgaatcagtcgcaaccggttgaaccgcccgcccataagtgaaagatgagtggcgtccagaccgccgaagccgaggcgcaggcccaaaaccaagcgaatggcaacaggaccaggtcgcgttcccacttggacaacacaatggccatccgactgctgccgttgcccgtgcgagcccagctatgtgcccacttggatgccctagacgtatggcaacagctggccacggccgtaaaactctatcccgaccaggtggagcagataagcagccagaagcagcgtggccgctcagcctccaatgagttcctcaacatttggggcggtcagtacaatcacacggtgcaaacattgtttgctttgttcaaaaaattgaagcttcataacgccatgcgtctgatcaaagattacgttagcgaggatctgcacaagtacataccgaggagcgtgcccaccatcagcgagctgcgcgctgctcccgattccagtgccaaagtaaacaacggcccgccgtttccctcctcctcgggcgtcagcaactcaaacaacaatcgcaccagcacaacggcaacggaggagatacccagcctggagtccctgggcaatatacacattagcaccgtacagcgggcagccgaatccttgctggagatcgattatgcggagctagaaaacgccacggacggctggagtccggataatcgactgggacagggcggattcggagacgtgtaccgcggcaaatggaagcaactggacgtggccatcaaggtgatgaactaccgcagtcccaacatcgaccagaaaatggtggagctgcagcagagctacaacgaactcaagtatttaaacagcatccggcacgacaatatcctggccctctacggatacagcatcaaaggtggtaagccgtgcctcgtctaccagctgatgaagggcggctccctggaggctcgtttacgagcgcataaggcacaaaacccactaccagcactcacctggcagcagcggtttagcatcagcctcggcacggctagaggcatctactttctgcacacggcgcgaggcacaccgctgattcatggagatattaagccggccaacatcctgctggaccaatgtctgcagccaaaaatcggagacttcggtctggtgcgcgagggtcccaagtccttggacgctgtggtggaagtgaataaagttttcggcactaagatctacctgccaccggagttccgcaacttcagacaactcagcacgggcgtggacgtctacagcttcggcattgtgctgttggaggtgttcacgggtcgtcaggtgacggatcgcgtgccggaaaacgagacgaagaagaatttgctggactacgttaagcagcagtggcggcaaaaccggatggagctgctagagaagcacttagcagcaccgatgggcaaggagctggacatgtgcatgtgcgccatcgaggcgggcttgcactgtactgccctggatccgcaggatcgcccatccatgaacgcggtgctcaagcgtttcgaaccgtttgttaccgactagatgggccttattatgttaccattttattgacgaacttgaaaagctcgaaggaccatttgtaaaccatttccacattttgtgatcaatcgcaatatatatttttaactttaacattccaacgaaaatttccctaaagacttattgttatgcttaaattgtaaatgcttaccctattgtttattaaatatttttgtacactt

SEQ ID NO: 12720 - protein, 501 aa, DROSOPHILA
MSGVQTAEAEAQAQNQANGNRTRSRSHLDNTMAIRLLPLPVRAQLCAHLDALDVWQQLATAVKLYPDQVEQISSQKQRGRSASNEFLNIWGGQYNHTVQTLFALFKKLKLHNAMRLIKDYVSEDLHKYIPRSVPTISELRAAPDSSAKVNNGPPFPSSSGVSNSNNNRTSTTATEEIPSLESLGNIHISTVQRAAESLLEIDYAELENATDGWSPDNRLGQGGFGDVYRGKWKQLDVAIKVMNYRSPNIDQKMVELQQSYNELKYLNSIRHDNILALYGYSIKGGKPCLVYQLMKGGSLEARLRAHKAQNPLPALTWQQRFSISLGTARGIYFLHTARGTPLIHGDIKPANILLDQCLQPKIGDFGLVREGPKSLDAVVEVNKVFGTKIYLPPEFRNFRQLSTGVDVYSFGIVLLEVFTGRQVTDRVPENETKKNLLDYVKQQWRQNRMELLEKHLAAPMGKELDMCMCAIEAGLHCTALDPQDRPSMNAVLKRFEPFVTD

SEQ ID NO: 12721 - DNA, 6427 bp, DROSOPHILA
tccacggcatattttagataaggcagcgccttggcgtaatcagcatggaactgtctgagtgctagtccataatgaagttgagccactgcattgttgggccaaagtttcagggtctccacagccaccttttcaacctgctgaagactgggagacaatcataaagtatttgtagctcaaagtagcctatcttacctacttgtttaccataagataggtgagtgatagttggttacgaagccgtggatcctcaggcaaacgattgatgagcagctcatggatggtagttgcctgtcggtggtgacctagaattcaataggcaatgtagaaagtgaaacagattaacagattatgttaacttacccaaaaatctcaaattctcgatgcagctttcgccggcggtttgaaattcctgattgctggctacaagctcgccaaaggccaaatatcttttgtaagcatcgatggcttcccacaggcgctgattgctgcgctcctttttggccagtagttccagaagtcgagctcttcccaaatgggccgatggctcgtgggcaaagttggtggtgagcgtgttaaaggaacgcagggcttgggcatagttctttggggtggatattagttcgcgattcgccagccaaaacacaaaaaaaaaatggttagacaaaatacgaaagcatgcaattagtataaaatcattctctcaagaattgaaacgctgttgaaaggagttccaaggatgagcccgcgatcaaagtttactccaagtgggtgtgtagttcttggagtaactggtcgtgggttcatcccaatcatatatgggtctcttgaaatgagcgtttctataaatacatgaataaggttaaatcctatcatttgattaattatccttttttgttcttacatgactaagctgttatatgatctaatgaacttgacaagcaaacataaactaaagctttgaaatgagattgtgttttttgtttttttgttgtgatgttctttagtgattgttgagctagagatatatcgaagatatatagttcacgggttaatccaggtgaaggagacaccttttggttgcgacatacctccctaatcatctcctcgtttgccttgcgcaactcttgctcgaaaggatcctctttctctgcgggagcaggtgcagcttctttcggctttatttctatttagagattaagaatctgaattagaacaaattgttttcaacaaaaaaaatgaagtgaaattttgaacggttacggcctagatagctccaccttgtgtgaggtgtcagtttgtatatcctatggctaacacttacgatctgttatgtgtaaagcgatcggtttttggtcgtgtgtcttaaagtagtgttgggcctatgattacgatagcttatgtgatcgatcgaatatatgttggatggagaatggagtcgggtggtcatcgacagacgtggtgatttgtgcgtttagtaattacgtgtccagctggggtcgtcagagtccggatcgctctcaaactccttgacgggcagacgaccgtatttcgcttccagccggttcatcagatcggcgtcgtccacgtcggagatttcgtcctcctcgtcggtgatctcctcatcgctaactccgtcatgctcgtaatcctcgatagcaccatcttcgtattccacgtagatatcgctgtgacctactggcttttccggctccttttctttctgttcgggtttggcatccttcgtaggctcctgggcgtatttgtacatggcgctcagttgctcaaatgtctcgggcacataactggccatggaggccacgttgtcgtcgttatcgtgacgtacttcctcctcctcctcctcaatatcactgatttccacctcgatttcctcttcgatttcgatttcttcctcggaatattcttttaagacaatgggatacgactgaagttaatactctggacttggccaggcatatcatacagcataggcttccagatcacttgtcaatcaaatgatttggaagcaacttcggctagccgaagtttgcaattaataattcatatctccaaccatcgtccaaagggggcagctcctccacatcatccggtatgtgatcctcagcagtggcaatcgtcaatcttcgcctgaatatagtctctggtgcgggctcatcctcagctatgcattcaccacggaagattcgaacgttattcgagttaagggattattaatcgagcaagaacaaagccattcaacaatttccgtacatacatacattggtcgaataataattggaacaaagctgtgactacaatcagattcaagaaataatataaaatcataatcaaaataagctaactgaagaaagtgcaaaatttagacagggccaatgagttctcattctaatgaaaccaaaaagagaagtcattgcccagagtttgtttttagttttgttaatacaacgagaataaatcacgagacaatgaggtcatttgctgattttaccaatcgcttggtgggttagaacgaaaagcggcgcttagtaatagttactgaaaagtttccccggagtatggtttatttgattagcataacatttggcgtgcttgtcggatatgattgatagagatcaagagcagagagcggaatacaaagagcggagattcgggggagcagatcagcattgaagactcacttgtatttggacttttccttatcaatacaaggcgtgaaactaaggcaagtgcaacgccaacgccaaatttaacggcaactgtaaatgagtcaggttttagtatgagaaaacaaacaaatgccttttgcactttcttgtacaatttcggtttctaagttcttggttgtgtgtggttgtgcatattctttcagttttggtaaggtggagcatatttcagtcggtcagttcttatggttctaagcctgcgagatccgttaaccgttcaactattcattccttcgctacttacgtgatgccaaccaagaggagccctcttccttgggctcctcctcatcagcctggtcttgatcctgctcctcactctctacagcttttgctggcactgtatcctcgggatcattttcgaattgctgagccagggactcaaattcgtcgtcatccccatcatctgcatcgtttttgtcttgatcctgcaataagaaagttatttagcaacaaataagaaaaccatttaaaccaacaagcaattagatattttactaacatcatcatcgtcgtcgtcattattatctttggcgggagcactttgtgccgcatattgggatctttccggctctactgattcttcgatctcttgctcttcctcatcctcatcctcatcatcttcctgctgcgaaattaattaatttttggaaatattcaatcttttcacaaactaaggatcatacctcctcagctttcgagagcggcgcttcagtggactctactgcatcatcatctgctgctgcttcgtcctcatcatcttcttcagcttcatattcgccagtggcttccgtagtggcttcagtggtagcttctacagttgcctctacggtgccttcatcatcgttatcctcctcctcttcctcctcctccgcatcctcggcagttatgttttcacccgcattgttctcctcatcttcatcctcctcatattcttcatctgccgctggctcatcctcctcagttggctcttcctcttcctccagttcttcttctaactcttctgtgaggggctcttcgtctaaaaagtgttcatatatttaaaagaatttatattaagttaatattaacataccttcgtcttcatgatcatcatggtcgtcgtgttcatcgtgatcatctaacgcctctcccgagggttcctgcacatcgtgaccatcatgctcatctcgatgttcgtccacccagccatcaaaaactttcgagaacctagactccgacagaggagtgtccactaaaataaaacaggtattcagtacaattcaaatttctaagaattctataacttacgatcctccagtccgcgattctccatgatgatcagacccaccaaaccgaggagcactgccatcagggcgaagaatataatcttggcgcaccagtgaccgccagttccgtgatcgtggtgcacatgcaggtggagatcttcgtttcccatctttgtaatgtgaacgccgtgcgaagattcgtcgtcatctgagatccgacatttgcatgatagtgaataataaaaaaacacatgtgattacaagcagtttaattgaatccaccttcgagtgttttacttggttttagtaactgagcgagacattcaattaatttggcaaagcattccggggtgtgttgggaaaaatacatataggggggtatctatttctctaccttgaaaactggactgacgcagaacagtcacatcgccctcggacttgcgatcatctagacgaaaagttagttacaatgagacatataccggcattacaagctgataagacggcgccggttggggggaattgtttatgcctaaatatgcgcaacgataaacaaagaagccgcccagtcatgctcttgggcagttggccaagtgaaattaaatggctttacacatatatgcaccatcgtggctacttatttcggtgccgtgggtgtaatggccccagaatctttacggaagcatcattatctggtatctattgtagtatctgtgtatgtaaatctcgatctctgttgcattggaattaatttgccgagaaggtgacggagctctccattctccaatgagataaagataacgcagagaagagagcaatagagagaaaaagtggcagagagagatagcaataagaggataccccagggacaacgaaacatctgtttgccttgggaaaaagataaataaatcagggaaaaccactctctctgatttttctcgatttttgcacaccgattcaatgccctttttctttggctaccgatcgaaatacccactttatggtctacctcccgccttcctcgcccgcacacatgtcatgcatatatattttcctgctcgatcggcacacgcatagcgacagaaaacaggcgagatgtataattttatataatagggcaaagttatttttaaaggcactcgacaatattattatgctaataaaagaaatgaactgcttgctacgcggcggcggcgaaaagacaaaaccgtttttcacaccaaataacggtccattcgagtatgattgtaagtaaaagtaccgtaacagggacttaccgcgttttcggcgcttatccttgcgcttacgcggctgcacatcgcccgacattttgctcgctaaaggcactaaaacctatgccaatataatggagagtgtttgtttttccttttcgagcggaccgggcaaaacgggcgatctggatcgacgaacagcacgttactaaatgcaaataccgctcgcaccgtgggaaaattatttataaagagacagtggcgttgccagatccggcgggaatgatgaaagctagagatgacagctgggcagtaaaggcaccgctatttcaattttattattctggatggaaaactcatgacagctctcaaaaactatatttacgcataaatatttatacatttatttaattctaataattatgttttattttaaatcgtgttgtgtcgatagattgaatttaattttaacagttcagcaacgcaaacgtttagaaaacccaaatgtaattttttctgttactcgtggatttttcatattttatgtctatgcgctatccatacaacagaacaaattgatttatttgatttaaaatgtaaagtgctcaaagtattaaatacaagtaaataatttaaattaaaaaaattagcttttttttaaatatcgcatgtcattaaaattcatgcgcactgcagtctccagtatcgtcacgcgcccatctcgaagggaaccaaccccgaccaagaaaaaaaaaaacaagaaaataatacacaattggcgacggcggtgcagaggttctccgtgtgatccgatcgaacgggactaggaccgacacggaccaggtctaaatccgcgaggtcagcggtattatggccggcgacatgtccatcggctgtgcggccctgaagcgatccagcaagctgaggtcctgcaccagcgccgccgacacggactcgatgcgggtgcccagcgaccacagggacaacgggagcctgatcaagccgcctccggtgccgccgcagaatatgcgcggcggtctgcgggtctataagattgtcatcctgggcgacggtggcgttggcaagtcaggtgagctattctagccatggattagacgaaagaaaatgccgagttatcactgcgcactttgattggggctgcgaaaaatcaataaattatctcaatttc

SEQ ID NO: 12722 - DNA, 1787 bp, DROSOPHILA
ccagatcgcccgttttgcccggtccgctcgaaaaggaaaaacaaacactctccattatattggcataggttttagtgcctttagcgagcaaaatgtcgggcgatgtgcagccgcgtaagcgcaaggataagcgccgaaaacgcgatgacgacgaatcttcgcacggcgttcacattacaaagatgggaaacgaagatctccacctgcatgtgcaccacgatcacggaactggcggtcactggtgcgccaagattatattcttcgccctgatggcagtgctcctcggtttggtgggtctgatcatcatggagaatcgcggactggaggatctggacactcctctgtcggagtctaggttctcgaaagtttttgatggctgggtggacgaacatcgagatgagcatgatggtcacgatgtgcaggaaccctcgggagaggcgttagatgatcacgatgaacacgacgaccatgatgatcatgaagacgaagacgaagagcccctcacagaagagttagaagaagaactggaggaagaggaagagccaactgaggaggatgagccagcggcagatgaagaatatgaggaggatgaagatgaggagaacaatgcgggtgaaaacataactgccgaggatgcggaggaggaggaagaggaggaggataacgatgatgaaggcaccgtagaggcaactgtagaagctaccactgaagccactacggaagccactggcgaatatgaagctgaagaagatgatgaggacgaagcagcagcagatgatgatgcagtagagtccactgaagcgccgctctcgaaagctgaggagcaggaagatgatgaggatgaggatgaggaagagcaagagatcgaagaatcagtagagccggaaagatcccaatatgcggcacaaagtgctcccgccaaagataataatgacgacgacgatgatgatgatcaagacaaaaacgatgcagatgatggggatgacgacgaatttgagtccctggctcagcaattcgaaaatgatcccgaggatacagtgccagcaaaagctgtagagagtgaggagcaggatcaagaccaggctgatgaggaggagcccaaggaagagggctcctcttggttggcatcacctgaggatgagcccgcaccagagactatattcaggcgaagattgacgattgccactgctgaggatcacataccggatgatgtggaggagctgccccctttggacgatgaatattccgaggaagaaatcgaaatcgaagaggaaatcgaggtggaaatcagtgatattgaggaggaggaggaggaagtacgtcacgataacgacgacaacgtggcctccatggccagttatgtgcccgagacatttgagcaactgagcgccatgtacaaatacgcccaggagcctacgaaggatgccaaacccgaacagaaagaaaaggagccggaaaagccagtaggtcacagcgatatctacgtggaatacgaagatggtgctatcgaggattacgagcatgacggagttagcgatgaggagatcaccgacgaggaggacgaaatctccgacgtggacgacgccgatctgatgaaccggctggaagcgaaatacggtcgtctgcccgtcaaggagtttgagagcgatccggactctgacgaccccagctggacacaaataaagccgaaagaagctgcacctgctcccgcagagaaagaggatcctttcgagcaagagttgcgcaaggcaaacgaggagatgattagggagctcaacaatcactaa

SEQ ID NO: 12723 - protein, 564 aa, DROSOPHILA
MSGDVQPRKRKDKRRKRDDDESSHGVHITKMGNEDLHLHVHHDHGTGGHWCAKIIFFALMAVLLGLVGLIIMENRGLEDLDTPLSESRFSKVFDGWVDEHRDEHDGHDVQEPSGEALDDHDEHDDHDDHEDEDEEPLTEELEEELEEEEEPTEEDEPAADEEYEEDEDEENNAGENITAEDAEEEEEEEDNDDEGTVEATVEATTEATTEATGEYEAEEDDEDEAAADDDAVESTEAPLSKAEEQEDDEDEDEEEQEIEESVEPERSQYAAQSAPAKDNNDDDDDDDQDKNDADDGDDDEFESLAQQFENDPEDTVPAKAVESEEQDQDQADEEEPKEEGSSWLASPEDEPAPETIFRRRLTIATAEDHIPDDVEELPPLDDEYSEEEIEIEEEIEVEISDIEEEEEEVRHDNDDNVASMASYVPETFEQLSAMYKYAQEPTKDAKPEQKEKEPEKPVGHSDIYVEYEDGAIEDYEHDGVSDEEITDEEDEISDVDDADLMNRLEAKYGRLPVKEFESDPDSDDPSWTQIKPKEAAPAPAEKEDPFEQELRKANEEMIRELNNH

SEQ ID NO: 12724 - DNA, 3787 bp, DROSOPHILA
acagcaacagcaacagcaacaacaacaactagtactatagcagcacgtgccttatcgcagtcgcagaaccgccgacagctcagtcggcgtcgttatcaagtcgctgacctacgacaacagagacgccgaacggctggctggattgttattggtcggtgcggagcgagcggtctgctgagcggcaaaacgaattattcaaaggtcgagcgcgctgctatgggcggtgggcggtgggtgggtacgctggctacgtcaccgttggccgcagactccgacgccgacgcgcagagcgtctgggtagcgtctggtctggcctggtatggtcgcgtcgggtcggatcgggtcggaagtcgtgaatcgaaatcgaaatccgaaatccgaaaaaaaaacccaaatacctatgagtaatctttctggtgaaattcagccaaaaggcggccgagagagcgagagacggccgtccagtgcgactgactttgagagcatgacaaatgctcgaaaaccatatcagaaaattgctcaaggcctcgaacgggtcgggctgctgtaattgcactcactcactcactcactcgctcgttcgctcactcgggcgctctcgctcgcactcgcagacgcgatcgattgggattgggagatcggcacggagaatgagtcgagccgagtcgagtggaagtgggaatgcgtgagcgacgccaggcggctggaggcttacaaattttcgagcgccgctgcagccgcagtcacttagccatcagccgtcgagcgggagagaccgtggagcgatcagcatcagcagcagcagcagcagcagcaagcgattgtgatagttggccagccagctagtcagtcagttagccagttagccaagttagccaagttagcccagttagtgtagtgttagtgataggcgcaatgccagcctttaccttaaacggtacgcccgcatttccaccaaaccacacaccccaccgcccaccacccattgcaaactgatacgatggccaatccactaacgcatccaccatctctaccacttgcagccagccaacagagccaaagcagccgcagcagcaggagtgcacacagcagctggagctgccacagccggcaggtgctgctagtgatcatgatcctgagcgtcgtgatgccattcaccaaggcgcgacacttgcgcgaccaggtggcactggactacgcctacgacgaggacaactccggccgatcttcctcgtcgtcatcgtcatcctcatcatcgggtggcgacatcctgcccgccttcgatgtcaatccgtatcgcggtctggccgatagcttcggcgagggcagctacgacagtgatatgagtctcagcgagagtagctacgaggagatcgcccaggcggccatccgggctgccaggcgggagatgcgccgtcagaggacgcgacacgcgcgcagccacaacctgcgactcttctccggcaaatcagagatcccggagtgggagaacccgtgcggaggcacctacacgcccgacgagagcctcagcgatagcagcgccagccaaggacgagttatcaagcgcaaggtgagcaggggatccaaaatgttatacatataaatttaaatgggagagatggtgacctacctcaatcttggctatcacttagatttgcttcagcacttaagggcaatggaggaaagcaacctacaccaagcttttcttacattgtttgataacagtttatatttacatagtcgcaacgcagcttcatagatactaagatacatagatacttttgtgcgttgtgtgtcctgttagcatctttagcaggacagctacttaggcagttagttgaacccgaaacgttcgagaaattctgtcacacagccaatatgcattactcatcgatttcccccgctctccacttgcagcacctcgaaaacttgcggaacatcacgatgagcgaataccaagatataacccaccgcgccaccctggagtacggcaatctgcagcactggcagcgcgagtacaagttcctgccgaacatgacgaggcccacaagtgcggtaagttgataccgatgcagaccgcgccaaagagatccatccaaaccgaggcggtgagacagagtgaagcggacctgctccgccctgggcggcgcagaccagtttcccagtcggcccgcctcatttgcatgcccttcccagctgcgcagcatccacatgcaacagtcactgacgagcactcttctactcaatttacaggtgaagctaaagacttggtaccgccacatgcagaccttcgtgggcagcttctcatatctgggacgggcgcagtacaagttccgcaaggatcagcagaagagcctcaacgaggcggtcaccaaggagctgcacgacctgctggtcagcgcgcgctatatgctctgcgagatcgagttgaccataaacgcctcctatccgaacagcaatggtgcgaagctgagccgcgttagccggcaggcgatggaggagcgtctcaactttcacacgccagccaacggatccatggaggcggaccagcgcgacctgaaggtcagcaaggagctgtacttccagtatctgaacaacgtgtggaagaccctgcaccgtgtcctgcggcgaccgcgacgcaatagtgccgagcggcgacacctggcggcgattcacggaactggtgcgagcgggctgcgggcgggcagctcggaaatgctcgacgtgggctcctcgaacggatccggtggcagttccggctccgatggcggatccaatgagtcttgagccctcggcacccagctctgagccagttgagccggccagccgggtcaacatcacgcccttccagtattatagcgagtacttacagctgcacattccaaagcttagcagctttccagctctgcagcttccaagccaaatagaggaccacccgaccaatcgagcgggcgagaacgaagaatttttgtcgaatgccatttagacacggtacttttagtatttatttatttattgaatattgagtattgaatattgagtattgagtattagagcgccttccattccagttgccaaaccaagccaatctaatccactacatttaaacccatttcccatttgcacttccatgcggcccagtgccaactcgactatttatttgccatttagaatatggactcttttttttctctatgtgtagtaacttatttatttatttatgtatatcaatattgtatttatacctatttatttgtgcaacggcgagataaactcgccagcaaaagcccaacaaaaaacccagccacaaacaaaaaaatgcttaaatctactgtgatttattttaagtactttttttgaatagttcttagtgattgtgaaaaaaaaaacacgaagcgattgtgaaagaaaacgaagcgtagtattgtacagacattcttgtgcttagttgtaagtttgtgcaaaataaacttagacaagacaaaaaacaaaatggttcagattcttttggaacagtatataactattctataatttatagcgatttattacttccctaatagacagattttttaaatacaaacggaacaagtctatgcctgttctttttttgctgaggtatttatctacacatttatgagttaatgagccccccactaaatagcttttgattactcactaacaaagagctttaacttcggcatggcgaaattgatatacccttgcagaccaattatatatgtacatatatatatgctgttcactataatatcaattacgtggactt

SEQ ID NO: 12725 - DNA, 1299 bp, DROSOPHILA
atggccaatccactaacgcatccaccatctctaccacttgcagccagccaacagagccaaagcagccgcagcagcaggagtgcacacagcagctggagctgccacagccggcaggtgctgctagtgatcatgatcctgagcgtcgtgatgccattcaccaaggcgcgacacttgcgcgaccaggtggcactggactacgcctacgacgaggacaactccggccgatcttcctcgtcgtcatcgtcatcctcatcatcgggtggcgacatcctgcccgccttcgatgtcaatccgtatcgcggtctggccgatagcttcggcgagggcagctacgacagtgatatgagtctcagcgagagtagctacgaggagatcgcccaggcggccatccgggctgccaggcgggagatgcgccgtcagaggacgcgacacgcgcgcagccacaacctgcgactcttctccggcaaatcagagatcccggagtgggagaacccgtgcggaggcacctacacgcccgacgagagcctcagcgatagcagcgccagccaaggacgagttatcaagcgcaagcacctcgaaaacttgcggaacatcacgatgagcgaataccaagatataacccaccgcgccaccctggagtacggcaatctgcagcactggcagcgcgagtacaagttcctgccgaacatgacgaggcccacaagtgcgctgcgcagcatccacatgcaacagtcactgacgagcactcttctactcaatttacaggtgaagctaaagacttggtaccgccacatgcagaccttcgtgggcagcttctcatatctgggacgggcgcagtacaagttccgcaaggatcagcagaagagcctcaacgaggcggtcaccaaggagctgcacgacctgctggtcagcgcgcgctatatgctctgcgagatcgagttgaccataaacgcctcctatccgaacagcaatggtgcgaagctgagccgcgttagccggcaggcgatggaggagcgtctcaactttcacacgccagccaacggatccatggaggcggaccagcgcgacctgaaggtcagcaaggagctgtacttccagtatctgaacaacgtgtggaagaccctgcaccgtgtcctgcggcgaccgcgacgcaatagtgccgagcggcgacacctggcggcgattcacggaactggtgcgagcgggctgcgggcgggcagctcggaaatgctcgacgtgggctcctcgaacggatccggtggcagttccggctccgatggcggatccaatgagtcttga

SEQ ID NO: 12726 - protein, 432 aa, DROSOPHILA
MANPLTHPPSLPLAASQQSQSSRSSRSAHSSWSCHSRQVLLVIMILSVVMPFTKARHLRDQVALDYAYDEDNSGRSSSSSSSSSSSGGDILPAFDVNPYRGLADSFGEGSYDSDMSLSESSYEEIAQAAIRAARREMRRQRTRHARSHNLRLFSGKSEIPEWENPCGGTYTPDESLSDSSASQGRVIKRKHLENLRNITMSEYQDITHRATLEYGNLQHWQREYKFLPNMTRPTSALRSIHMQQSLTSTLLLNLQVKLKTWYRHMQTFVGSFSYLGRAQYKFRKDQQKSLNEAVTKELHDLLVSARYMLCEIELTINASYPNSNGAKLSRVSRQAMEERLNFHTPANGSMEADQRDLKVSKELYFQYLNNVWKTLHRVLRRPRRNSAERRHLAAIHGTGASGLRAGSSEMLDVGSSNGSGGSSGSDGGSNES

SEQ ID NO: 12727 - DNA, 5968 bp, DROSOPHILA
ttttcatctataatgcggtgtgtgtattatttttaatttgatcaagacttaagagcaggcacaattggagagtggagaagcgatcgaaaaggatattttggtcaatatcaattctccactcttcaagtgacttatcaacaagaaacgaccaacgatctactgttaagcaaaaaggacattctgtgacagcaactgcaattttgggaattaggattaaattatatagtttaattaattcgctctgcattaaaatgcaaatccattcaggatattgttacttgtgcgaatcctttccgttcgtttttagcagcaaacgatcttcagtctcgaattttaatcctgtcagataaagtagctaacttgaatggagaatttgaaatgttcaaattttagaattagccccaaatccaaaattcaacctcaaaagtttccatacactttcacacactggaagttaaagccaagccaagccagaaggcagagatttgtcgcctggagaagattagatcctcgaaacttggatcgatacgtcttcgttattcgctcaggctactctcgagttaattgtctaaattaaaaagtttccccgccctcaatatacacacatatcgctctggaaaagacaaaaaaaaaaaaacaacgaaaagcaaaaaaaaccgcaaaacaaacatagagaaaatgttaaaaaaatcgaaccaaattgttgagactgttgtctggttgcagttgcattcgcattgaaggaggctcggccgatcatccgacccgtaatcccgatcacctcagagctccagcatcgaagcacccgaccacccaatcccacccagtaacccatccactcccaagggagtccagttagttaaccatctagtcagggaggaacagtgatagcagttgatcgttggtcgtcgcgcgttgtagcagaaaattgaatttacttttgcattctcgatactcatagtgttttttctccacatctcttcccttctgaccccccatccccacccttcacatatatcctatatatatatattgtaaccccgttcgctgtatctgcacactgatttcgatacggaccgcggacagtagttggttggcagtgcgctgcgaccacagctaaaaacagcaccacggcagccggcaacggaaacggaaacatcagcggaagcggtagcggtagcggtaacggattccggcgcagaagagaaagtggctaccatgcggcgatggctcgtccgctgctcctgctcctgcccatcctactcgtcctgctccttgccgcccagttgccccacctcgccgaggggcgcagcaccaccagcagcggcggtctaacggttatcgatagcgagcgcctgcgcattcgcaccacctccagtacggcttcagctcagcatcccaatcagggcacgatccctgccagcgccgctagtccgcgcaagcgccacagaaagcggaacagcaactggatcgactatcgcaacttcgacgagaacaccaccgccctggagtgggccaatccctgcggtggcaactatcatccctcggcgggtgatcgcttcaatcgccagcgtcccaggcaggtgagttcaaacggcagcgctctttggacccgatccatatgtaatccgctccccattttatctgcttctccacagagcttcaatcagctgaagcgccacgcctttcgggagtaccgcagcctaaacagtagccaggactcggccatagatatccgcaacatgaccatgtggtccctccacacgcacaactacaagttcctgcccaagctcaagcccaattccacggtaagcaatcctacagtcatactttttatctattaacttagttgtcaaaactagttactaaatccatctcgttatcaactttgtatctatgtatcttgaaaatagctcaattatctcgttatcaactttgtatctatgtatcttgaaaatagctcacaattgtctccatctttttgatttcttccacagattgccctaaagcgctggtaccgcaacatgcaaacttacgtggccagctttgcgtatctgaggcgccagcagatccgctgggatcagcggtccatcacccgcgagtccagcaccgcccgcgagctgcgcgagctgctcctgagctcgcggcgcatcctctgcgagctggagacagccgtcaaccagacgcagagtccgcgccagaagcagcggcgcagtggtgcggcggtcacagcagttggcggcaccaccatgctgggtcagcagctgccacagatctcgcgtctcgagatgaacaagcgtttgaagctgcgctccaagacgagtgggcccggtatgggtggtgctgcttccagtgcatccatggcggcgggcgaggcggactcgatcgatatgcgctttgtgaagcaccactactacgactttttgcgcaccatgtaccagctgctgcggcgggatggcaagcgggtaaggagtcggccacggaagcaccacaagaagcagcagaggagccagaaaaagttgctacagcagcagcagcagctggcggatcaactggagcagcgttggcgcagctccaccttgaatggcaaggagttcaacgaggtatccaagccagtggccggtggtgctgctggagttgcagatgttgcaggtgtttccggtggtggaagcaaccaatttgcacgtggcagacgtggaaagcgccagtcgaagcgcgtgcagcgcacgtgaaatagcatacacaacattcccatatctttccatttccccttacctcaggactcgcccctttcctctgttctacaaacccctagcctcaaatccttaatttaaccgttaattgatcgatagtagcttaagtaaattatttgattgacagcacatagtctctgttctcgaattcattgcaagtattaccacattccgtatttattgacattcgtcgagagtgagagagagggagagagagagaaatagagagagagatatagttatatagcatacgaaaccacaatctgcagttgccgttctagtcacataagagcaaccgccaaccaccacccactggaaagtattattcgccacgcccgctttgtagcccattccgcacccgcatcgagtactatgtgacccccagtaggctaagctaacccatggcattcatgatcataattccatatccatatcctttaggctaaactttgatcctaaggcacacacacacacattttttttttttcgtaggctagcttgtgtttcgacatctgtgatatagtgcttgactagttcgtatttaacctaattgtacatatatattatatatagatcgcattggggtggcatgtggccgcatccatgccttcgtagtcctaagctcgcccttagaaatcgattttcgtatttatagaaccgaccgacatatgactaagccagcagcggaataaagcgaacaataaactgaattgaatttgaaaataaatctggattgcatttcatttttgggaataaatggtatacatatatccatttggatatacttaaatttatgatggaaaagaacttcgtacttcccattttgaggttcaacgtttttatcttatatttcaaaattgaaatacccgaatatcgaattcaattctatatatttttatatcttttaccatcaaaaacctatcaaccaacctatcttatgtggccaacactttcgcgtacattgaatccctatacctgggggagtcaattactccaattcccttgacccactttctgcggattcgctttctgctgcgccttggatgcgtctttatggctcctccatgggtcatgggttttatgatctccagcggcgtcaaactattagcacgtcaggctcccagttcccctcgataccgaaaccgatcccgatcccgattccgattccgatccccacctgcttgtctacctgtgcccagaaacccagaggaaatgaatggactgtgatcaatggaaccactcaatgaaagttcgcgccaagtgcatcagaactacatatactcgtaaagctgatcaccatcatcatcggtggcattagctcttgcgggaatgctaaggtgccgggatcagggggcagatgagctgacgcttatccccggggttaactaaaacacggctacacttgtcctggtcaccgatttgcattgcagtctggaatcgagaaatccccgctttgttttaagcggatttaggcaaatttactttttaatgccttggcttattgccaagctccgtttagggcgcttagtggcaacttatggccaagtccactcggattattagcgctcagcgaacggaagcagactgccgtctaccttgcgagtccttaagtgtcctggccaaacagagggagaaagggcagagggaagggcaaaacggagatgttgacatgcaaatggattagcacgagacgctgagcaaaaacatttctgcatgcattataatgccgcctaagccgtttattgattgcaatcgatcgaaggaagtccagactttaagccgctccagggttatggtttttatgttcggttttggttttggttttgggtacgggttcggattcggattcgggtctcttgaccatagtccagtgtcaagtgtcccctttttggcctgagcccttttgggtaagtaggtgttgttatgtttttagctgtcataaatattgtaaaactcggtaaatatttaaacagcgtgcacaataaaggcaaatgccaagaggctcgacgtcgacgggcataccagtatttcggtatttcagttttcagttttcggatttcggattccgttcggggcattgtttttggcctggtcataacggcccggccgcaccgcccgactctacctactacctgctccttcctccttcctcccggtgaaatttgaatatgtgcctggccgtggacgcaggggtgcggtggacagaaaaaaaaaagaaagaaaaagattaacaacatttaataacccatcattgcgccgtcccgctcccacgcattgtgtcgacaattttgcaagataactgcatttgtgcagtcctttgtgccgggccactttttgccattgtcctgccattttgcgctcctctttttcctttcttcgccaactcacaaattcccaatctctttttgtgttttttattgtcctgcggcaccttccaggaatcccataccgtgcagcggccttcgcctcgccaaactgcgtcctataccgcacgaacaggatgtatctgtatctatttggtcccatgtcctgtttgccactcaatttgtgcacccaaaggcacaatcgcacggcagacaagtggcaactcaattaggccatcaacgcaattatattgcaatttattggtacgatcaatccagtcaacgcgatatgaatatcccaacatttccagatgatggatcgatcggtcaccatggaatgcgattctcgaactattgctggattttagaaacctatgctccatgtaatatctatgtgaagaaaaggaatgtttttttttttgttaataaataaatacacttattattacaatgacataatagtattcccatatatatactgagttttcatacaaataccctttgcttgtaaacaataaatcgattaagcacagttctgttcaatccgcatttcatcactaaccctaattgattcgattctacagatgaaattcgtcaccacgcccattcacttttcataaacacgacttttaattgaggcttattaagcgattcagtgccaaggcgacgatttgtatgcggattgcagttcgatttatggcactgctgcccgacatatctcgtcacatcccattagatgttgtccaccagtcaaatagcagtcaatcccctccgggtgatcccccccccaaaataaacacccccgcgccgtttcccacgaccgcgacatgttaaattagccatgagccgctt

SEQ ID NO: 12728 - DNA, 2218 bp, DROSOPHILA
cccacccttcacatatatcctatatatatatattgtaaccccgttcgctgtatctgcacactgatttcgatacggaccgcggacagtagttggttggcagtgcgctgcgaccacagctaaaaacagcaccacggcagccggcaacggaaacggaaacatcagcggaagcggtagcggtagcggtaacggattccggcgcagaagagaaagtggctaccatgcggcgatggctcgtccgctgctcctgctcctgcccatcctactcgtcctgctccttgccgcccagttgccccacctcgccgaggggcgcagcaccaccagcagcggcggtctaacggttatcgatagcgagcgcctgcgcattcgcaccacctccagtacggcttcagctcagcatcccaatcagggcacgatccctgccagcgccgctagtccgcgcaagcgccacagaaagcggaacagcaactggatcgactatcgcaacttcgacgagaacaccaccgccctggagtgggccaatccctgcggtggcaactatcatccctcggcgggtgatcgcttcaatcgccagcgtcccaggcagagcttcaatcagctgaagcgccacgcctttcgggagtaccgcagcctaaacagtagccaggactcggccatagatatccgcaacatgaccatgtggtccctccacacgcacaactacaagttcctgcccaagctcaagcccaattccacgattgccctaaagcgctggtaccgcaacatgcaaacttacgtggccagctttgcgtatctgaggcgccagcagatccgctgggatcagcggtccatcacccgcgagtccagcaccgcccgcgagctgcgcgagctgctcctgagctcgcggcgcatcctctgcgagctggagacagccgtcaaccagacgcagagtccgcgccagaagcagcggcgcagtggtgcggcggtcacagcagttggcggcaccaccatgctgggtcagcagctgccacagatctcgcgtctcgagatgaacaagcgtttgaagctgcgctccaagacgagtgggcccggtatgggtggtgctgcttccagtgcatccatggcggcgggcgaggcggactcgatcgatatgcgctttgtgaagcaccactactacgactttttgcgcaccatgtaccagctgctgcggcgggatggcaagcgggtaaggagtcggccacggaagcaccacaagaagcagcagaggagccagaaaaagttgctacagcagcagcagcagctggcggatcaactggagcagcgttggcgcagctccaccttgaatggcaaggagttcaacgaggtatccaagccagtggccggtggtgctgctggagttgcagatgttgcaggtgtttccggtggtggaagcaaccaatttgcacgtggcagacgtggaaagcgccagtcgaagcgcgtgcagcgcacgtgaaatagcatacacaacattcccatatctttccatttccccttacctcaggactcgcccctttcctctgttctacaaacccctagcctcaaatccttaatttaaccgttaattgatcgatagtagcttaagtaaattatttgattgacagcacatagtctctgttctcgaattcattgcaagtattaccacattccgtatttattgacattcgtcgagagtgagagagagggagagagagagaaatagagagagagatatagttatatagcatacgaaaccacaatctgcagttgccgttctagtcacataagagcaaccgccaaccaccacccactggaaagtattattcgccacgcccgctttgtagcccattccgcacccgcatcgagtactatgtgacccccagtaggctaagctaacccatggcattcatgatcataattccatatccatatcctttaggctaaactttgatcctaaggcacacacacacacattttttttttttcgtaggctagcttgtgtttcgacatctgtgatatagtgcttgactagttcgtatttaacctaattgtacatatatattatatatagatcgcattggggtggcatgtggccgcatccatgccttcgtagtcctaagctcgcccttagaaatcgattttcgtatttatagaaccgaccgacatatgactaagccagcagcggaataaagcgaacaataaactgaattgaatttgaaaaaaaaaa

SEQ ID NO: 12729 - protein, 413 aa, DROSOPHILA
MARPLLLLLPILLVLLLAAQLPHLAEGRSTTSSGGLTVIDSERLRIRTTSSTASAQHPNQGTIPASAASPRKRHRKRNSNWIDYRNFDENTTALEWANPCGGNYHPSAGDRFNRQRPRQSFNQLKRHAFREYRSLNSSQDSAIDIRNMTMWSLHTHNYKFLPKLKPNSTIALKRWYRNMQTYVASFAYLRRQQIRWDQRSITRESSTARELRELLLSSRRILCELETAVNQTQSPRQKQRRSGAAVTAVGGTTMLGQQLPQISRLEMNKRLKLRSKTSGPGMGGAASSASMAAGEADSIDMRFVKHHYYDFLRTMYQLLRRDGKRVRSRPRKHHKKQQRSQKKLLQQQQQLADQLEQRWRSSTLNGKEFNEVSKPVAGGAAGVADVAGVSGGGSNQFARGRRGKRQSKRVQRT

SEQ ID NO: 12730 - DNA, 5402 bp, DROSOPHILA
cggacgagcggcagccaatgggatgtgatccgatccaaagtgtcgtcatcgtccacggcgtacactatgcacaccacgtgcgccttgttaatttcggcggccagggcatcctccgactgctccacggccgagaagtcaactatgctggtgggcacctgctcgggcgtcacgttcgccggaatggtaatctcctcagccctaggcggaacctcctccgggtactcctcactgaccagagacagaatcaacgacgtcttacccaccccggcgtcgccgacgagcaggatcctaacattcttgcgctgcgacgccgtgtactgtcccattccgactgctctccaagtgagatatgccgctcctgtgctcgtgctctgctggtcagagatcgctggcgtttaggccgaaattctaggattttgttatgcaaaaacgcaaaaaaaaacaacccagagtgatggggatggcagtaggtgtatcaaggtcgatatatcgcaacccagctaccagggctgccacactaggcgaccgccaaataatgcgatatttttccccaattttccggcaattgtgtttgaattctacgaatttaacaaatcaaaactattatttcgatcagttgcttaaaattgatcacgtaatttaaatatttccatccaaaaacatcggatccgaaactgtctggtaactttattgacagctggatctctacgatatgacaagttagcgtttttccgctaaatcagccaaccgttaaggatgttgtaaaggacacaaaatgttttctgttaaaaatattcgtataaacaaaaaggaaatgataaacaaggcaataaatcaaacttaccttcaattacgaatgtctccatactgcacttcggtgaaagtctcccaaattatatttcatccgttacattccaccatttaaactttgaaattgcctgtttgtctgacttcacaaccttgcccgctagatttggtaatcgatagttggtcagcactggctgggactccagagcttagcttcaattttcaacgtagtgagagttgtaagtgcggaagaaaatcagtactctcggatatcagcaaaatgagcactagctcaaacgacgtacaacaataatattcgagatttgtttgtttttttgtgcggcatcgatacaaacgcgtgccacggccaaccgatttggcttacaaggataatttccccgtgcaactttcacggggttagggcaaggagagcagggggccggagtgctggacgcgcagacagcgcggaatcgatatcgatggtacgcactaaaaaccagtcgtcctcctccagcgccagcagcagcagcaccaagtcaccaataaagtccagcagcggggcaggatcatccggcggaggactcggtggtcgccagtccactcaccgctcgtcgagcgcctcaaacgttgctgccgttgttgccggcggttcatctgccgccggtggaggctcctcatcgaatcgccgtagtccgggcagctcacccgacggcgacgacgacaccaccaccacagatgacctgacccccacaacgtgctccccacgcagcggccaccaccattcgtacggcggctactcgtcctctgtgcacaaacagaacctctacgtcgtctcgttccccataatctttcttttcaacgttctgcgctcgctgatttatcagctgttttgtatttttcgctacctatacggtgcgagcacaaaggtgatataccgcccgcaccgacgcgactgtaatattgaaatcgtggtgcagaattcctccaaggagcaacagcagtcgttgaaccatccttcggagctgaaccgtgaaggtgacggacaggaacagcagttatccaatcagccacagcgtttcaggcccattcaaccgttggagatggccgccaatcgtccgggaggagggtattcacctggtcccggcgatccattgctggccaagcagaagcatcaccatcgacgcgccttcgagtacatctccaaggcgctcaaaattgatgaggagaacgaaggtgagtttcggcgacgggggtggcagctccagttcgagttcgagtgctcgaatgctcaatgagtcatcgcccgctgtccgcttttgttgtctgtcgagtgtgagaatcaataaggcaaaacgcgcgcacaatggatgccccaaatgtcaacaggagtagggttgtctgccttgatggacttttatggagtggaagttctccaagcatgcgatttttaaattctaatgcatataagcgtactctttgtcaaattatttataagaggaaagcgagcttgattgaacataatagttataaaataaacataaaataatattattctatatattcaggtcacaaagagctggcaattgagctctaccgaaaaggtatcaaggagctagaggatggcatagctgtcgattgctggagtggacgtggtgatgtgtgggatcgggctcagcgcctgcacgacaagatgcagacaaacctttcgatggcgcgggatcgtctccattttctaggtaagtgaccagtcatatttcctatacccctaaaacataggatttgtttacctcattttttttttatttcattttgcacgttttcccctgcttttttgttgtcccctccgttttgtccatatgcacatgttcatccggtgcgcagctctgcgtgagcaggatttgcaaatgcagcgcctctccttaaaggagaagcagaaagaagaggctcaaagcaagccgcagaagaccagggagcccatgctggcaggaatgaccaacgaaccaatgaaactaagggtgcgcagcagtggctatgggcccaaggccaccaccagtgcccaacccactggtaagttcctcaccagctaacgcgcacccaacaagatcctcacacgccagcgcaaagccaccataagcagatcgattagtcaatccctatcacctcacttggcacttgattttcttagaattttttatttcgattggccaaattgtaaacttgtaaaagagtatattcttccgcattatccatctctgattgtgctaattcgttcacagcatctggccgcaaactgacaattggatccaaacgacccgtcaacttggccgtggccaacaaatcacaaacgctgccccgcaaccttggctccaaaacatctgtaggcgcagtccaaaggcaaccagccaagacagctgcaacgcctcccgccgttcggcgacaatttgtgagtatctgataagtaaactaaatttgtttttacacatttggcaaatactcagaaattaaaatactaattaaactaaattactcatattacagtcttcggggcgtaatacgccgccccagcgttcgcggactcccataaacaacaacggacccagtggcagtggcgccagcactccggtggttagtgtgaagggagtggaacagaagctggtgcaacttatactcgacgagatcgtcgagggtggggccaaagtggagtggactgacattgccggtcaggatgtggccaagcaggctctacaggaaatggtcattctaccctccgtccgaccggaactctttacgggtgagttggttattctgcgactagaaccgtcaccataaccaatcttcttcctttttagggcttcgtgcaccggctaagggtttattgctgtttggtcctcccggaaatggcaagacactgctggcccgcgccgtggctactgagtgtagtgccaccttcctgaacatttcggctgcctcgctgaccagcaagtacgtgggggatggcgagaaactggtgagggctctcttcgccgtggcccgtcacatgcagccctccattattttcatcgacgaggtggactcgttgctttcagagcgaagcagcagcgagcatgaagcatcgcgtcgcctaaagaccgagtttctagtggagttcgatgggctgcctggaaatccagacggagacaggatcgtggtgctggccgccaccaatcgaccgcaggaattggacgaggcagccctgcgtcggttcacaaagcgcgtttacgtctcactgcccgacgagcaaacccgcgagctgctcctcaatcgactgctccagaagcaaggcagtccgttggataccgaggcgttgcgtcgccttgcaaagataacagacggatactcgggctccgacttaacggcactggccaaggacgccgcattggagcccattcgagagttgaatgtggagcaagtgaagtgtctggacatcagtgcaatgcgtgcaatcacagagcaggactttcacagttcgctcaagcgcatcaggcgctcggtggcgccgcaaagcctcaactcatatgagaagtggtcgcaagattatggcgacatcaccatctagtctgttctagccaatgatcctgccctccttcatcaatccaatttggagaagctgtgatgtgagtctcagagcgcaacccattgtcgttacactagttttgattatgtgacccatgtttttcgcccttaaggttctattcaatccgtagacttttcgtttcacaaacattgttacatttgtatttacctgtgagttatttaatatgatttgtttcccagctatttctggtgttttagcctaagaacattgtattgtattttttcgttgtttaaccaccatgtccatgtggtgcaacatttgccatgcagctccattatcgttatactcatactcatggtatatatttctaagatctgtacttttcattggagttcttagaatagtaggtttgccctatcttcgtttatgatagtaattcaaggccacattgctttataaattagttttttgaaacattccgtagtgattttttgtaagacaggcggcccaaggagttcacaactacttccattgtatccttgaactataaagcatatttttgttgtacattgagtgcccatccacaagctacatgtaatctagaagtaagcgtagacctaagaccgatgatatacttatacacacccacaaagatacatttaccagcgcagaatcgtatttaagttttaatagttatcactgtccgtatggttagtctagtttagttcctttgtttcaatctatgtacctacagccataaatacaatcgtctccgattcacctatattattagtaacacacccaaaaatgttgtacctagcaggtgcgtatggatctggtgttatcagatcgatcagatacatcttcacccgcgcacatgcccgtcgcttatcgcgacacattgaaccagcttcaacgcagctcgcccacccggaatttgagttctttgactagttactaaacacagatacaaaaaaaaactacatgcatataaaactatatatataaagaaatctataga

SEQ ID NO: 12731 - DNA, 2660 bp, DROSOPHILA
gctgggactccagagcttagcttcaattttcaacgtagtgagagttgtaagtgcggaagaaaatcagtactctcggatatcagcaaaatgagcactagctcaaacgacgtacaacaataatattcgagatttgtttgtttttttgtgcggcatcgatacaaacgcgtgccacggccaaccgatttggcttacaaggataatttccccgtgcaactttcacggggttagggcaaggagagcagggggccggagtgctggacgcgcagacagcgcggaatcgatatcgatggtacgcactaaaaaccagtcgtcctcctccagcgccagcagcagcagcaccaagtcaccaataaagtccagcagcggggcaggatcatccggcggaggactcggtggtcgccagtccactcaccgctcgtcgagcgcctcaaacgttgctgccgttgttgccggcggttcatctgccgccggtggaggctcctcatcgaatcgccgtagtccgggcagctcacccgacggcgacgacgacaccaccaccacagatgacctgacccccacaacgtgctccccacgcagcggccaccaccattcgtacggcggctactcgtcctctgtgcacaaacagaacctctacgtcgtctcgttccccataatctttcttttcaacgttctgcgctcgctgatttatcagctgttttgtatttttcgctacctatacggtgcgagcacaaaggtgatataccgcccgcaccgacgcgactgtaatattgaaatcgtggtgcagaattcctccaaggagcaacagcagtcgttgaaccatccttcggagctgaaccgtgaaggtgacggacaggaacagcagttatccaatcagccacagcgtttcaggcccattcaaccgttggagatggccgccaatcgtccgggaggagggtattcacctggtcccggcgatccattgctggccaagcagaagcatcaccatcgacgcgccttcgagtacatctccaaggcgctcaaaattgatgaggagaacgaaggtgagtttcggcgacgggggtggcagctccagttcgagttcgagtgctcgaatgctcaatgagtcatcgcccgctgtccgcttttgttgtctgtcgagtcacaaagagctggcaattgagctctaccgaaaaggtatcaaggagctagaggatggcatagctgtcgattgctggagtggacgtggtgatgtgtgggatcgggctcagcgcctgcacgacaagatgcagacaaacctttcgatggcgcgggatcgtctccattttctagctctgcgtgagcaggatttgcaaatgcagcgcctctccttaaaggagaagcagaaagaagaggctcaaagcaagccgcagaagaccagggagcccatgctggcaggaatgaccaacgaaccaatgaaactaagggtgcgcagcagtggctatgggcccaaggccaccaccagtgcccaacccactgcatctggccgcaaactgacaattggatccaaacgacccgtcaacttggccgtggccaacaaatcacaaacgctgccccgcaaccttggctccaaaacatctgtaggcgcagtccaaaggcaaccagccaagacagctgcaacgcctcccgccgttcggcgacaattttcttcggggcgtaatacgccgccccagcgttcgcggactcccataaacaacaacggacccagtggcagtggcgccagcactccggtggttagtgtgaagggagtggaacagaagctggtgcaacttatactcgacgagatcgtcgagggtggggccaaagtggagtggactgacattgccggtcaggatgtggccaagcaggctctacaggaaatggtcattctaccctccgtccgaccggaactctttacggggcttcgtgcaccggctaagggtttattgctgtttggtcctcccggaaatggcaagacactgctggcccgcgccgtggctactgagtgtagtgccaccttcctgaacatttcggctgcctcgctgaccagcaagtacgtgggggatggcgagaaactggtgagggctctcttcgccgtggcccgtcacatgcagccctccattattttcatcgacgaggtggactcgttgctttcagagcgaagcagcagcgagcatgaagcatcgcgtcgcctaaagaccgagtttctagtggagttcgatgggctgcctggaaatccagacggagacaggatcgtggtgctggccgccaccaatcgaccgcaggaattggacgaggcagccctgcgtcggttcacaaagcgcgtttacgtctcactgcccgacgagcaaacccgcgagctgctcctcaatcgactgctccagaagcaaggcagtccgttggataccgaggcgttgcgtcgccttgcaaagataacagacggatactcgggctccgacttaacggcactggccaaggacgccgcattggagcccattcgagagttgaatgtggagcaagtgaagtgtctggacatcagtgcaatgcgtgcaatcacagagcaggactttcacagttcgctcaagcgcatcaggcgctcggtggcgccgcaaagcctcaactcatatgagaagtggtcgcaagattatggcgacatcaccatctag

SEQ ID NO: 12732 - protein, 271 aa, DROSOPHILA
MVRTKNQSSSSSASSSSTKSPIKSSSGAGSSGGGLGGRQSTHRSSSASNVAAVVAGGSSAAGGGSSSNRRSPGSSPDGDDDTTTTDDLTPTTCSPRSGHHHSYGGYSSSVHKQNLYVVSFPIIFLFNVLRSLIYQLFCIFRYLYGASTKVIYRPHRRDCNIEIVVQNSSKEQQQSLNHPSELNREGDGQEQQLSNQPQRFRPIQPLEMAANRPGGGYSPGPGDPLLAKQKHHHRRAFEYISKALKIDEENEGEFRRRGWQLQFEFECSNAQ

SEQ ID NO: 12733 - DNA, 3846 bp, DROSOPHILA
attaattagatttggcttgacaaatttacgagccgcaaggggcgaaatgttattgaactgatttctgagtcggcctgttgtgaattggggccacaaatacattggaatacgaataagaaaagaacacacgcgcgatgattgacaagccgggcgatttgaaaggggttggggcttccacttttctcggccacttggacttacccccacgttttgctcatcggcaaaatggacgcgcttcttcagtccgctgctgctgcgccgcctgcagggcgatggcagcggtacgagcggcggttttggggtcggctgtggacgataggacgtgggcaattcgtaaccgggcaccttccagaaagccggtcgactgaatgacgcggacgccgatgatctgctggtcgtcattgctggccagcgactagagtaaacaaaagaaatgctccgcacattcagaaatatgcgctaaattctacgattcgaacgcgtctgctcgcgactgcgtgtgtgtgtgcactagtaggcaattgaaaaatcaaataaaagcggagaaaaaatcagagaaaatgagcgaaaacagaatattattattcattcaaaatccagtgaaatagtgagacgcggagaattatgaatggattaattgatgtttcagttagtaaatttgattgagcaaagaaaatacatacaagcaatatctaataatcatgatttaatcattttcatttacaatttaaacaatagcgccttcagctttacaagatctggcaaccagcttaaaaacagtttttcaattaattaattaaaaagaacaatacaattaagacagaaggtaattacatacatttttacgaggacagtaaaccatttaaaatttcgatttatttataaaatttaatcgttaaaaactttgaattttaccgcccaatgcactcaaaaatcgatagtcgcagagaataatcgattagagctcgaaccatctggcaacgcccattgttttgttgtgttttatacctgcagatttcacccagcataaaactgagataaagctttaattaattacacataggggtactgcaagatctcagcatagccccgcccacataaagccgcagcatgtctattttcaaggcgcggtaagctgttattctaagctaatccaaacttctccgtaaacaaagactttctctaaccaaaatgcagagtcaaggaatttgaggatgttttggcggggccacaggatttaattgacctgaaacaactcaggaaactggcatttaatggtagaaagctaagagtgcatttgaaatgttcaaaatttgaagtctgagcactccacaggtgtgcccgatgtgcagagttttcgagcactcagttggaagctactccttggctatttggggcctaggcgcagtagttggaccacaaccttggcccaaaagcgagccctgtataaacagttcatcgaggagctagtcctgccccccggacactcgagcaatagagctagcgtagacggaggagatggggacaaagtcgattcggggggcgttggcctgcaagatcatccgctgagcgagggacccgaaagcgcgtggaacacgttcttcaatgataacgagtttctactgcaaatcgacaaggatgtccgccgcttgtgcccggacatatcctttttccagcagcccaccgattatccctgcgagattgtggtccacagcaaaggagagcatggacgaaggctccacgaacgggtggttcccgccgttctaagttcggcgaatgtggaacgcaagggcctcggcatgacaaaggtgagttcaagatcggaattgtgctagacaataagctcagaatgtgttgtttcattcatgcataccgtgtggattttagcagcaagtaagtaagcccatctggaactgccccaaacctaatgaatatgtgtgctctatatagataaatttgattacaaaacgctccgttgaaaactatgccgccatggaggagggccaagaggctcactgggaagttgtgcaacgcattttgttcatctatgccaaactaaatcccggccagggatatgtccagggcatgaacgaaatcgtgggacccatttactatgttatggcctccgatcctgacctcacatatcgcgcccacgctgaggctgattgtttcttttgttttaccgccctgatgagcgagataagagacttttttattaaaacactagacgacgcagaaggcggcatcaagttcatgatggccaggctatcgaatatgctgaaatcaaaggacctaagcatttacgagctactcaggagccaagagctgcatccgcagtattacagcttcaggtggctcacactgctcctgtcgcaggagtttccactgccagatgtactgcgcatttgggattccgtgtttgcggacgaacagcgatttgattttctgataaaaatatgctgttcaatgatattgtaagtaaacttagctttagtataaagcaagaactaatatgaaattttgcagaatccaaagggaagcaattttggaaaacgactttgcctcgaatgtgaaactcttgcaaaactatccgccaattgacattaatgttgtgattgctcatgccggatcattggcgtagcattcctccagaaatatatccttgtgcccaaatgcttgcaaagccccctagttagtttaacaactgaaagaaccaagcaatcaactatactttagttagccccaatcttggaaacgcacccttacaggaagtccaataagtacacgcattttcacttttttacatgacttataatttgtatgtcattaataaacgaattaattttaacatttcgtggtcccaattagataaacgtcagaacgttaaagaagtcataggttggtcagtcgttaaaagaataccgatgaacgtgtggcatcgtctcattaaacttaaacaccgttcgaaggttcacttgttaagctttggagctgtgtccttgcatatggactgtgcaataaactcgatgagtgtccttgttggacgtccggccatgccctctcgcagatactcgaactcatcaccacgtgtgatcatcacgttggtggcatcctggattaaatcacaaatcaaatcaaagtcctacaactaataaaaacaaaacttacaatatgcatccattggccgcaaggcacaaattcacgaaggaaagcggcagctttgcaaggacgtccaccacgaccgataccgtagttctggacatcactgcgtccaccggcacgcaccgccttgctgtagtagttccacagggggaaacgccacacgcggtctccagtgtgcatgctggcgtgcttgatctgctgccaaaggatctcagagttggtaaacaccccacaggcagcctcatccaacgcttggcgcatatatcccgagcaggtgccaatgtcaatgatgcacttcggacagaagttctgcccgtacagaagggcatccgccagcactagaacatcttcgtggtcggtgcactgcacctcaatggtcttgccattcatggatttcaccatgtctccaggacggaaggaattgcatccaataacgttctcgcacaggggtattagtccacgaatattgacctaacggtaatatatggttatccaaggaataacatcgggtcatccagtcacttaccggtaacctcaggccagcgacagcacgacaagtggccaccactacggccgcaccagtcatatctccgcgcatgtggaaaagttcctgcttctcctttaagcacaaaccacctgcatcgtaagtcactccctgcccaaccaagacgatgggtcgctcct

SEQ ID NO: 12734 - DNA, 1527 bp, DROSOPHILA
ttttatacctgcagatttcacccagcataaaactgagataaagctttaattaattacacataggggtactgcaagatctcagcatagccccgcccacataaagccgcagcatgtctattttcaaggcgcgagtcaaggaatttgaggatgttttggcggggccacaggatttaattgacctgaaacaactcaggaaactggcatttaatggtgtgcccgatgtgcagagttttcgagcactcagttggaagctactccttggctatttggggcctaggcgcagtagttggaccacaaccttggcccaaaagcgagccctgtataaacagttcatcgaggagctagtcctgccccccggacactcgagcaatagagctagcgtagacggaggagatggggacaaagtcgattcggggggcgttggcctgcaagatcatccgctgagcgagggacccgaaagcgcgtggaacacgttcttcaatgataacgagtttctactgcaaatcgacaaggatgtccgccgcttgtgcccggacatatcctttttccagcagcccaccgattatccctgcgagattgtggtccacagcaaaggagagcatggacgaaggctccacgaacgggtggttcccgccgttctaagttcggcgaatgtggaacgcaagggcctcggcatgacaaagataaatttgattacaaaacgctccgttgaaaactatgccgccatggaggagggccaagaggctcactgggaagttgtgcaacgcattttgttcatctatgccaaactaaatcccggccagggatatgtccagggcatgaacgaaatcgtgggacccatttactatgttatggcctccgatcctgacctcacatatcgcgcccacgctgaggctgattgtttcttttgttttaccgccctgatgagcgagataagagacttttttattaaaacactagacgacgcagaaggcggcatcaagttcatgatggccaggctatcgaatatgctgaaatcaaaggacctaagcatttacgagctactcaggagccaagagctgcatccgcagtattacagcttcaggtggctcacactgctcctgtcgcaggagtttccactgccagatgtactgcgcatttgggattccgtgtttgcggacgaacagcgatttgattttctgataaaaatatgctgttcaatgatattaatccaaagggaagcaattttggaaaacgactttgcctcgaatgtgaaactcttgcaaaactatccgccaattgacattaatgttgtgattgctcatgccggatcattggcgtagcattcctccagaaatatatccttgtgcccaaatgcttgcaaagccccctagttagtttaacaactgaaagaaccaagcaatcaactatactttagttagccccaatcttggaaacgcacccttacaggaagtccaataagtacacgcattttcacttttttacatgacttataatttgtatgtcattaataaacgaattaatttt

SEQ ID NO: 12735 - protein, 403 aa, DROSOPHILA
MSIFKARVKEFEDVLAGPQDLIDLKQLRKLAFNGVPDVQSFRALSWKLLLGYLGPRRSSWTTTLAQKRALYKQFIEELVLPPGHSSNRASVDGGDGDKVDSGGVGLQDHPLSEGPESAWNTFFNDNEFLLQIDKDVRRLCPDISFFQQPTDYPCEIVVHSKGEHGRRLHERVVPAVLSSANVERKGLGMTKINLITKRSVENYAAMEEGQEAHWEVVQRILFIYAKLNPGQGYVQGMNEIVGPIYYVMASDPDLTYRAHAEADCFFCFTALMSEIRDFFIKTLDDAEGGIKFMMARLSNMLKSKDLSIYELLRSQELHPQYYSFRWLTLLLSQEFPLPDVLRIWDSVFADEQRFDFLIKICCSMILIQREAILENDFASNVKLLQNYPPIDINVVIAHAGSLA

SEQ ID NO: 12736 - DNA, 6553 bp, DROSOPHILA
aacatcaagagctacgcatttcagtccaagtgagattaacttttatttatcctacagtttttagtcaacaaaatattttgtctaggggtcatatatttatatcacatagtggttagaaattctatttaaccagacctttaacgcgagccataatttctattgaaatggctctagatttttaattaaaaccgtcaaatgtcaacggctcttttcatttgattaattttgaagacccttctgtgaaatacataaaaaaatgaaatactcacaggtgtaccacctattcgctttctatttcgcgtaatttgcaaaaatgtaattgaggccaacgtgtggtacacatgtatgttagtggatgcattttacgctgcctttcattattataatgatgcttattattttaacgaaagcttttagtttcacctaaagtgcgggaatgcctgcgtagagtggaacggaaattcataatcaaaatatggccgtctaccaattgcaatgtataaacaaaaaaggcgaatgttctatttaagttgttccaattttgcgacaaaaaaagaagtggaaaaatcttaaatctcaagcaaattaatgattatatgtgcaaactcgtaaaaaatacaaatgcgaacattttaactcgaatatgaatataacacaaataaaagggtttaagaaacgaaactgtaaacgaaataactcatcgaagctattgtatatgaagtatatgctatctattatggcgggttatgcgttgatatcataagattacaaattatgcaaaaacatgttgtttctatagctacttaattgtacattgtaattgtaagtaatttataaggccacagaaatatactccgtcatagaaacttctcgtcgtgcacgtgctcctattttttcgggattttcacaattgttgatagaatcgagttggcagcgccttttggagtttagctttcagtctcacttttttgttcgatattcaatagaagtttagtcaaataatttttcttgtcgagtaaaggtgttcatcagttgaaagtgaaaagttgtgaaaagagtaagttgttgaaacgaataaaaaacactggcgaggccgctcacatttcaattttaaatagggttctctaatatcataaacaaaattcagcaaacttttgagtcttcaccaacgacgattctctgcgcacaattcgtatataatatcatccgtgcacgaattccattgccagaatcacttcaagcacccatggcccaccagatgcgcaatccgccggagcgccactttggccaccgctgcgagaactgcaagatatccgatttccagggccgccgctacacctgcaggttctgcgcggaatacactttgtgcggcaagtgcttcgatgccaaccatctgccggcatcgcctcagcatcgctactaccatccgatgagtgtgtactatgcctatgccgagtaccagctgtacttcggcggcgagccattctgcggtgatcacaaagtggcccagagctacaaatgtgccctgtgcgatgttcgcggcctttctaccgcccatttgttcatgcacctgctgcaggagcatcgcgaccaccgtgaccacgatgcctacttgtcgttggtcaatactctctatatagcggacaacggaatggagcaacaggtgccagtaccgcaaccttctagccaaacgcgctcgactcgttctcgcaatttagcaagcgttcgaccggtagccggtggcaacacgcgaagcgaacagcggaccgagcaggtatttgattccgcattaagcctggccctaatggttgtgcagctggacaatatggattcaactgccgccgactttcctgaacgctgctatgagatactgcagcagactgaaactgtgcttatgcagcacagaagttccagagtgccggacatggaggcgattgagtcttttgtgcgcgtcatcgaagatcaggttgtgactagcatggccgatcgtcgtcagcgtctgggcgcctcatcatcctcactacatcggctgacccgcattgaggcaatctctcctggtactaatacagcgttagctatgggtatgcgtgctgccatgcccgttttggttgaccagccgacaacaatggtgcgcaggcagacggctaggcgtactggagagcctatcgggatagcccttcaatcggcggtggcttcgtcttctaggagcggaaaagcggggtccagctctggggtagccaaggcacaaacgaagacgcaaggagatcagcccaccaagaaggtgtcaactgtcattacttccccactcaaggataagcgctttttgtgctcgaaattggtgagcggaaatggccaaaagtgggaaagcaaattgctcaaagctacctttaccgaggcaatgttctgttcgatgttggcagacgaagagctgttccagccgccaattggactgccctggactgcgaatttcatgttggacgcagtcgagccatcaggcagtgtaaaatcaaatgggaaactattgctgtatcctgttaagaccaaggaattgatggaacgcttctacaggggtctcgccgagtacaaaacttggattggttatcagaccgaaccaactgccgaaagcaaggcaactgaactcccatccgcttccaccagctcggcttatttcacagttttgggcgatatcccatatgcggattccggatcggatgatttggaaagtaatgcatcagaagaaatggccagcgatttgcatggcgaaggaaacagcgatgatttagccggattggaggaggacaaggaaagcggcgaggaagaaaacggtgatgaggacgatggagcttcggattccgatttctctgagtcagccatttctcaaatcaccgacttcatagatatggtcatccaggacgaataggcggggcacccagcatttgtaggaaataagcctcggtattttcataattacatatgcatatgtagtattttgaaataaacatttctaaaagaaaatgaccaaacgatctggatgtttcctcaggtttttccatttcataggaagcttttctcggatatttctctggctagtggaagatgatttacaaaatcttatttgcacatctagtaggcagcgcttttccattttattccggtctacagttgtctctatttgttattgcaaaacatttctccgacatctgagaacaaaatataaataaagcattaaacatttttcgataaacccagtaacgacgccaaattgaacttcgatcagtcatttgatcatatcatttaaaatgggttgcaatttctctgctttaccgaccaaatgtaagggttgcgggcaaattcgcgctgactttgaccgacggtacggttgcagtgagtgcggatctgaggtaatgtactgcggccagtgttttgatgagggccgaaatcagcacactgagacgcacaaggacgaccgccgcattaagattatctaccatcggtcctttcttgacaaattcttcagcggcgagaagctgctaaacggcgatgcttcaaaaagctacaattgcgttttttgtaagaagagatttagcgccgaggagttgcagttgcacttgtccgagatgcactcgaatcccgcggatgcgtcagcgttgacggtcatgctggaaaggatgaggcaggaagatttggagaacagaattggtgagatatggcaacattttgggtaaacaatctatgcacactcattgtgattgcctaaaagcttttgtcaccattgacactccataataatagcaaattatgtgtcaaaatatggttatggatacatataaaaggtgtccactgtcggctgtcgtggcaacatcttcaagtatcgttatccctcttgttcaatgattgtatacatatacatatttttgttttgacaaatcatttttcgcttcgttggttgtccagcattccatttgatggatttgtctacaagttagataatgagaatgtcaagatatcgattttaggtgattatatttcgatgtaacactaaattcgtattgtttaacttattggccaaaagaacaacatttaagtttagtttttaagggggtggaagtgtaaaaatgacgtcatgttgttttgatggggggaaagccaagtcgagggttgaaccacgaggttcacccttaaccgcaactattcgatgcaccccaagtgcaaaaatattgaattactataagtctccctttgctttccttcctcctccacagccacagagattcgctgccaggagaagtcccgcgggggattgagctatgaggtcatcctggccgaaccggcacccaatgtggccgttccaaaacgaccggtcacccctggcaagaacgttagcgtcgaggagattgagcagaaacttaaggcggccgaggaacgtcgcattgtaagtacataaattaaagaattaaagttgttgtaaagcaagtgaaatcttgtttccccagtctctagaagccaagaagatggctgacatctccactaagctggctaaagtcgaggaggcgactcgcaaaaaggatgagatcaccaatgagtttattactcagaccaaggagcagctggagtcgaaaatggagctgcatgtggagaagcgagaggccatcatcagtgacatgaaggagaagctaaaggtaggctaccaaacctattgcatcccatagtatattcccaactaaccaagtattttcttccgtttaacgaaagatccatgcccaggatatcgaaaagacgcgtgagactcttgagcagcagaaggccaacgagcagaaggcaatcgaggaaaagttgaagattgctcagtctcttcgcgatgagaatatcaagaaaatgttggatcgcctaaaggagcatgtgagtctatagcatggccaaaagttttcattaaatctagtttatgattagatgtatgtaattataatattcaatacccaagatcccataagtctcaacaattactttataaacattacattaacttacattcattgctggaatataaaattgaaatgacacatcattttgactggactagcaaactggttaacatttagttagtcattgagtgtacgaactataaataagttatcatgcgttcatataattttggtttttcatttctcttatatcctctcatttagaacacaatcaaaattgccgaaatcaaatcgcagaacgatcaattggaatgtcaaaagatcgaggagaaagcgcgcatttatgagaacaaattgttcgccgccgagcagaaacgcgaaaaggaattgcaaaaaaaaattgaaaaagttcaaaaactcgtacgtgttgttcccccccactgaaagcgacaatttgccctattgtttgagtagcacttggcagtagttgcacatctccattcgcaaacgaatattaatccttgattgctttcctttctttcaggaacgtcgcgctgagctcgtgcgccagaacaaggcccaggcccaggatttggatggtcagcagagcgccattgcctcctcaggctaagtggagaacgatcctgcatcgagagctgtgctcacccactgcaaacatggttacaaggcgactacaaaaagaacagcaacactgcataatacaccaacacatatttaagcaagaaaacccttaaaactgaaaacgatttctcaaaatttccaagtattatgaaagcaaacgaagcgaagggcaagggcaaagtctcaagataccgctgagcgagttttctcacgagctctataatgaaacacgaataagctactataaagcgaaaagaaatgaatgcttacggcaagttaatgcaaaaaaaaaattagtaaaggaaatctacatttaaacttaaaagcccaggcagaaaagcctatgcaagttgaatgcatgcctgtcatttaaaatttcaaattcttttaaaagttcacgttgatttcagttgaaagtttaaaacactttttaccttgagttccaagaatgttatattcgttttggattcattattttcaaagtcttagtcttgaatgttcaagtttttttttttttttaattactgtggcatcgactgaggtattctcaaaataataagcacgctgtatttgcatctatgaatggctttcgcgagtaaaaatttgaaaatgtttttaattaagttaatgtatactttagtggtaattttaatttactaacttgcaacaacatgatacatatacatgctgaatatagttttacactaacaaataatttgttcttataagtttcgcattttctatctataaaataaatgtctaacagaaaaaatacataagaaatgcttatacaattcaataaaatcaaataccatgtaaaacacacgaaacgcatttttcctttatttacatacaacacaaacactaaaaacgctgatatagacattaatataaatggaaggaaactacgtataagcatacattaatgtgtgtaatattatatggaaatgcatattttgtctaacgtcgggttatttttagaaatgggt

SEQ ID NO: 12737 - DNA, 2864 bp, DROSOPHILA
aatttttcttgtcgagtaaaggtgttcatcagttgaaagtgaaaagttgtgaaaagaggttctctaatatcataaacaaaattcagcaaacttttgagtcttcaccaacgacgattctctgcgcacaattcgtatataatatcatccgtgcacgaattccattgccagaatcacttcaagcacccatggcccaccagatgcgcaatccgccggagcgccactttggccaccgctgcgagaactgcaagatatccgatttccagggccgccgctacacctgcaggttctgcgcggaatacactttgtgcggcaagtgcttcgatgccaaccatctgccggcatcgcctcagcatcgctactaccatccgatgagtgtgtactatgcctatgccgagtaccagctgtacttcggcggcgagccattctgcggtgatcacaaagtggcccagagctacaaatgtgccctgtgcgatgttcgcggcctttctaccgcccatttgttcatgcacctgctgcaggagcatcgcgaccaccgtgaccacgatgcctacttgtcgttggtcaatactctctatatagcggacaacggaatggagcaacaggtgccagtaccgcaaccttctagccaaacgcgctcgactcgttctcgcaatttagcaagcgttcgaccggtagccggtggcaacacgcgaagcgaacagcggaccgagcaggtatttgattccgcattaagcctggccctaatggttgtgcagctggacaatatggattcaactgccgccgactttcctgaacgctgctatgagatactgcagcagactgaaactgtgcttatgcagcacagaagttccagagtgccggacatggaggcgattgagtcttttgtgcgcgtcatcgaagatcaggttgtgactagcatggccgatcgtcgtcagcgtctgggcgcctcatcatcctcactacatcggctgacccgcattgaggcaatctctcctggtactaatacagcgttagctatgggtatgcgtgctgccatgcccgttttggttgaccagccgacaacaatggtgcgcaggcagacggctaggcgtactggagagcctatcgggatagcccttcaatcggcggtggcttcgtcttctaggagcggaaaagcggggtccagctctggggtagccaaggcacaaacgaagacgcaaggagatcagcccaccaagaaggtgtcaactgtcattacttccccactcaaggataagcgctttttgtgctcgaaattggtgagcggaaatggccaaaagtgggaaagcaaattgctcaaagctacctttaccgaggcaatgttctgttcgatgttggcagacgaagagctgttccagccgccaattggactgccctggactgcgaatttcatgttggacgcagtcgagccatcaggcagtgtaaaatcaaatgggaaactattgctgtatcctgttaagaccaaggaattgatggaacgcttctacaggggtctcgccgagtacaaaacttggattggttatcagaccgaaccaactgccgaaagcaaggcaactgaactcccatccgcttccaccagctcggcttatttcacagttttgggcgatatcccatatgcggattccggatcggatgatttggaaagtaatgcatcagaagaaatggccagcgatttgcatggcgaaggaaacagcgatgatttagccggattggaggaggacaaggaaagcggcgaggaagaaaacggtgatgaggacgatggagcttcggattccgatttctctgatgagtgcggatctgaggtaatgtactgcggccagtgttttgatgagggccgaaatcagcacactgagacgcacaaggacgaccgccgcattaagattatctaccatcggtcctttcttgacaaattcttcagcggcgagaagctgctaaacggcgatgcttcaaaaagctacaattgcgttttttgtaagaagagatttagcgccgaggagttgcagttgcacttgtccgagatgcactcgaatcccgcggatgcgtcagcgttgacggtcatgctggaaaggatgaggcaggaagatttggagaacagaattgccacagagattcgctgccaggagaagtcccgcgggggattgagctatgaggtcatcctggccgaaccggcacccaatgtggccgttccaaaacgaccggtcacccctggcaagaacgttagcgtcgaggagattgagcagaaacttaaggcggccgaggaacgtcgcatttctctagaagccaagaagatggctgacatctccactaagctggctaaagtcgaggaggcgactcgcaaaaaggatgagatcaccaatgagtttattactcagaccaaggagcagctggagtcgaaaatggagctgcatgtggagaagcgagaggccatcatcagtgacatgaaggagaagctaaagatccatgcccaggatatcgaaaagacgcgtgagactcttgagcagcagaaggccaacgagcagaaggcaatcgaggaaaagttgaagattgctcagtctcttcgcgatgagaatatcaagaaaatgttggatcgcctaaaggagcataacacaatcaaaattgccgaaatcaaatcgcagaacgatcaattggaatgtcaaaagatcgaggagaaagcgcgcatttatgagaacaaattgttcgccgccgagcagaaacgcgaaaaggaattgcaaaaaaaaattgaaaaagttcaaaaactcgaacgtcgcgctgagctcgtgcgccagaacaaggcccaggcccaggatttggatggtcagcagagcgccattgcctcctcaggctaa

SEQ ID NO: 12738 - protein, 892 aa, DROSOPHILA
MAHQMRNPPERHFGHRCENCKISDFQGRRYTCRFCAEYTLCGKCFDANHLPASPQHRYYHPMSVYYAYAEYQLYFGGEPFCGDHKVAQSYKCALCDVRGLSTAHLFMHLLQEHRDHRDHDAYLSLVNTLYIADNGMEQQVPVPQPSSQTRSTRSRNLASVRPVAGGNTRSEQRTEQVFDSALSLALMVVQLDNMDSTAADFPERCYEILQQTETVLMQHRSSRVPDMEAIESFVRVIEDQVVTSMADRRQRLGASSSSLHRLTRIEAISPGTNTALAMGMRAAMPVLVDQPTTMVRRQTARRTGEPIGIALQSAVASSSRSGKAGSSSGVAKAQTKTQGDQPTKKVSTVITSPLKDKRFLCSKLVSGNGQKWESKLLKATFTEAMFCSMLADEELFQPPIGLPWTANFMLDAVEPSGSVKSNGKLLLYPVKTKELMERFYRGLAEYKTWIGYQTEPTAESKATELPSASTSSAYFTVLGDIPYADSGSDDLESNASEEMASDLHGEGNSDDLAGLEEDKESGEEENGDEDDGASDSDFSDECGSEVMYCGQCFDEGRNQHTETHKDDRRIKIIYHRSFLDKFFSGEKLLNGDASKSYNCVFCKKRFSAEELQLHLSEMHSNPADASALTVMLERMRQEDLENRIATEIRCQEKSRGGLSYEVILAEPAPNVAVPKRPVTPGKNVSVEEIEQKLKAAEERRISLEAKKMADISTKLAKVEEATRKKDEITNEFITQTKEQLESKMELHVEKREAIISDMKEKLKIHAQDIEKTRETLEQQKANEQKAIEEKLKIAQSLRDENIKKMLDRLKEHNTIKIAEIKSQNDQLECQKIEEKARIYENKLFAAEQKREKELQKKIEKVQKLERRAELVRQNKAQAQDLDGQQSAIASSG

SEQ ID NO: 12739 - DNA, 3856 bp, DROSOPHILA
ccactccaccactccaaccacaccagccacgccagccacctttcacccaaccgcccactcagcctcttaagtcatcaccatcgtcatcgttgtttggcgcaaatgtaaagagtgaattgccgaggcaaaagctgcccaaatgcaaaggcaggcgactcgaaggagaattgtaatgcctaattaatgaccgccacgttttctttgctccttcgcccattctgtggaattcaattatacactctgcatccgtcggatcgttgacaatcatctggtattttagacactatttgggttaaccaggctgaacatacggtaagcagtatccactgagctgtaaatacttcaagccattcgtatctataagatatcatttgcatggcgaacataacatacatacctaaacctgccatcgatagtatgtaataataaacatacatacataccatatagattaactacacagcaactgataacacgattatctatctatcagaagtgtctgaaagcaagtatgcgaagtattgcattttaagtttttgactcaaatcaataaaatattcacattacctatgataaaatatccattagaggcaggttccctaaacccatcgtatctgccaattaaccttggcagtatcccaagtatacgatactcttgtttaactgcactttttaatctccgtgtggcagtatttaccaaaaatatgtgattccagcccaatctaccaatcgaatcttatcagttctcctactcaaatatagctatgttcgaactgaattacggttttccatgaggttcggtgccactatctactgatccgcatatggacgactcatatgcacgacccaccggctgagtgagtcccgaacagtaacaatggtaattattatggtcgccccactggcccccacttgagggcgcggctatgggactatctaaacaattttatcatcaactggagcagcgagaacagtattcagtctctgtctggcattcgagcgcgttggaagtgtcagagaggattgcagccaaaagtagcttgtagtgcgtatacatatatataagtaccatcgttgagattaggaagcaatggatttgcgcgtgagctttagtgacaagctgaaactgggcgccaagtgagtgcgaaattcgaagaggagggccgagccgatgagtcatcatgactgctcttctctttcaggattattggccataaggtggttcagtacaagctgggcacgggtcagaccaaggagctggccaccaaatatggccagctgaagggtcagcagcgcaggacactctacgatggcgaaccctactactccttcgagggcattccctttgcccagccgcccgtgggtgagctgcgttttcgcgcaccccaaccaccgagctcgtggcagggcgtcagggattgcacctatgccagggagaagcctatgcagaggaactccattactaacgctgccgaaggatccgaggattgcctctacctcaatgtctacgccaagaggctcgagtccccgaaaccactgcccgtaatggtctggatattcggtgggggctttcaggtaggcggtgcatcgcgggaactctatggaccggattactttatgaagcacgatatcctgctggtcaccatcaactatcgggtgggtgtcctgggcttcctaagtctcaaggacaaggagctcaagatacctggaaatgcgggactgaaggaccaaatccaagcactgcgttgggtcaaggagaacatagccagtttcaatggcgatcctgagagcataaccgtattcggcgaatcagctggcggagcatccacgcacatcctcatgcaaacggagcaggccagaggactcttccaccgcgccatcgttcaatctggttcagctttgtgcgcctgggcgacgcaaccggatcgaaagtggccacagagattgggtaaggaactgggctatgccggcaatttggagagcgagaaggaactgttggagttcttccagcaaattccggccagcaagttggcccagtactgcaattcaatcgtaacgcaggaggagcagcgcgactacgagatcttggcctttgccccggttatcgagccatatgttggcgatgattgcgtgatcccaaaatcgcagcaagagcagctgtccagcgcctggggtaattccattcccatgatcataggcggaacttcgttcgaaggactcttctcttatcgcaccaccctggatgatccgctttacatgctgagtgccttcgaggccataattcccaaacaggttcgcgatgccatcgacaaggaggagctggcggagatggtgaggaggctgaagaagtcctactttgacgatcccgaccgggccagcatggagctctacgagtgccttcacattctgagcatcaagaacttctggcacgatatccatcgcaccttgctcgctcgcctggcctatgccaccaacttgcccacgtatctctatcgattcgatatggattcgccacactttaatcactatcgcatcttgaagtgcggcaaaaaggtgaggggtgtgtgccatgcggatgacatttcctacatgttctacggcatactctccagtaaactggacaagaattcgcccgaataccgcaccatcgagcgactggtgggcatgtggacatctttcgccaccaccggagatcccaactgtgagataatcgctcccgtcaagtgggatccactgcgtccgggtggcgtggaaaactgccttaacattgccgatggcctggagttcattccgctgccggagagcaaacaatttgtggtctgggatagtttttacaccagggaaagcctctactaaggaatttggaatatatgtacgtgtttgggaaatctgttgttagctttatgtgaaattaatcttctgtgttttcatctgtgaaacttcaagggtctctataacatttactagcctaataaatactttctcttagttaaactatgcaaaaattgtattgtatttgctacgcatgtcagtggaatttaatcaccattaaatcatttatcatttattgatttcatctgctttaagcgcaagagcatttgtttttctaaattttatttcctttttttcggccggaattgatttcgcagcccgttttaactggatctagtgtctgggtcgtgtttgcgtttcttttattgacttttgggcaaaatgccaggaaattcttgggagccaagagaatttcgcaggtcattgttgtcaatcttataattcctgcgcctttgcggttctcttctatttttcagcccatttacgagctcataaatttatgaaatgtttaaataacaattaaatttcaaggaattttgcaattttttatggccattcacaggaactgaaaactgtttttgtgaatgccacgacaaacataaatttgatttatactttaaggcaagctaatcagtttaattagcactggtgaaaaaaaatatataaatattggtttctaacaaacggaaatgaaatttcccattccgatatctttaatgtttatttcaaaacgaattttaatatgtctcataaaagttgttaacaacaaagcaattcgcgcataggcccatagatacatttcccgattttaaagggtatcgtaatcgatttgtttatacaattgtttatagcttatctagatatagtttatggctttagttatttcggttctggcagcgcgccagaccaacggatcgattgtgaattttcttatttcgttcattatttgattttgtttggcttcactggcgctgctttaaatgcatacaatttgagcataaatatttaaattgcttttcgcact

SEQ ID NO: 12740 - DNA, 1791 bp, DROSOPHILA
cgcgttggaagtgtcagagaggattgcagccaaaagtagcttgtagtgcgtatacatatatataagtaccatcgttgagattaggaagcaatggatttgcgcgtgagctttagtgacaagctgaaactgggcgccaagattattggccataaggtggttcagtacaagctgggcacgggtcagaccaaggagctggccaccaaatatggccagctgaagggtcagcagcgcaggacactctacgatggcgaaccctactactccttcgagggcattccctttgcccagccgcccgtgggtgagctgcgttttcgcgcaccccaaccaccgagctcgtggcagggcgtcagggattgcacctatgccagggagaagcctatgcagaggaactccattactaacgctgccgaaggatccgaggattgcctctacctcaatgtctacgccaagaggctcgagtccccgaaaccactgcccgtaatggtctggatattcggtgggggctttcaggtaggcggtgcatcgcgggaactctatggaccggattactttatgaagcacgatatcctgctggtcaccatcaactatcgggtgggtgtcctgggcttcctaagtctcaaggacaaggagctcaagatacctggaaatgcgggactgaaggaccaaatccaagcactgcgttgggtcaaggagaacatagccagtttcaatggcgatcctgagagcataaccgtattcggcgaatcagctggcggagcatccacgcacatcctcatgcaaacggagcaggccagaggactcttccaccgcgccatcgttcaatctggttcagctttgtgcgcctgggcgacgcaaccggatcgaaagtggccacagagattgggtaaggaactgggctatgccggcaatttggagagcgagaaggaactgttggagttcttccagcaaattccggccagcaagttggcccagtactgcaattcaatcgtaacgcaggaggagcagcgcgactacgagatcttggcctttgccccggttatcgagccatatgttggcgatgattgcgtgatcccaaaatcgcagcaagagcagctgtccagcgcctggggtaattccattcccatgatcataggcggaacttcgttcgaaggactcttctcttatcgcaccaccctggatgatccgctttacatgctgagtgccttcgaggccataattcccaaacaggttcgcgatgccatcgacaaggaggagctggcggagatggtgaggaggctgaagaagtcctactttgacgatcccgaccgggccagcatggagctctacgagtgccttcacattctgagcatcaagaacttctggcacgatatccatcgcaccttgctcgctcgcctggcctatgccaccaacttgcccacgtatctctatcgattcgatatggattcgccacactttaatcactatcgcatcttgaagtgcggcaaaaaggtgaggggtgtgtgccatgcggatgacatttcctacatgttctacggcatactctccagtaaactggacaagaattcgcccgaataccgcaccatcgagcgactggtgggcatgtggacatctttcgccaccaccggagatcccaactgtgagataatcgctcccgtcaagtgggatccactgcgtccgggtggcgtggaaaactgccttaacattgccgatggcctggagttcattccgctgccggagagcaaacaatttgtggtctgggatagtttttacaccagggaaagcctctactaa

SEQ ID NO: 12741 - protein, 566 aa, DROSOPHILA
MDLRVSFSDKLKLGAKIIGHKVVQYKLGTGQTKELATKYGQLKGQQRRTLYDGEPYYSFEGIPFAQPPVGELRFRAPQPPSSWQGVRDCTYAREKPMQRNSITNAAEGSEDCLYLNVYAKRLESPKPLPVMVWIFGGGFQVGGASRELYGPDYFMKHDILLVTINYRVGVLGFLSLKDKELKIPGNAGLKDQIQALRWVKENIASFNGDPESITVFGESAGGASTHILMQTEQARGLFHRAIVQSGSALCAWATQPDRKWPQRLGKELGYAGNLESEKELLEFFQQIPASKLAQYCNSIVTQEEQRDYEILAFAPVIEPYVGDDCVIPKSQQEQLSSAWGNSIPMIIGGTSFEGLFSYRTTLDDPLYMLSAFEAIIPKQVRDAIDKEELAEMVRRLKKSYFDDPDRASMELYECLHILSIKNFWHDIHRTLLARLAYATNLPTYLYRFDMDSPHFNHYRILKCGKKVRGVCHADDISYMFYGILSSKLDKNSPEYRTIERLVGMWTSFATTGDPNCEIIAPVKWDPLRPGGVENCLNIADGLEFIPLPESKQFVVWDSFYTRESLY

SEQ ID NO: 12742 - DNA, 4465 bp, DROSOPHILA
gaaagcgctccggatccaactgctgttgccgaacgggctgaatgggctgaccactgggaccttcgacgcgcacctcgaagtttcccttgaccccgttccgcttgatgatgaatcccagcgggctgttcactcgcaccgcgccgctgggaaagtggagcagctgcaccttgccggcgtcggtcagctcgggtgccacatagacgcgcggcgattccgagggataggcatctaaagagttggggggcgcgagattcgtagtgtataaatagccggttcgatgtttacttcctcatcgacgctactcacccgcatcgggcgttcgctggtagcgtccaaaaataccgccctcctccggactattgccctccaggccactcccactcgaactgcaggcggaggcggaggaggcggcctgcgtgttcagacgcatctcctgtgacactttgaacatgccgctgatattttctccaattcgaatatcaatcgatttttttaaaagattccaaatagtttcccccaatttaattggcgactgcccggggcgtgctccttcgaccgactgaactcgctgctctccatctcaatggaatcggcgaactgctctcggaatgccagattctcgatctccgcgatggcggagctctcgccatccgattggggcaaatgtttacgatgcttgtgtgccgggcagccagccaaatatacacgatatagatgcaagtccgccagatgcgattccaatccaagcaggagagtatccaaattgttatgaatcgagtaaattttaatgtgaatcttaaattaaaggtataccaactaaaaattccataaaatgtgttaatcgctgaatatttaaacaaatatttattttaaagattcgaaagaattttattacattttttgtgacgagcagcaatttaaatttaaataacgaatttgaataacacatcgtggatgtgtgtaagtagtctgtgtggctggagttgggcgaaatgactgactatggagtacgtttgatgtcgtagccgtgctgcaagttgtgatagagatgcggatagacgaccatgtccgtgttggtcaggagtccagtttcgtagagattgctgtagatctgtggacgaatatctcctttaaatataaatgtatctttttttttggaagtgaaccgacttacattctcggtgatcttgagcgttcgtatcgcctccgcccgcatgtgcagccaggtgtggcgcagtcgctcctccgcgtccgatatgaagcccggcgaccagttctccctcagccggaagaagttaatacggttcttctcgcgcacagcccgcggcagcaatacggtgtgtcgtttcctagcatcccgcttggccttcccgttcagcatctgctgctgcttggccttcttctcctcgagctggatgcgcatcttgcgcgcgagatcctctcgctttttactggccgccgtctccgcaaagatggacacctggtgcgactgggcatagaagcgagtgtagtagtccagcttgctcaagtctggtggcggcattatcttcctgaaattgcccaaatgactctcctcccaggcgatttgctgggccagtggaccatggtcctcagcttcgggttcaacatcaacgggttgggcatccggactgcccttctgggcatcgattttgggcttggaggtgccgccaccaagacgcggacgttgtacgggtctggaaatatatatgtgggttaccaatgatgatgatgctgacatgatgatgagacacttacgggtctcccctgatcttgagcagccgctgcttgacccgcttgcgatcctccttgagaatctgcctcttgtccgccagcaccgtgctgaccaagttcaaggtgtcccggatcagcggccgctttacctccctgtccacctgctcgttggtatggaagctgggcgagtggttcacctcgaggatgtacggctttagcttccagtccaccaggatgtcgaagccgaggatctcgaaacaggcctggatcttgtcgtgacccggaaagcaggcatggtagttgtgcttcaacactggccacgcactcagcaccgtcttgatgatcacgtcgtccacattgctccagaactcctccacatcgtagttgtgtcgccgcatccagttgttgattgcgctcagcttcctcttactgccgcagtcatcgttgtcgcagagttcgtagtgcgagttccgcttgttcaccgagtagttggtcaggtgcatgtacagatcgttggcgtttccgggcgtgggctccacgtacttgttcgtagcaaatctggccaatccctcgttgtacacgaagatgcgcaggggatccacggaggtaatcaaggtgtacacacgcagatcgaacttgtacccatcgatgagcaggggctggaaaagtggatgcgatggttagccagcgtatgggattccggatgaacagcggatacattaccctgtgtatgtacgtctggcagatgaggcgctcatgtggacctatggtcttcaggtcgtttgtcagccagatgccacgaccctgggcaccagaatccggtttcaggatgaacgtgcgtttgtggttgagcgcgtagttcatggcatctccatagctgaaatcgttggtatcaatgattagcactttcagtgtgaggctggggtttacttactccgccggcagcatccaggtcttgggaaagatcttgtagtcctgtggaaagatctttagcattcgatttagattccgcgagagcagatccttgcgacagatctcgatcatgcccggaaagtgattgatctgctggaagcgcttcatgttcttgaacagctctacgccgggaaacgaatccgaccagaggatgttccacatcttggactccttaaccaacttgtagcccagcgtcttggagatcttcccaatcatggcgtagcgcgagttggacacgcagatggtactcttggtttcgctgggggattatgttagatgcgttatccaataaggatccaaagctaaggaagatcacctggctggccgctcctcgtcgacgttcatgggaggattgagcacccgagtggggcattccactcggtaggtcttgttgttcagttgaatgaatccctgcagcttggcttcctcagcaggcattgggctgttttcaccagaagatggtccgtaatatggggagttatcatccacttgcttgtcggcggctgtcctcctcttgaggcaccgggtcttcttcatccggcggcgtggggacatgggctgcagtggcggtgattgctccggactgaaccattcccggtccaagcacggctgctcattaagagccatgtccagggcgcgaacaacgtgggtcctcttttcgcgatccttccgtattttctccttggagaagtggcgcagctcctgaatcctcttgaaaaacttggaattttttaaattcattgtctcgtccgctggtcgtccttgattaaaaattgaaaatttttcacgtgctaaaagctatatctataaaattgattcgtgtcaatggttagagccggaattctgcgtcacgaataaaaacaatattattttgcgatgattgtgttgtgaaaatgaaaataattataaccgaaatgacgctaaaatcaaaacgtagctccactggccacgtcgcttgagtcgtttgagttttaaatcatcgatttggggcatatcataaatttagtttctccgaacatcaaacataccactaacaactaagtgtacaaaaatatttaataaacaatagggtaagcatttacaatttaagcataacaataagtctttagggaaattttcgttggaatgttaaagttaaaaatatatattgcgattgatcacaaaatgtggaaatggtttacaaatggtccttcgagcttttcaagttcgtcaataaaatggtaacataataaggcccatctagtcggtaacaaacggttcgaaacgcttgagcaccgcgttcatggatgggcgatcctgcggatccagggcagtacagtgcaagcccgcctcgatggcgcacatgcacatgtccagctccttgcccatcggtgctgctaagtgcttctctagcagctccatccggttttgccgccactgctgcttaacgtagtccagcaaattcttcttcgtctcgttttccggcacgcgatccgtcacctgacgacccgtgaacacctccaacagcacaatgccgaagctgtagacgtccacgcccgtgctgagttgtctgaagttgcggaactccggtggcaggtagatcttagtgccgaaaactttattcacttccaccacagcgtccaaggacttgggaccctcgcgcaccagaccgaagtctccgatttttggctgcagacattggtccagcaggatgttggccggcttaatatctccatgaatcagcggtgtgcctcgcgccgtg

SEQ ID NO: 12743 - DNA, 2163 bp, DROSOPHILA
atgaatttaaaaaattccaagtttttcaagaggattcaggagctgcgccacttctccaaggagaaaatacggaaggatcgcgaaaagaggacccacgttgttcgcgccctggacatggctcttaatgagcagccgtgcttggaccgggaatggttcagtccggagcaatcaccgccactgcagcccatgtccccacgccgccggatgaagaagacccggtgcctcaagaggaggacagccgccgacaagcaagtggatgataactccccatattacggaccatcttctggtgaaaacagcccaatgcctgctgaggaagccaagctgcagggattcattcaactgaacaacaagacctaccgagtggaatgccccactcgggtgctcaatcctcccatgaacgtcgacgaggagcggccagccagcgaaaccaagagtaccatctgcgtgtccaactcgcgctacgccatgattgggaagatctccaagacgctgggctacaagttggttaaggagtccaagatgtggaacatcctctggtcggattcgtttcccggcgtagagctgttcaagaacatgaagcgcttccagcagatcaatcactttccgggcatgatcgagatctgtcgcaaggatctgctctcgcggaatctaaatcgaatgctaaagatctttccacaggactacaagatctttcccaagacctggatgctgccggcggactatggagatgccatgaactacgcgctcaaccacaaacgcacgttcatcctgaaaccggattctggtgcccagggtcgtggcatctggctgacaaacgacctgaagaccataggtccacatgagcgcctcatctgccagacgtacatacacaggcccctgctcatcgatgggtacaagttcgatctgcgtgtgtacaccttgattacctccgtggatcccctgcgcatcttcgtgtacaacgagggattggccagatttgctacgaacaagtacgtggagcccacgcccggaaacgccaacgatctgtacatgcacctgaccaactactcggtgaacaagcggaactcgcactacgaactctgcgacaacgatgactgcggcagtaagaggaagctgagcgcaatcaacaactggatgcggcgacacaactacgatgtggaggagttctggagcaatgtggacgacgtgatcatcaagacggtgctgagtgcgtggccagtgttgaagcacaactaccatgcctgctttccgggtcacgacaagatccaggcctgtttcgagatcctcggcttcgacatcctggtggactggaagctaaagccgtacatcctcgaggtgaaccactcgcccagcttccataccaacgagcaggtggacagggaggtaaagcggccgctgatccgggacaccttgaacttggtcagcacggtgctggcggacaagaggcagattctcaaggaggatcgcaagcgggtcaagcagcggctgctcaagatcaggggagacccacccgtacaacgtccgcgtcttggtggcggcacctccaagcccaaaatcgatgcccagaagggcagtccggatgcccaacccgttgatgttgaacccgaagctgaggaccatggtccactggcccagcaaatcgcctgggaggagagtcatttgggcaatttcaggaagataatgccgccaccagacttgagcaagctggactactacactcgcttctatgcccagtcgcaccaggtgtccatctttgcggagacggcggccagtaaaaagcgagaggatctcgcgcgcaagatgcgcatccagctcgaggagaagaaggccaagcagcagcagatgctgaacgggaaggccaagcgggatgctaggaaacgacacaccgtattgctgccgcgggctgtgcgcgagaagaaccgtattaacttcttccggctgagggagaactggtcgccgggcttcatatcggacgcggaggagcgactgcgccacacctggctgcacatgcgggcggaggcgatacgaacgctcaagatcaccgagaatatctacagcaatctctacgaaactggactcctgaccaacacggacatggtcgtctatccgcatctctatcacaacttgcagcacggctacgacatcaaacgtactccatag

SEQ ID NO: 12744 - protein, 720 aa, DROSOPHILA
MNLKNSKFFKRIQELRHFSKEKIRKDREKRTHVVRALDMALNEQPCLDREWFSPEQSPPLQPMSPRRRMKKTRCLKRRTAADKQVDDNSPYYGPSSGENSPMPAEEAKLQGFIQLNNKTYRVECPTRVLNPPMNVDEERPASETKSTICVSNSRYAMIGKISKTLGYKLVKESKMWNILWSDSFPGVELFKNMKRFQQINHFPGMIEICRKDLLSRNLNRMLKIFPQDYKIFPKTWMLPADYGDAMNYALNHKRTFILKPDSGAQGRGIWLTNDLKTIGPHERLICQTYIHRPLLIDGYKFDLRVYTLITSVDPLRIFVYNEGLARFATNKYVEPTPGNANDLYMHLTNYSVNKRNSHYELCDNDDCGSKRKLSAINNWMRRHNYDVEEFWSNVDDVIIKTVLSAWPVLKHNYHACFPGHDKIQACFEILGFDILVDWKLKPYILEVNHSPSFHTNEQVDREVKRPLIRDTLNLVSTVLADKRQILKEDRKRVKQRLLKIRGDPPVQRPRLGGGTSKPKIDAQKGSPDAQPVDVEPEAEDHGPLAQQIAWEESHLGNFRKIMPPPDLSKLDYYTRFYAQSHQVSIFAETAASKKREDLARKMRIQLEEKKAKQQQMLNGKAKRDARKRHTVLLPRAVREKNRINFFRLRENWSPGFISDAEERLRHTWLHMRAEAIRTLKITENIYSNLYETGLLTNTDMVVYPHLYHNLQHGYDIKRTP

SEQ ID NO: 12745 - DNA, 2959 bp, DROSOPHILA
gggaagcgaaatcccaataacaaggtcaccaaatattcaaaaatctacgaacctagccaactatataaatagtaaactttgagataattaataatagacatacaaactaatgttgtttatttgtattttgaaaaatatattacgtaaatttctagttattgacacatatttttactttcaaataggttttagttgaatatcaatctattttcattctccctaaatatattattataaacaattatgttcttcagtgtttacaaatttctatattgcaaatatgtatctttttcttttgttactaagtacagattgtttaggaatacaaaatgaatatgtcatcatcttcaagaacttgacattttaatagctacaacatcatcgtgcagcccccaccttttatcatttctataaacaataatggtcagcttaatagttacccttaaaatcaaatcatattaaactattatatgtatagtacaatacttatcttaatttattgtgcaacatttttaatataattttaagatggcacctctcttatataactgttattttagtgaatttattttaatgaatcattagctaaaatatatttttaatggtaaatgcatgctagtgtttaaaatgtattattacttttacttaagtatatttcactattttccaaacttgtgactattgcactaacctcaagtgtacgcattactactacatatttgccccctcatactcagcttacccacattctccatattcgccggtcatcatcattaggttgtgaggcgccgagagcatcagctcccaaatgcgaacgtcattagtggcgggaaaagagcagcaaggagcacccataacgctatcatcggcaatcatcattaggtggggcgaaatcgcccggagaagctgcgcaggattccattgagaagtgaggcagatgggtggcagtagcgccccatcaaggtcagctgatttatgcaggcacatttactttctacggctaatccgcacttaagctgaacggggatccgggtacatgctgctccccccacttgaccaccaggatgtagtcaccgggatcgcacacgcggtaggtgaccctgtgtatgccgcgtcccaggtgcctgaccaccacctcctcgcagggaccgcgttgccccagtacgcccaccaggagcatgttgctacccgcctggccgcagtccacggtgaactcgttgcgctccaccaagctgacatgggtgaggcccaggccacggctctgtactcggctggcatccgagtccgagatgggcactaaagcacacaagatgccaattgattatcacagctttcgtgcacttttttttgacatatcctacctgaagaactggcgggcttgccatcgatggactcggtagctcctgcgatggccacgatgatgaaaggagagcgaggcagggtcacggaattgcacttgatgtgcaccttgtagagacccgctccggcgtccagctggcaatcgatctgaaagcgctccggatccaactgctgttgccgaacgggctgaatgggctgaccactgggaccttcgacgcgcacctcgaagtttcccttgaccccgttccgcttgatgatgaatcccagcgggctgttcactcgcaccgcgccgctgggaaagtggagcagctgcaccttgccggcgtcggtcagctcgggtgccacatagacgcgcggcgattccgagggataggcatctaaagagttggggggcgcgagattcgtagtgtataaatagccggttcgatgtttacttcctcatcgacgctactcacccgcatcgggcgttcgctggtagcgtccaaaaataccgccctcctccggactattgccctccaggccactcccactcgaactgcaggcggaggcggaggaggcggcctgcgtgttcagacgcatctcctgtgacactttgaacatgccgctgatattttctccaattcgaatatcaatcgatttttttaaaagattccaaatagtttcccccaatttaattggcgactgcccggggcgtgctccttcgaccgactgaactcgctgctctccatctcaatggaatcggcgaactgctctcggaatgccagattctcgatctccgcgatggcggagctctcgccatccgattggggcaaatgtttacgatgcttgtgtgccgggcagccagccaaatatacacgatatagatgcaagtccgccagatgcgattccaatccaagcaggagagtatccaaattgttatgaatcgagtaaattttaatgtgaatcttaaattaaaggtataccaactaaaaattccataaaatgtgttaatcgctgaatatttaaacaaatatttattttaaagattcgaaagaattttattacattttttgtgacgagcagcaatttaaatttaaataacgaatttgaataacacatcgtggatgtgtgtaagtagtctgtgtggctggagttgggcgaaatgactgactatggagtacgtttgatgtcgtagccgtgctgcaagttgtgatagagatgcggatagacgaccatgtccgtgttggtcaggagtccagtttcgtagagattgctgtagatctgtggacgaatatctcctttaaatataaatgtatctttttttttggaagtgaaccgacttacattctcggtgatcttgagcgttcgtatcgcctccgcccgcatgtgcagccaggtgtggcgcagtcgctcctccgcgtccgatatgaagcccggcgaccagttctccctcagccggaagaagttaatacggttcttctcgcgcacagcccgcggcagcaatacggtgtgtcgtttcctagcatcccgcttggccttcccgttcagcatctgctgctgcttggccttcttctcctcgagctggatgcgcatcttgcgcgcgagatcctctcgcttttta

SEQ ID NO: 12746 - DNA, 816 bp, DROSOPHILA
atgttcaaagtgtcacaggagatgcgtctgaacacgcaggccgcctcctccgcctccgcctgcagttcgagtgggagtggcctggagggcaatagtccggaggagggcggtatttttggacgctaccagcgaacgcccgatgcggatgcctatccctcggaatcgccgcgcgtctatgtggcacccgagctgaccgacgccggcaaggtgcagctgctccactttcccagcggcgcggtgcgagtgaacagcccgctgggattcatcatcaagcggaacggggtcaagggaaacttcgaggtgcgcgtcgaaggtcccagtggtcagcccattcagcccgttcggcaacagcagttggatccggagcgctttcagatcgattgccagctggacgccggagcgggtctctacaaggtgcacatcaagtgcaattccgtgaccctgcctcgctctcctttcatcatcgtggccatcgcaggagctaccgagtccatcgatggcaagcccgccagttcttcagtgcccatctcggactcggatgccagccgagtacagagccgtggcctgggcctcacccatgtcagcttggtggagcgcaacgagttcaccgtggactgcggccaggcgggtagcaacatgctcctggtgggcgtactggggcaacgcggtccctgcgaggaggtggtggtcaggcacctgggacgcggcatacacagggtcacctaccgcgtgtgcgatcccggtgactacatcctggtggtcaagtggggggagcagcatgtacccggatccccgttcagcttaagtgcggattag

SEQ ID NO: 12747 - protein, 271 aa, DROSOPHILA
MFKVSQEMRLNTQAASSASACSSSGSGLEGNSPEEGGIFGRYQRTPDADAYPSESPRVYVAPELTDAGKVQLLHFPSGAVRVNSPLGFIIKRNGVKGNFEVRVEGPSGQPIQPVRQQQLDPERFQIDCQLDAGAGLYKVHIKCNSVTLPRSPFIIVAIAGATESIDGKPASSSVPISDSDASRVQSRGLGLTHVSLVERNEFTVDCGQAGSNMLLVGVLGQRGPCEEVVVRHLGRGIHRVTYRVCDPGDYILVVKWGEQHVPGSPFSLSAD

SEQ ID NO: 12748 - DNA, 3986 bp, DROSOPHILA
tgacttatttgcgatcaaaatacaattaaaaaacaaactgaccctttgaattggggctaatcatgtgcaagtgggcagatattccgccagcactgtgcccaaggaccgtgaccttttttggatctcctccgaatgtagctatgtgtttttgtatccactgcagagccaatcgctgatccttgaaaccgaaattccctggcatgtgctcatcgccagtgcttagaaaacctgcaacatttgatctccacgtgagtggtgtttttttttttgataatccctacaacttaccgaagggaccaaggcgatagttcattgttaccatgaccaccttgtttgtatccatcagatactctggtccactagccatcggatgggcagatccgctaaagaaaccgcctccatgtatataaaccatcacgggcaacttatcttcagcgcgattctataaaaccaaacccatcaggactatcttagaatgcttactacaaatcttgataccttcggtctgtagacgttcaggtagaggcagtcctccactcccatcaaaccccattcttttgcaaagtaacttctctgaatgcagctgtccttcgccgctccagcatcgagtactccctcccagggttcattcggcacagggttctgaaagcattcaatatacgtaatccttctgaaagtatgagagcaaagaacaatccacctttagacgcagcggtccaactggcggctgggcaaagggaatgcccatgaaggcttcgaactctccgctctgatatcctggcattagagtgcctcgcatacagcccatatcctccaggcacacatccaaggaatctccgacagcaacagctacaaacaatagtactccaaatccggcgaacaacattttgttgtgatatccattagtaaaacgctagctcacttttatacttcatctttcaacagagagcggtatatttgcaaattcaggtaatcatgggcataaataaaaaccacaattatcaaatcctaaaaggttttatttctgtcaagtagaaaagcgagggtaagctgccagccaacgctaatcgtatatgatacacagatgaattgacgtctacatagcctaaacacgcattcaaaccgaacttacgactaagaggtataattacaatgtctatacaacatggcgatttaactaacaatgtagaaattaaactaaattgcaggcctaggaaccggaactatgaatagaacaactaagtgactaccggtcaaatgggtgataaactgcggcgctgggcggcactcagttgcggatgccacatatctaggatgagcacaaggcgtgactggcttccgttgtgccacacctcgtgttcgaagctatcatcaaatatgaacagttctccctcacgccaggttctaaagcaaatcaggttagtcaatgaaaatggaaaggttttgtcgtttttcctcacctttcctgctccgccacgcggagtgatgctttttccggctccggagcagctagcgtgaggtgggccctcagtcggcaattggtgggtccacaatgcggccacacatgcgtcttggcctgcataacactaaacttcacttggccacgtcgacagccggcggactcgggaaattcctccagcaggctacaggtgattggggccctgcggcagttgtccttcacccgacgaccctgggcatatagctcatactgttgccacactcctttgtcgcgcagcagttccgcttcatcctcgaagaatccacttcttcccagcagtgctagtccttcatcgcgaatggcacgccaattgagcgtcagcttctccagctgcctttcatagcccgtttccttgggctgccaaaatggctgtgctctcaacctgggctcattgtacagcgatctctgatagaggctggcaaagaatcctttggcaacacctttaccgtacacctcaagagcttctgatttcatggacaggcgctgcatggtctcgcccagcgacaaatagaagaaagcctcttgcgtgccctcctctccagactccacggcatattttagataaggcagcgccttggcgtaatcagcatggaactgtctgagtgctagtccataatgaagttgagccactgcattgttgggccaaagtttcagggtctccacagccaccttttcaacctgctgaagactgggagacaatcataaagtatttgtagctcaaagtagcctatcttacctacttgtttaccataagataggtgagtgatagttggttacgaagccgtggatcctcaggcaaacgattgatgagcagctcatggatggtagttgcctgtcggtggtgacctagaattcaataggcaatgtagaaagtgaaacagattaacagattatgttaacttacccaaaaatctcaaattctcgatgcagctttcgccggcggtttgaaattcctgattgctggctacaagctcgccaaaggccaaatatcttttgtaagcatcgatggcttcccacaggcgctgattgctgcgctcctttttggccagtagttccagaagtcgagctcttcccaaatgggccgatggctcgtgggcaaagttggtggtgagcgtgttaaaggaacgcagggcttgggcatagttctttggggtggatattagttcgcgattcgccagccaaaacacaaaaaaaaaatggttagacaaaatacgaaagcatgcaattagtataaaatcattctctcaagaattgaaacgctgttgaaaggagttccaaggatgagcccgcgatcaaagtttactccaagtgggtgtgtagttcttggagtaactggtcgtgggttcatcccaatcatatatgggtctcttgaaatgagcgtttctataaatacatgaataaggttaaatcctatcatttgattaattatccttttttgttcttacatgactaagctgttatatgatctaatgaacttgacaagcaaacataaactaaagctttgaaatgagattgtgttttttgtttttttgttgtgatgttctttagtgattgttgagctagagatatatcgaagatatatagttcacgggttaatccaggtgaaggagacaccttttggttgcgacatacctccctaatcatctcctcgtttgccttgcgcaactcttgctcgaaaggatcctctttctctgcgggagcaggtgcagcttctttcggctttatttctatttagagattaagaatctgaattagaacaaattgttttcaacaaaaaaaatgaagtgaaattttgaacggttacggcctagatagctccaccttgtgtgaggtgtcagtttgtatatcctatggctaacacttacgatctgttatgtgtaaagcgatcggtttttggtcgtgtgtcttaaagtagtgttgggcctatgattacgatagcttatgtgatcgatcgaatatatgttggatggagaatggagtcgggtggtcatcgacagacgtggtgatttgtgcgtttagtaattacgtgtccagctggggtcgtcagagtccggatcgctctcaaactccttgacgggcagacgaccgtatttcgcttccagccggttcatcagatcggcgtcgtccacgtcggagatttcgtcctcctcgtcggtgatctcctcatcgctaactccgtcatgctcgtaatcctcgatagcaccatcttcgtattccacgtagatatcgctgtgacctactggcttttccggctccttttctttctgttcgggtttggcatccttcgtaggctcctgggcgtatttgtacatggcgctcagttgctcaaatgtctcgggcacataactggccatggaggccacgttgtcgtcgttatcgtgacgtacttcctcctcctcctcctcaatatcactgatttccacctcgatttcctcttcgatttcgatttcttcctcggaatattcttttaagacaatgggatacgact

SEQ ID NO: 12749 - DNA, 1662 bp, DROSOPHILA
gtttgcttgtcaagttcattagatcatataacagcttagtcatgtaagaacaaaaaaggataattaatcaaatgataggatttaaccttattcatgtatttatagaaacgctcatttcaagagacccatatatgattgggatgaacccacgaccagttactccaagaactacacacccacttggaaactatgcccaagccctgcgttcctttaacacgctcaccaccaactttgcccacgagccatcggcccatttgggaagagctcgacttctggaactactggccaaaaaggagcgcagcaatcagcgcctgtgggaagccatcgatgcttacaaaagatatttggcctttggcgagcttgtagccagcaatcaggaatttcaaaccgccggcgaaagctgcatcgagaatttgagatttttgggtcaccaccgacaggcaactaccatccatgagctgctcatcaatcgtttgcctgaggatccacggcttcgtaaccaactatcactcacctatcttatggtaaacaatcttcagcaggttgaaaaggtggctgtggagaccctgaaactttggcccaacaatgcagtggctcaacttcattatggactagcactcagacagttccatgctgattacgccaaggcgctgccttatctaaaatatgccgtggagtctggagaggagggcacgcaagaggctttcttctatttgtcgctgggcgagaccatgcagcgcctgtccatgaaatcagaagctcttgaggtgtacggtaaaggtgttgccaaaggattctttgccagcctctatcagagatcgctgtacaatgagcccaggttgagagcacagccattttggcagcccaaggaaacgggctatgaaaggcagctggagaagctgacgctcaattggcgtgccattcgcgatgaaggactagcactgctgggaagaagtggattcttcgaggatgaagcggaactgctgcgcgacaaaggagtgtggcaacagtatgagctatatgcccagggtcgtcgggtgaaggacaactgccgcagggccccaatcacctgtagcctgctggaggaatttcccgagtccgccggctgtcgacgtggccaagtgaagtttagtgttatgcaggccaagacgcatgtgtggccgcattgtggacccaccaattgccgactgagggcccacctcacgctagctgctccggagccggaaaaagcatcactccgcgtggcggagcaggaaagaacctggcgtgagggagaactgttcatatttgatgatagcttcgaacacgaggtgtggcacaacggaagccagtcacgccttgtgctcatcctagatatgtggcatccgcaactgagtgccgcccagcgccgcagtttatcacccatttgaccggtagtcacttagttgttctattcatagttccggttcctaggcctgcaatttagtttaatttctacattgttagttaaatcgccatgttgtatagacattgtaattatacctcttagtcgtaagttcggtttgaatgcgtgtttaggctatgtagacgtcaattcatctgtgtatcatatacgattagcgttggctggcagcttaccctcgcttttctacttgacagaaataaaaccttttaggatttgat

SEQ ID NO: 12750 - protein, 422 aa, DROSOPHILA
MNPRPVTPRTTHPLGNYAQALRSFNTLTTNFAHEPSAHLGRARLLELLAKKERSNQRLWEAIDAYKRYLAFGELVASNQEFQTAGESCIENLRFLGHHRQATTIHELLINRLPEDPRLRNQLSLTYLMVNNLQQVEKVAVETLKLWPNNAVAQLHYGLALRQFHADYAKALPYLKYAVESGEEGTQEAFFYLSLGETMQRLSMKSEALEVYGKGVAKGFFASLYQRSLYNEPRLRAQPFWQPKETGYERQLEKLTLNWRAIRDEGLALLGRSGFFEDEAELLRDKGVWQQYELYAQGRRVKDNCRRAPITCSLLEEFPESAGCRRGQVKFSVMQAKTHVWPHCGPTNCRLRAHLTLAAPEPEKASLRVAEQERTWREGELFIFDDSFEHEVWHNGSQSRLVLILDMWHPQLSAAQRRSLSPI

SEQ ID NO: 12751 - DNA, 3722 bp, DROSOPHILA
agagacattagagagtgtctttcgggtaactttgtccgtctttttccgcttttccgcttttctcagcgctaaaacaagtggaaagtcaagcaagttggacacgcgctaagttttacaatttcccgctgaaggtcttgtcgcccccttttccggccccgtccacgccccccgccctcgttcaacactcctgtcgacctgccaaacaactaacgcacatttccgtttccgcttatgccacaaaatggccaaaagtggcctggtgattagttacgatttttttctgtttgtttcctgccgctctaacgcttaatttctctccttgttgccgcgctggctctggtttttattgctttcaatgcctttttttttgcttcttgattgcagacagcatctacgaggcgaaaacaaacagaacggccgccgcgagttttttggccaacggaagggactcgagcaaccgacgcaacagacgactcagggtggactgaaaatcactttctcttctcccgcagcagcagcgcaatttctgcagccagcggagagaaagcctttcgccgtgaagcagtgcgcactgcttgctgcacggtgggcgccagagatttgaaattcttatctggattttcagatttagtacatgaagcaataattgaaattagtttcaaactgatataataaataatgtttgaatatatacatacaatttcataccttctattttttagccttaatttttggcccagggaacttggcatgcttctattataattaaagagttttactgcaatggatatattctaaactataatggttatattaaacaaataacaaagctagcaatttcaaaaacaaaacacttaacagacattttcgttaaatataaatatttgcttggctggaactttcgttaaaactgataggttcgtgcattcgctcagcggtggtaagaacactcgctaaacgtgtgagcagctctgtttgtgttccatctctagttcaacagctgttcaaatcgagtaaatcgtaattgctccttgaattttttttatttttgtgggcaactcctgcattggagtcggcggttgcgtaataacgcgcctcttcctggtttctggctgccacttggagttacagtatggcgttggcgctgcgcgttgcccgatgcgccgcgattccggccaactgttggccccgcgatcgccggcgactgttacacctgtgcagcaggtgagtagttgaccccaattatcagtcagcattaaaattcaattacccagcgccagcgataagaggccaacagctttctgcagcaggaactacgcaacgaagcccgaagcagcggttccaccacaaatcaagcgaaatgtggccgccgagataaccagcgtgggtaaggtcatctacgaaacgggctgggatgccaacaagcccattgaaaagccaaaggtccggcccagcagctcgtcgtccacacagccgacgccgtctaagaaacccgaagacgagaagcgcaaggagctggacactgtgaaatcgaaacgggatcagatgcgagacaatatgcaggactacatattcacccggtacttcaactatgtgaagaactacgacaaagtgctcgaaaagaacttccccaaggccatgcagttgtacagggtgttcttcgatggcgtcaaggacttttttggcgacatgaaacgtttcctcaagattgcccgcattgccaatgattcgcctcaaggcataagagctttgaatcgccaggagctggagctgtacatgcagatgccaagggacatgatgaaggtggcaccagctctgatcggctgctccctgcccatggtgggctatgcgttctttcccctcgtgtaagatatgccctactaaacactcttgcaaaatttggtataccgatttgttctttcgcagcttttattacccccgctcctttctcactgcccatttctggactccgcagcagcgctccgagttccagagctactacatgaagcggcgattatgcaataacaaggacgtctttcgctgcctgcaggacaagctcaaagcgacggcatcgcatcccaagcactcggcttttgctgacatcctgggccagctgggcagcggcacacaccccacgcctgagatgctcatcgatgtcaaagacatattcgccgaaggaccatattccctgctgggaatgtcgcggaagcacgttgtacgtttaatctgacacattttatgcagcctaaagcatatcactaatgcatacgttccagagaaacctagtcaaccttcatggactgcccagtagcatcttcaagcgacatcggctccacgagcacgccttcctggtgcactacatggaccaggccataacccgcgagggtggcgttcacaacctgacaccggatgctttgcgctactcctgctatctgcgcggattgaatcccgacagcctgagcagcgaggccatgatcgagtggctgcggaagtgggtcaaggtgtccacgtcgatacaaggcgaacatatcacgctgttcctgcacttgcccatcctgctgggctacaaccatcccaacaactggaagaccatctacggcaagtgccccacttgagcggggtcctctggtcgttagctatttggtagactgtgctttaaagattggactgttaagatcattttgtttcttgagagcaaataaaaccgttaaaccaaaagaaagctggcagtgtgcttgtgtttttcctaaaaataacactttcttttattttctccatggtggtggatgttcatcaagcagttactttcgttaaaggtagtattttttacttcttggccgcggccttcttgccacccttggccttctcggcacgcagacgctcgcgacgatccttcttgaggacgcggggagtgccgtcagccttggtgcgcttcttcagtgtgttgaaggcgatggtcagcagcttgttgcgctgacgcttggcataacgcagcttgaagcggtcaaagtcgttcaacgaggagcgctgcaaaagaagacaaattctcattagtacttgatttattctgaatgtttatgaagacgcctagctatgattgtaatcagataaactagaattagcttcatatatgtgtcagccggcaattcctatcaagaactttcaattatcatcatgtgcagttcaaggaggtaatcaactaggcagagaagaggtataacattttcccctctacataggtaaactttcctacagctacgaatcctcctcgtgctcagtgtacataccttgcagatgttctgtgccttgacggaccaggggctgaccttccactgggccttcaggtcgctctctgtccaggccttgcgcacgatgcgcgtgggcgcggtgtaggggaacttgatgcggtacttggtcagatgcagattgttcaatctgtattcctgacggggcacgccagtcagaggaccatctaccagaacctgaaaagtgaaaagccattaattagtttggatcactttaaccatgtatggccatgaagggaggagtacagcaacaaatgctggttttgcttgcttgctttcagagggttaaactagcttcatttatgtgtcagttggcacttcctatcaagaagacaaattatcatcatgtgcaagagctcgtcacttggcaatttgttgctgttactccactatggaatgatgcacttactctgtttt

SEQ ID NO: 12752 - DNA, 1550 bp, DROSOPHILA
ctgttcaaatcgagtaaatcgtaattgctccttgaattttttttatttttgtgggcaactcctgcattggagtcggcggttgcgtaataacgcgcctcttcctggtttctggctgccacttggagttacagtatggcgttggcgctgcgcgttgcccgatgcgccgcgattccggccaactgttggccccgcgatcgccggcgactgttacacctgtgcagcagcgccagcgataagaggccaacagctttctgcagcaggaactacgcaacgaagcccgaagcagcggttccaccacaaatcaagcgaaatgtggccgccgagataaccagcgtgggtaaggtcatctacgaaacgggctgggatgccaacaagcccattgaaaagccaaaggtccggcccagcagctcgtcgtccacacagccgacgccgtctaagaaacccgaagacgagaagcgcaaggagctggacactgtgaaatcgaaacgggatcagatgcgagacaatatgcaggactacatattcacccggtacttcaactatgtgaagaactacgacaaagtgctcgaaaagaacttccccaaggccatgcagttgtacagggtgttcttcgatggcgtcaaggacttttttggcgacatgaaacgtttcctcaagattgcccgcattgccaatgattcgcctcaaggcataagagctttgaatcgccaggagctggagctgtacatgcagatgccaagggacatgatgaaggtggcaccagctctgatcggctgctccctgcccatggtgggctatgcgttctttcccctcgtcttttattacccccgctcctttctcactgcccatttctggactccgcagcagcgctccgagttccagagctactacatgaagcggcgattatgcaataacaaggacgtctttcgctgcctgcaggacaagctcaaagcgacggcatcgcatcccaagcactcggcttttgctgacatcctgggccagctgggcagcggcacacaccccacgcctgagatgctcatcgatgtcaaagacatattcgccgaaggaccatattccctgctgggaatgtcgcggaagcacgttagaaacctagtcaaccttcatggactgcccagtagcatcttcaagcgacatcggctccacgagcacgccttcctggtgcactacatggaccaggccataacccgcgagggtggcgttcacaacctgacaccggatgctttgcgctactcctgctatctgcgcggattgaatcccgacagcctgagcagcgaggccatgatcgagtggctgcggaagtgggtcaaggtgtccacgtcgatacaaggcgaacatatcacgctgttcctgcacttgcccatcctgctgggctacaaccatcccaacaactggaagaccatctacggcaagtgccccacttgagcggggtcctctggtcgttagctatttggtagactgtgctttaaagattggactgttaagatcattttgtttcttgagagcaaataaaaccgttaaaccaaaagaaa

SEQ ID NO: 12753 - protein, 436 aa, DROSOPHILA
MALALRVARCAAIPANCWPRDRRRLLHLCSSASDKRPTAFCSRNYATKPEAAVPPQIKRNVAAEITSVGKVIYETGWDANKPIEKPKVRPSSSSSTQPTPSKKPEDEKRKELDTVKSKRDQMRDNMQDYIFTRYFNYVKNYDKVLEKNFPKAMQLYRVFFDGVKDFFGDMKRFLKIARIANDSPQGIRALNRQELELYMQMPRDMMKVAPALIGCSLPMVGYAFFPLVFYYPRSFLTAHFWTPQQRSEFQSYYMKRRLCNNKDVFRCLQDKLKATASHPKHSAFADILGQLGSGTHPTPEMLIDVKDIFAEGPYSLLGMSRKHVRNLVNLHGLPSSIFKRHRLHEHAFLVHYMDQAITREGGVHNLTPDALRYSCYLRGLNPDSLSSEAMIEWLRKWVKVSTSIQGEHITLFLHLPILLGYNHPNNWKTIYGKCPT

SEQ ID NO: 12754 - DNA, 13689 bp, DROSOPHILA
tggaaaacggcttgtattgaagagatacccatttcctaagcacttacctatttaaattaatgttgctactcaaattttaaaactgcttttgtttgtacttttcggaattcagataactaatttttatacttcttcatgacaaaatatcactaaaattttatagatcattgctatctgcgcgggcaggtttgtgttcttttccataattttttgtgagtattgctgcaagatgggtggtccaaactttttatttatttttcccatctctggagcaaatgcgttttgtttataaaacaaaaaaaaagttgcatatataagtacattaccatttgcgaacattgtctgattgaataattgatttttttgaatggaatttgaaaaaagtgtgaggaaaatatgtatgtaccttaagaatgtgttcgtttatcataaaacaaataaataattaacatattattaaatactatttcataggtaatacatatgcacatatacagaaatatccgctaattttgttaaggaatttaagatttctggttaattaaacaagtattatacattattctgaacttgtagctttaaggaaaccccagcaatttgataagctaatgttctatattaattataaataaatatccttattataagtgctagcttttcctaataataatttgtataaaacccatttttatgtatgcatatgtttgattgtatatatatgtggagaacatcaaatacgaccctcgttttcttgttttcaggccggtctcttggttttaaaaagagaaccggagcgagaactttatctttatattgtgtgatattgctgccttctcattaattctaacccactgataaaacatgaagaaagaaaaccaagggctgattgtgcagcgagcgattgattgaagtccgccgtcgacgtcggcgctccgacgagggatcatagagggaggttctccggttcgagttctggatcgttggaatcagtcgttgggaggcacttttggcgtgaagatcgcggcgaggaagtgctcggaatctgaaattttaagtcatattgtgtggtctacgcttgtggtaaagtttcgtttgattatgtacatggtgttgaaatcaaatacaaatattgtataattaaagatagccaagaaatttagattttcaaaaaacactagataaatacagctgaaactcaattgatgattatgcgccataaatatttttgaatgcaaacaataagcaagacaaagggcataaaaaacaagggagtaaaagtcacataattgattcatttatgcaaactctgcgaaattaatctatgaatattcaccacgttaagccatttaaaaacaacaaaaactccaaccgattggccatttaacattttgtttatttgatttaatcactttgttatgcttgcttatttgttgtaaaatcagcctgctgaatgaaaatcactagatattaaaaaaaaagagcgtgcagcgatgtctttgtgtttttgagaaccaccagctgattacttatttttaactcagctttcttttatgtccaaattttagttctctttagttgtgtctcttaaaaaattgaatgtgtcggagagtgtgttatcacacgtgatatatgtacgtacgtattcacaatattgtgctcaacgaaccaaagacatttttctttttgtggtcttttacggctttctttaaaccatttttagtcatttatattttttaaatctcttttgttaactaacatttgttactaacactccacactaatgaaaaaacttttttttgtgttataatatacaattagtttatgtgaagcttacgtagtaattagtaaatgtgtttatttttttccagtgaggtttgtttttcggctatgccgccgatgattttggcaaaatgtttaccgctaaggcgcattatttattactgtttttaatcgttttcagtgttatttaattacgcaacattgtataacaatgcatttgatccataaatagcaaacattaaattatttatgcagagtctgacgaatcccgtaccataaagattatacgtgtatagattgctcatttccaagtcattcataagtctgattaattgcttaacaattttcccttatcggtcagaagttgtgatccaatctgaagtagtttgaaccgaatggaagtgaatggttttataatattcacttccttgccctgaccgataaatttctagattaataggggacttttttgaaactttattgtagtgacttctgttggtattaagaatggttcagttgcaaaaaataataaatcactcatattttggctctgttgatacgaaacgcactacattcattaaaaatattgtgtcccgagcaaaatgaagtccagtgagacgcataaatgcatttttccgattgaaaatccgtttaaatttaccgatgagtgggcgttgttgtggctgaataggaatggactttaattctttcatcaaagagattagtttcaaagcgattgatatgcgcatcaaaggcggaatcctgtaaatagaaaatttttattcaatactgaaatcgaattttgatgtaaatgaggtacgatttaattacgttgtctgactaatgaatgaaaagtagtgtatgcattttataaacacaaaatataatagtactcactctttcgaaactggtacgatactcggtctcggctttcagaaaggcagccacacttctattgacttccgacttaattttcggactaaaatgagaatcaatttcctcactgattgttgtccgtggacgccttgacctgcgctcttttgattgatttctcaaatctctatttccctcctcacttcgattcttttctttgcgtatctctttgcgctcgtggtcgatgcgcaacttgattgcttctatcatggtgacaggatccaccggatatggtttctccggaatgggtcctgcaaaagcaatctccctggagtactcgttgaaattctcacttccatcgagactggcttgtataacgccaggacaatagggatcatttacaaaggtttcgtgatattcgttctgaatgcgctcaaccaaacgatcctcagcttttagagagatttaataataataaattataattaattaaattaatttaattatacacaacctacgtgtttgaacgggcactcgcattgaacgtcctcgcaaggaagaatttcgcttagttttctccagcgaagttggctatcaaaacaaggattacttcacatggctaccacgtaaattatgaacttacagtcgagcacgacctccctgacattacttgagacatttccaaaagtctttgatttccggaggcagacgtgtttgcacaacaggcatagttttgactatctttcatacttctgtcacaggcagtagagccacgactacagcaactatattgactttcggggggatccgagtaatattttgtattcttactcatagattgctcacaattggatatctgattcatagagacatcttggcaaatatcttgcgactgcttatattgtgcattaataaagaaaggggtttaaaattatgattttgatctattgtttttcatgaggcttttaaacaccacattcaaaaaccccaacttttgaataaagttcgcaactgctggcataattaaacttacgtttctgagactctggttcgcctgtggtttacatctagcgtttcgcaaagtctctggtggctgaagataacttgtttcattagttttggtttcgtactggattttaaagagaaatgaacaaatttgtaacaatgttatattagaatactgatattaaatatcatgaatttggcaacattggatatggtaacataccttcgtttgattacgcaccatttctggtgtttgatcgcactcaagaattgatcgtgacgcctttttgaaagtatacaaaaatatttaaaattagtaaatacaaataatttttttacatacactttgttgctggcgagagttgcatttctgacaaattgagtttggttgcaggcgggattgctggtgacgatcatcttgatttattctcgtgctattgagatcaggtgcctgtttgaagtgtttaaaaattgcatagacttagagatttcggatttcgataacttacaaattcaatgggatcttcatcttccaaccaagataaattcgcttgattctgctgtctagcttgctgttgctgatattgctgctgttgaattttttgcaacagcaattggcgtctttgaaactcgccatagttcatgccaacttgagagctattattccaatcgattgaggtgttatttctgcagccagtagccgtatcatgattactgctctgatcggtgggacaacggtttccgctcggtacttttaactcgcactttcggtataagtatttaaatagcaatttacgaataaatttatttacttttaaacataccggtgtttgcggtttgatccttttgtccgagtgctgaaatttcataattttcacaatggcttaagtcttttagtttagtcacttacgttgtgggtggaattatgatgactagtcttattatttctgtaattttgcctggggaagctatgggatcgggaatgttgagatacgttgactagaggttgaaagcgaggtaaagaatttttcggaatctgaaggggtatgctattattcgggcactccggcatgttgcaacattgctaaaatttaaatattcgcgtaacaagagttttgaattacgaaatcatacgcacatattcatcgtccttgttataagagggcgggagctataatttaacatttaaaaaattttaattttaaatttcgaaagcatatgttttttttttatgaatcattaccacatcctgtgtcaccgacgaatgtttctgtctgctgccatcgagggtatgttggtataggggttcttgaaatggttcaacagggttgcgtggcattgagaacctactaacggtaggacagggatcgaagctgtcgtcgtcgctaatgggatccgttccttgagagaacctctggcagggatttcgggttgaacttgcttcgttcagatccttctggtttcccaaaaaccgattgaatgccaaatacagctcatcgggcagcagaacagaattcctaacaatccatccatccattcataaacatacacgctttttagattataatctgttaattatcagacgaagactccgatacttacaaacaatctaaaaaatcggagtacagttttgatgatttaaaatcaattcgatgaccaaaaatatgtgtgtaactgttggtatatttataataacttcatttggttccagaagtgttgcaaaatagtatttgcaataactttttaaattctgaatttacatggtatgtacggttacaaaagtttgttttggaaatttgttgaaaattgttgataaggaagggtgatgcttgactacgatttgaagtgtttcctaaagcatatacttttgctttccttgttttttcaactgtcacaagtaaatatcaacaaaatgccagttaaaatgtcttactttgctctaatttaaaaacatatttattattgaatattgcttaaagaaataacacaatgagttcatgttcactttaaatactcaggggcagcacacgagatttacctaatttgctgttattcgccccctacatcagcaatccattatccttttggcctaatccctcatcgctgtctacggtgcccgcttccatttgttcattaggcaaatgcagcaatttcagctcgacaaacgccaaatcgtttgtctcagccgtatccgcatccgcacccctatccgcttctacatccgcatccgtatttgtcagttggggggatggacatccgccggcccgcttcaagtgggcgtccagttgtgcgagaaatgtgggcgtggcatgtgcgttacgcgtgaaattcaattcccgcaaactggccgcctgggtggctaggaagcgaaggagggaccgcacggcctgcggtcgctgtggcatccacttgacgctcccgtccgccacatcatagtgcaccgtcagctgcgagtgccaagcaaaggattgcagccggaatacctccttcacgtcgacgactggcaggcagtcatccagtcgacactgcaaacggagacccacaatccgacaattgcgacctcgaatttgctgcaggcacgcggacaaagttcctgtgccactgcaattcgccttgccatcattgtccaggtggccgtgctcggaatttcgacacagaaaagctgtcaatagacggagtcggggcaattgaaagatctgagaaacacaggcggtaatcatacaagctggtagtttcaggatctccagatttctgggatactggtacctctgttggctgcagttccaactagagcgcatttcaaattctcttaggtttttaaggttttcaaacatgaaatccacatcaaggggtgttaaaccctcgcactcgccaagcttaaggtccaccacattggggcacaggtaggggagtttctgtattaccaatgtattgcttttcgtgaaactgagtatctgcaaatggttgaggctttgtcgcatccgcttgagccacttccggcatccttcgcctgtacctggcaggttaattaacgctcttgttcgccagcctaagtgatccaatatttgagccagctcgtcgggctttagcaggtttaattgctgctcccggcgaaaatcaaatagcttggcgtatctgttggaccacaattgcagtatcaagctcgaaaatcgttcctcctgcacctccatcagtctcagttggtctcccagcgctagatgttcgcaaatcattagcagacagtcgtcgtccagctccattagccgccgattcctgggtggctctccgtggccaatggttatactcgtcttaaatcgcatcctactcgatctgttgcagctgagcaagcccgttcgactgagcaggaagcgcgtggcatgtgtctggccgatttctgagctatatatgtacgtccattgtctgaacccccgttaaatatgtctgaatcagggtcgcctgccgcggttgcatgtaatcgcagctggcagtgcgtgcaaccagcgcatgtgtccccgattatacagatctcgtggcacattggggcaagggatgctagaatgtggtaggggtgtacgtaacatatttgttatccaatggaaaatatatacgactttttactaccaccttttgagcgtcaattcaccaattagttaagtataagagattttatttatccaaaaaaaagccttttttcttgatttcttagaactacattttaatttgatgaagtacatacaaacatagattttttcaccaatgttgtccagtgtaagcttagctgacatactaactaatgattataaaatgaagtacaagaatatttaataataacaaataccttcaagcacactgtggccactgcacaattgtaaacaccacccccttttcccttcgctcctggtggtggtcgataagtacaacccctgacaaactttccacgggtgaagagagttctcagagcgatactctctctctctgattgtgtattatcgctgtataggcgaaaggcaaagaacatgagatagaaagacctcttcagcgaacaaaagggagttggtctatttttataaatctccctcacaactcgaactacacatgtggccaaggccaaggcgatatgatacacatagatgtttattgaagacggggagttcaaatttcaagtgggtctgaataacagacctggatagaaacaaatcacgattgttttaaaattcgataatgggactgtcgtaaataaagcactgttattactgacaacggataggacaatcattaaaccctttttagtcgattcccctgtataacgccccatgttttgttgctagtcaatgacgactatattcttctgtaaccagtttgtttgttgatagtcatcatcccaaatttgtagtatgttaccatttaagtttaaagcaatttataatcttaatcttgtcttccaatcattttgacctcgctgttgaaaatgaatcgcaatatcctttgcgattcgtcactaagtggagtgcagtaatcatgtaacaagattattatgtcatataaaatgttttggaaagcatattaggcattttcgggctcaaaattaaaaaaaaaaaaaatttgtttggatcttaaaattatttgatttttttaatcgctgcaatgggggatgtggagtttcagaatgtccaagagataaggggcactccacagaatgcaatgagaatgatccgcttggaactcgacgaggaggagaatcgccggcaaatgtcgtccagtaaatatggtggcgtctgcttccacgtggccatagccgtcatgctttgtgtaatggtgttggtgctaatttgttcggctccccttggagaaaacatgtccaatcttacgtccgaggagcggcacgctcgcctgaggcagatttacattgagaaagagcgccggcaaagacttggcagcaggatgggcttgagtccgctggaggaggaggccaatgatcggctcatggccattaggcaggtggatgaggagttttataatctctggaggaactaccactcccagccaccgccgtttctcaaacatctgaacatcatcgatacgaatctttatgcggcacttaagagcatgcccaagggcggactccttcacgtccacgattcgggaatgttgagaatggaaattctcatcgatttgatctaccgcgataacctgtgggtctgcgttaacttggaacaggacttcgaggacttccgattctccagatactttcctcacatcccgcccgctgaggactaccagtgcaattggatgctgatgagcaacttcttccagttggagtctcggttagaattcgagaacaggttgaggaaaactctcactgtccggccggaggggtataagagttcctccgagttggcgcgacacttaagacgccaccaacgcatcatccatggactgatcacattccgcccgatctggagtgaatttatcttcaccatgctgagcgatttctatgccgacggggtgcattatgtggagttgcgttcctcgctgccaaatgtaagtgcgcatttgagctgacaatatatattccaatctggaatatttacttccattatatacttcttgaaaagcagttggcaatcattccatttttaaattctcccttttcccctgcctttatctagatgtacgatctggatggaaataattttacgattttggaaacggcggaggccttagtttcagtatcgaatatttttaaaaatagcttcaaagatttcatcggaattaagctgatctatgctccttctaggaacttaaatgacagtcgaatggatgagtatttggaaaatgcacgtctgcttaaggtagtcaaagattttgtctttagccatttgaatccttatttaaacttcatcatcgacagttgcattttccgaatttctttgctggatttgatcttaacacctttggggacgagtgcaatttaccacttttagaaaatgttactcaactattaaggattggcaagaatattgacttctatttccatgcgggagagtcccgatgtccggatagttcccgcccagatgcgaatcttttagaggcattattgttgcaaagtaaacggatcggtaatgccgtgaatctaccctttcatccagagattatgaaggtcatgaaaaggcttagtatagccgtggagatctgtccgctgtccaaccattatctgcaatactttaacgattttcgtcaacatccggcggcgtatttgattgccgccggatttccaattgtaattggttcggactatccgtgtttctggaactccgcccctctgaccgacgacttttatgtggccttcgtgggcgtgattagtgggtggggcgatttgcgcctcctaaagcagtttgccctcaattcgtttctgtttagctccctcagcgaaacggagaagaatatggccgtatccaagtggcagtgcagctggaaccgatgggtcagaaatttagtcaatagtagtggatactaacaagtaattgtcaaataaaaaacaaaaattgtaaaaaggtgtttactaagacattttagtaatatttttctttatgtttatagacaatttgttcgcattgggattacctacatagtggaaaatcctctttaattcttggtataattaggcgaaatttaagtttaatattcgtttcgttaatatattcgtaaatacgtatttagcttagttctttatatgtatatgtagagcaattttttccgctttatcaatgtataactttataagaatgggttattttgccttcgagggcatggctttccggtttatcgagagtggccaataaagtgaccaacagcatggcacttgaatgtcagggatatagccatgggcagggttaagtaatctaatcgccggctattcgtaaatcaagatgccagattgggcgattgtgggcgattatctggatggcaggttgccaaccaacacgcgcaattatcgcctcgagatccattcgaacgcgtgttaaatcaaagataatgccgaaccgccaattgtttcagatagggcgctacatcgaaaccaaaatcggagctcctcaatcgccgcagacgtcagtcgcagagtggacctagtcgcgatcggaccctaacgaaatctaccgctcatcatgtcgccagtcatccgccgtaatcttatcgcctgtctcactttgggcctgtgcgtctgtcttagcttcggaccgggtccggtggaatcacgcactcgcccgaagaaccaggttgatagaaagctgttgacgatctacggcagcacgccccacgtggaagcccttctgggtccaggtcgtcccacgccggatacctacaagacgttgagaagcgcctttttccggtacgaggaatcacgctcattgggccatgacctggatctaaatagcagagaaattaaggctaacgaaaccattatgaaggccaaattaaaggagtttgacgaaggcctggttacccctcacctcttcaagccctcacagcacatatttgatgtgttggacggcatccggaacaccgatctcttcaagctgctgaaaaagatgcccaagggcgcggttcttcatgcccacgatacggcgctctgcagcacagcggccattatcaacctgacctactatgagcatctctggtcctgccagcaggacggagatcttagcgcctccgccctaaggttttccaaggataagccacaggccctcagtgactgcgattggagtctgctctccgatgtgcgagccaaatacggagctgacaaggtcgatgactatctggccgagagactcacactgtatccaaccaagaagtttgaggacaacaatgccgcctggtccacgttcatgtccattttcaatctgctcgacggtctggtgatgtacgcccccgtctgggcggactactactacaaagcgctggaggagttctacgaagatggtgttctatacttggaattccgatcagttgttcccacggtaagtagatcataaataatatttattgggcctatacatagatagtagttttcgtgtacaactagtatatgattgcacaactttgactacgttaaatacgggttgtacttttatttttcttaaaataacactattggaattttctatagctatatgacatggatggaacggagtttactcctatggatactgtgcgcatttatgtggaaaccttggagaagttcaaggaggctcatccagatttcattggttcaaggatgatctatgctcctatacgttatacgaatgcagagggcgtaactggctatatccaaacccttaaacaaataaaggtgagatttatttacaactttgagttatggtcctaacatttgattccatcgataggaaaagtacccggaatttgtagctggtttcgatttggtgggccaggaggagatgggacgtcctttgagggactttgtcgacgaattattatctatccccgatgacattgatttctacttccacgccggagaaacaaactggttcggttccactgtggatgagaacctgatcgatgccattttgctgggcacaaagcgtattggtcatggattcggactggtcaaacatcccgtggtgctggacatgctgaaaaagctgaatgtggccattgaagtgaatccgatttcgaatcaagtgctccagctggtctctgacttccgcaaccatccgtgctctcacttcttcgccgatggctatccagtggttatatcctcggatgatccctccttctggaaagccactcccctgacgcatgacttctatatcgccttcttaggaatcgcctcgcagcactccgacttgcgtctgctgaagaagttggccctaaattcgatacaatatagttctctgacgggagacgcccagttcgaggcgctggaaaagtggcaggttaaatgggaccagttcatcgccgatgtcaatgatcgttcctccaaccggggatcccccagtcaacggatcgattgactagcacggttggtggcagcgttgctggttgcgttctccctgatgacctccaacctttggcgctagtcggaatacaccccccttcgtccgctgctcctaccactccacttcaactcgaccacaggctgcagcgggtccaatgcatcgcactctcattcgcatccactcagagccatatccatgcccacatcctcaatatctaaccattgttgtaagctaatcgttatggactagtccttagttagatctaggctaatacctctctgtaaacccatgagattctgtcccacgcccctaaaactgtttcaatctaaaatccgttgctgcgccgaagaatccgaaagcaataaagaaaccgttttagtcgtagccgaaataagagtgcatgcaatttatgttcaaagctcaaagaagcctgaacgtaatcgtaatgagttagccagtcatgcggttccgaatcactcagagatgagatcgtgaggagtacgaatactaaaattgttaaaggggattgttaaatgcaaacttcctactacagtaatgcatttgcattttagcctatgagtaatatacatattcacatgtgtctataaggagtaaaaacttacaaaatatgtaaacttatttaagctgcagtgtaaatttgttcgcaaagtgagatacttatttttttcttatggtgaaacccaaaaaaatttatgaaataaatacaacaaataactaaaaaaaaaaaaacagaaaaatccgtatttcataatagcgccacaaatgacaataagcaaatcgctgttaccaagcgccattatcctcagtttgcaggcacgatgacatctccattcggggagtgcactcaagactaagcccgcataaatctctcattgccagcgggtgtgtcgagttcgcagaagagtggatgcgaattttaatgaatatgcgctatatggtcgtcgtggtcccgtccacttccacttccatacccgcctccagtgccacgtccgca

SEQ ID NO: 12755 - DNA, 1849 bp, DROSOPHILA
gcacttttggcgtgaagatcgcggcgaggaagtgctcggaatctgaaattttaagtcatattgtgtggtctacgcttgtgatagggcgctacatcgaaaccaaaatcggagctcctcaatcgccgcagacgtcagtcgcagagtggacctagtcgcgatcggaccctaacgaaatctaccgctcatcatgtcgccagtcatccgccgtaatcttatcgcctgtctcactttgggcctgtgcgtctgtcttagcttcggaccgggtccggtggaatcacgcactcgcccgaagaaccaggttgatagaaagctgttgacgatctacggcagcacgccccacgtggaagcccttctgggtccaggtcgtcccacgccggatacctacaagacgttgagaagcgcctttttccggtacgaggaatcacgctcattgggccatgacctggatctaaatagcagagaaattaaggctaacgaaaccattatgaaggccaaattaaaggagtttgacgaaggcctggttacccctcacctcttcaagccctcacagcacatatttgatgtgttggacggcatccggaacaccgatctcttcaagctgctgaaaaagatgcccaagggcgcggttcttcatgcccacgatacggcgctctgcagcacagcggccattatcaacctgacctactatgagcatctctggtcctgccagcaggacggagatcttagcgcctccgccctaaggttttccaaggataagccacaggccctcagtgactgcgattggagtctgctctccgatgtgcgagccaaatacggagctgacaaggtcgatgactatctggccgagagactcacactgtatccaaccaagaagtttgaggacaacaatgccgcctggtccacgttcatgtccattttcaatctgctcgacggtctggtgatgtacgcccccgtctgggcggactactactacaaagcgctggaggagttctacgaagatggtgttctatacttggaattccgatcagttgttcccacgctatatgacatggatggaacggagtttactcctatggatactgtgcgcatttatgtggaaaccttggagaagttcaaggaggctcatccagatttcattggttcaaggatgatctatgctcctatacgttatacgaatgcagagggcgtaactggctatatccaaacccttaaacaaataaaggaaaagtacccggaatttgtagctggtttcgatttggtgggccaggaggagatgggacgtcctttgagggactttgtcgacgaattattatctatccccgatgacattgatttctacttccacgccggagaaacaaactggttcggttccactgtggatgagaacctgatcgatgccattttgctgggcacaaagcgtattggtcatggattcggactggtcaaacatcccgtggtgctggacatgctgaaaaagctgaatgtggccattgaagtgaatccgatttcgaatcaagtgctccagctggtctctgacttccgcaaccatccgtgctctcacttcttcgccgatggctatccagtggttatatcctcggatgatccctccttctggaaagccactcccctgacgcatgacttctatatcgccttcttaggaatcgcctcgcagcactccgacttgcgtctgctgaagaagttggccctaaattcgatacaatatagttctctgacgggagacgcccagttcgaggcgctggaaaagtggcaggttaaatgggaccagttcatcgccgatgtcaatgatcgttcctccaaccggggatcccccagtcaacggatcgattga

SEQ ID NO: 12756 - protein, 553 aa, DROSOPHILA
MSPVIRRNLIACLTLGLCVCLSFGPGPVESRTRPKNQVDRKLLTIYGSTPHVEALLGPGRPTPDTYKTLRSAFFRYEESRSLGHDLDLNSREIKANETIMKAKLKEFDEGLVTPHLFKPSQHIFDVLDGIRNTDLFKLLKKMPKGAVLHAHDTALCSTAAIINLTYYEHLWSCQQDGDLSASALRFSKDKPQALSDCDWSLLSDVRAKYGADKVDDYLAERLTLYPTKKFEDNNAAWSTFMSIFNLLDGLVMYAPVWADYYYKALEEFYEDGVLYLEFRSVVPTLYDMDGTEFTPMDTVRIYVETLEKFKEAHPDFIGSRMIYAPIRYTNAEGVTGYIQTLKQIKEKYPEFVAGFDLVGQEEMGRPLRDFVDELLSIPDDIDFYFHAGETNWFGSTVDENLIDAILLGTKRIGHGFGLVKHPVVLDMLKKLNVAIEVNPISNQVLQLVSDFRNHPCSHFFADGYPVVISSDDPSFWKATPLTHDFYIAFLGIASQHSDLRLLKKLALNSIQYSSLTGDAQFEALEKWQVKWDQFIADVNDRSSNRGSPSQRID

SEQ ID NO: 12757 - DNA, 6835 bp, DROSOPHILA
aacacttatgtagtatgcgattcgattattgtttgtcgtgttggttaaaatcggtgtataaaattgtggtatcttttgatttatttaattcttttgctttgcgtttgcttttgctttgctttgcttttctgctaacttgcttgcttgctggaacaacaacaacaaatccttggtttcaaaatcctttctctcaaatcaacaaatacacagcgctttcatcattgcggatatagtacgtttcagttattcaatgttcatccaaaacttatgtgtataaaaaatatgtttcatgctaaggcaacgttcaacatcgatatgggatagtttagtatttcgtattcgtatatgtttttaataaaggattttattggatctatacttggttttcggtgtaaaggtatatctataaagcgcttgcatgatatgtgtgcttcatggttcaggtggaggaggaaatctggatgcgtagaagcttttacaatactatttatagtatttatttgtaaatgtaaacctcggatgtctatatcgtgcagttctcataaggatcttctaatcgttttggttcctaactgcaaggttgaccgaatttttatcttctttatagatgatgattttgtagtaagatgtgtagactaagttttgtaaataagtttgatggatatagaatctatattatagattgaggtataggacatatcgtttcagtagtgcaaagtagttgcttctgggtggccagtgttggctaacagttattgagtggcatgtgctattcatctgaatggtgtctataacttaacatggtgaggtaattttagatctaggctgagttagtctaagtatagcatcttcagtatgtttagctgcacactcgtgatgttttcatatcaaaaatgtcaacaaagtgtatctgcataggatctaagtatcttcttcaggtgcgccatctaattagtttctttggtatctctggcctcctccctatcttccaaaaattccttcaaccaatagctcccgtggtcgaaacacaactggtgctgattagcggctccctggagttcactgacgtattggatggatcgatggacagagtgaaggtcgagttggtctccaccgaatcgtgttgactctgcgtctgctcatgtcgtcttggtttgaccaattgggctggattgtgctgcacgccggcctcggcggcaggatagctggacacccgcttaagggtctgaacggaggaattggcttagtaacttaactttcaagctgagcagctcaccttatcattcagtatctcagcagcattggccgctgccacggattcggtaaccggacaaatattcttgctcgatgagaactttttgcgcttacgcttcagtgcagcaatggcagtgagacctgaattaaagatataattaaataaccatgatcttcgcagacatataatatgttctcctaccacttgtcgtgtgaaagaaatgcgatcccactccggcgtgagctgctggcgaattgctgaccaccgaaatcgtaggcgttggtgtggatatggtcgtggaactggtctctccatggtaaccgtattcctgctgtggcgagttctgcgcatatgtcacccgcatctggccatgaactggcgttgatgtgtgcgaggagttgcacaccgaatcctcagacttcgatcggcccagcattttgctcacgtttccgactttggcggcttcaattaaggtacctgcacaatatacatattattaaatatacaaatcataaacaagagggaacgctataatcgagtttctcgactatcagatacccgttacatagatggtggtagtgtgacttaggtatgcaactaacaatgaagtaaatgtattatgttaatgtattattgtaattaatatttgcgggcatatagaatgggcgtggccacacttttttggcaagaaacaaaaatatatacatacatatatacatttgaactaagtaaagtatggctatgtttataatttaaattgtacaatatatacacataccccatctctttttgtgtccagcgattcgcttgttgtacggcttcagggcggacttgttgtacttggtgacctggctactggcagtcattgccgccccctgagttccctgtggcgctgtgggcgtggtcggtgactccgatccaccgcctccacttccggcctgactttgctgccgcttgtgcataaagtttggtgtgaaaagggtggatagtgtggaactgaggatctcatgctggttatcatagttgtccaacgatgtggagaactcggcaactggagccagcgatcccgtggagccaggcggtgcgatattgaagcccttcatcaggcgcctctccttctggcgatttttcttgccaccacctcctgtgggccaattgaaaaacccatttaaatagagggttgttagcaatcttccatggattctttgagcttaccacctccttgacccgccgtcacattcgtatccattccgctgttcttgagtatttccaccagctcgcaccggaaggcggatatatcctgtttgatctcattcacatcgtcctcggtgactccctgggattcggcctttcgctgctccacggttacataacgtctgaccaaattccgcattatctgctggtacttgaagtcccgatcactagcctgctgcgcctttcgctgcaggagattcaagaagggattgtgaaggaatagctttaaaggaaatacatatatgaataacttactcgaattgtctttagatgttcccgtcgagcggctgaggatccgctgcagaagacgcgacgcatccattttatggcataccaaatggactttggagttggtataatgttaaatggtggtggacaggttccgccctcctcaaagtagcttatccagagtttggagcgagcaaacttccactccacatcagcacgttcctagaaaaattaaacatacatcatacatcagatttctgatggattgagattagtaagtgtaagtatcccaccgaaataagttgatacgaatgattcatcatggcaataagtaggttgagcagcaccacaatatttataaccgagtaagttccaaacattagcatgccccagaatctggtgaagatcttgattccatccaactcaaagctgtccaaatcgattaggccgaagacagcccagaagagggtttgtgtggtttcgaataaactaaaggaaactatttcattagtaccttaataagttgctatgtttttattagttacttggagaatctgcgccacacaatgcaagcattgggatcattggttccattcatgtttagaagagcactcatgggcgaaacttcaggacaacgtttcttctcgagatcggcgtagtaccttagaatagaaaaaatataatataagtattatacaacacgtatcctctatcaggatcagctgtcatgtcgatctgtccgtttcggaatattaaagcacttttaagaaagtactttgtttaatatacataacataacatttaatatatataacataatatatgctcaccacagcaactgattgagaccactgccaaaagcgaacaggactaggacatataaaaagaagaacttcatgatgtccatcaccatccgggacagcgacacctgcagtggccccagatgcggattcaccgagaatatataaaccagcttgaggctactgaaaatgttcgctgcactgaatagaccctccgatatgagcatcgggtcccaggcgtcccaccgctctctcggcagatccgtcgcatgcgagttgtatatcatctctttttggacctaaacatatacgtttatattaattagtatcaattaatgttatgatataaatttacctgaaagaaggatacaacccgcaaagccactgtggccacatacagggagttcgtgacaaagtcgatcacattccacatgtcgttgagatactcctgcagaccaacgtcccacagttgcttcacctcgctccagatgagaccgctcacccaggccaggattagccactcaataaaggtgggcttggctccgcgcttcgtgggcagctcctccatcgtgttcagcattccggaggaatcagcaaagaaccagcctccgatgaaggtctcaatcctctgagaagccagcatcaatagaactaagaaattcaagtgaaatcactagagttagttacattctattacttccttaagtatattgtactcacatagaaaggtgaagtaggaggcgctgtggcagatgaacttaatgaagggttttcgcattgtttggccaatgctggagtagggtgccaggatgtaggctagcgagaagatggggaacattatgccgatccgtatgatatccacagcctgcaacgccatgttcttcctccggaatcctggcaatccctcgtaccaaatgcttgccagcagttgttgaacattcgaatgggccacgaactaaatgggattaccttttgacctttgttattcctggactaatattcagtgcacccaccttcttctggcgcagtttaatggccagcttcaggcggtttagatgcatccgttcgccgtgctcgtaaaccggaccggtgggatcgtggttgagcaggatctctagctcgtgggaggtgcgagtgtggtccagcagtgcggtggcgaagtcctggcactgcttgcgcagctcctggtactcattctgtggaacaatataaatattaactacatataactctataacttaggtgccgcgtgaccaaccttaaattcgtgctcgagaaagctaagtcgacgcagctcccaagacagttcgaaggccgtgaggatggggtccttggaggagagtgctatcaaactgggactggccagggcccgataggcgttgatgcgcgatctcgagtgtctgagggaatcctcctgccgcgactgaacgcactcatcacagccacatcgcacatcatggggcatgggcagcacggcaccccgatccaagaggatcttgatgatctcatagttgtcgcggtgagccgccaggatcaggggcgtaatgtccggcgtaaaggtcgacgtgtcctcagaggcggattcccagctcttgggggaaaaataaagtgacagcagtaataaatttaactagaaaataaacttacatgattgccctcgctgtgaaaggtgacgttttcgtggtccagcaaaacctccacagcctcaacgaattcctcagagatggaatgcagcagagcatccttggtgtccacattgtagttgatcagcaactccaccatttccagattttcgttgtcaatggccatcagcagagctgttcgtcccagaggatccacgcagttcacattgatgtactccgtgtcctgggccttctgcagcatcctgcgtgtgccggccatatcgcccctctccacggccagcaggaacttcttctcctccagcgtcagctgccgaatttcctgatgcggccggatcgtgttctcctcctccatcatgccgtggatgctgtgacgctaagggattaatatattcagttaatagttgagaatgattattgaggctctccaacacaccttcacccttctggctggctcaatctggaccgctatgtgaccactgccgctgctctcgctgcccagtttcttctcggcactgtccgccgcatccgcgccattcttgatcttattgaggattggggccagcaccgattttcggcgcgcgggactcacaaagtgcagcttttttccgtcgtctaaattacattttaaaaagcatatgccaaatataagtagcatacgtaaaactaggcgttatttataaaaaaaattgcattaaaataagtgaaattcaatttgaaactagcaaggtttcttgctagatgtttacacagatgtctagcatagataatccggttattttcaacccagttcaaccttgaacaggaccctacacgcacacaaacacttgggtgttgttcaaggcaaaagctcctgcaaatcatcaaattgacattaaaaagtatttgctctgattttctatagccttgggatataatcgttatcgttatcatggctaggaaataaaataatcacattcaatcggaaaatgcaaacacaaaaagcgaaaaaagaagagtaaacccgtaaagcaaacacaaacacgtggcgtatacgcgatatatggtggcatcagaaatctgggtcagttattgcctgccattttttattttgctttattcctttcataccataaaatatgcatatgtgtgtgtgtgtgtgtggttagatgtgttgtcactttttggcatttaatttccaacgacattgggcgcataggcagccaaacaagcaacaaactcaaatgcgtcctaataattgtaaacaaattttcatacatctcgagttggatattaaatcgaactacccacaaattataataataaaacaacgctaaacgctttagtcgacaatattgactatttaataccctttactcagctaatgaaatgaaactaaagacatgcaagccaacaaagcgaatgtttctaaatcgcacacgagctccacctggcggcaattacgttaggtgatcatctattgataataaaactcaaaattctttattatttgagttttgtttgtgtggggcttgaaataatccagttcaatagcttttcagctttccaacattcttgctcgtatgctcctcaaaatttttagacatttatacggatgataattgctagtttcctgcgattagtaaacctgaatagtaatatacttattttatgctgtt

SEQ ID NO: 12758 - DNA, 3627 bp, DROSOPHILA
atgctacttatatttggcatatgctttttaaaatgtaatttagacgacggaaaaaagctgcactttgtgagtcccgcgcgccgaaaatcggtgctggccccaatcctcaataagatcaagaatggcgcggatgcggcggacagtgccgagaagaaactgggcagcgagagcagcggcagtggtcacatagcggtccagattgagccagccagaagggtgaagcgtcacagcatccacggcatgatggaggaggagaacacgatccggccgcatcaggaaattcggcagctgacgctggaggagaagaagttcctgctggccgtggagaggggcgatatggccggcacacgcaggatgctgcagaaggcccaggacacggagtacatcaatgtgaactgcgtggatcctctgggacgaacagctctgctgatggccattgacaacgaaaatctggaaatggtggagttgctgatcaactacaatgtggacaccaaggatgctctgctgcattccatctctgaggaattcgttgaggctgtggaggttttgctggaccacgaaaacgtcacctttcacagcgagggcaatcatagctgggaatccgcctctgaggacacgtcgacctttacgccggacattacgcccctgatcctggcggctcaccgcgacaactatgagatcatcaagatcctcttggatcggggtgccgtgctgcccatgccccatgatgtgcgatgtggctgtgatgagtgcgttcagtcgcggcaggaggattccctcagacactcgagatcgcgcatcaacgcctatcgggccctggccagtcccagtttgatagcactctcctccaaggaccccatcctcacggccttcgaactgtcttgggagctgcgtcgacttagctttctcgagcacgaatttaagaatgagtaccaggagctgcgcaagcagtgccaggacttcgccaccgcactgctggaccacactcgcacctcccacgagctagagatcctgctcaaccacgatcccaccggtccggtttacgagcacggcgaacggatgcatctaaaccgcctgaagctggccattaaactgcgccagaagaagttcgtggcccattcgaatgttcaacaactgctggcaagcatttggtacgagggattgccaggattccggaggaagaacatggcgttgcaggctgtggatatcatacggatcggcataatgttccccatcttctcgctagcctacatcctggcaccctactccagcattggccaaacaatgcgaaaacccttcattaagttcatctgccacagcgcctcctacttcacctttctatttctattgatgctggcttctcagaggattgagaccttcatcggaggctggttctttgctgattcctccggaatgctgaacacgatggaggagctgcccacgaagcgcggagccaagcccacctttattgagtggctaatcctggcctgggtgagcggtctcatctggagcgaggtgaagcaactgtgggacgttggtctgcaggagtatctcaacgacatgtggaatgtgatcgactttgtcacgaactccctgtatgtggccacagtggctttgcgggttgtatccttctttcaggtccaaaaagagatgatatacaactcgcatgcgacggatctgccgagagagcggtgggacgcctgggacccgatgctcatatcggagggtctattcagtgcagcgaacattttcagtagcctcaagctggtttatatattctcggtgaatccgcatctggggccactgcaggtgtcgctgtcccggatggtgatggacatcatgaagttcttctttttatatgtcctagtcctgttcgcttttggcagtggtctcaatcagttgctgtggtactacgccgatctcgagaagaaacgttgtcctgaagtttcgcccatgagtgctcttctaaacatgaatggaaccaatgatcccaatgcttgcattgtgtggcgcagattctccaatttattcgaaaccacacaaaccctcttctgggctgtcttcggcctaatcgatttggacagctttgagttggatggaatcaagatcttcaccagattctggggcatgctaatgtttggaacttactcggttataaatattgtggtgctgctcaacctacttattgccatgatgaatcattcgtatcaacttatttcggaacgtgctgatgtggagtggaagtttgctcgctccaaactctggataagctactttgaggagggcggaacctgtccaccaccatttaacattataccaactccaaagtccatttggtatgccataaaatggatgcgtcgcgtcttctgcagcggatcctcagccgctcgacgggaacatctaaagacaattcgacgaaaggcgcagcaggctagtgatcgggacttcaagtaccagcagataatgcggaatttggtcagacgttatgtaaccgtggagcagcgaaaggccgaatcccagggagtcaccgaggacgatgtgaatgagatcaaacaggatatatccgccttccggtgcgagctggtggaaatactcaagaacagcggaatggatacgaatgtgacggcgggtcaaggaggtggaggtggtggcaagaaaaatcgccagaaggagaggcgcctgatgaagggcttcaatatcgcaccgcctggctccacgggatcgctggctccagttgccgagttctccacatcgttggacaactatgataaccagcatgagatcctcagttccacactatccacccttttcacaccaaactttatgcacaagcggcagcaaagtcaggccggaagtggaggcggtggatcggagtcaccgaccacgcccacagcgccacagggaactcagggggcggcaatgactgccagtagccaggtcaccaagtacaacaagtccgccctgaagccgtacaacaagcgaatcgctggacacaaaaagagatggggtaccttaattgaagccgccaaagtcggaaacgtgagcaaaatgctgggccgatcgaagtctgaggattcggtgtgcaactcctcgcacacatcaacgccagttcatggccagatgcgggtgacatatgcgcagaactcgccacagcaggaatacggttaccatggagagaccagttccacgaccatatccacaccaacgcctacgatttcggtggtcagcaattcgccagcagctcacgccggagtgggatcgcatttctttcacacgacaagtggtctcactgccattgctgcactgaagcgtaagcgcaaaaagttctcatcgagcaagaatatttgtccggttaccgaatccgtggcagcggccaatgctgctgagatactgaatgataagacccttaagcgggtgtccagctatcctgccgccgaggccggcgtgcagcacaatccagcccaattggtcaaaccaagacgacatgagcagacgcagagtcaacacgattcggtggagaccaactcgaccttcactctgtccatcgatccatccaatacgtcagtgaactccagggagccgctaatcagcaccagttgtgtttcgaccacgggagctattggttga

SEQ ID NO: 12759 - protein, 1208 aa, DROSOPHILA
MLLIFGICFLKCNLDDGKKLHFVSPARRKSVLAPILNKIKNGADAADSAEKKLGSESSGSGHIAVQIEPARRVKRHSIHGMMEEENTIRPHQEIRQLTLEEKKFLLAVERGDMAGTRRMLQKAQDTEYINVNCVDPLGRTALLMAIDNENLEMVELLINYNVDTKDALLHSISEEFVEAVEVLLDHENVTFHSEGNHSWESASEDTSTFTPDITPLILAAHRDNYEIIKILLDRGAVLPMPHDVRCGCDECVQSRQEDSLRHSRSRINAYRALASPSLIALSSKDPILTAFELSWELRRLSFLEHEFKNEYQELRKQCQDFATALLDHTRTSHELEILLNHDPTGPVYEHGERMHLNRLKLAIKLRQKKFVAHSNVQQLLASIWYEGLPGFRRKNMALQAVDIIRIGIMFPIFSLAYILAPYSSIGQTMRKPFIKFICHSASYFTFLFLLMLASQRIETFIGGWFFADSSGMLNTMEELPTKRGAKPTFIEWLILAWVSGLIWSEVKQLWDVGLQEYLNDMWNVIDFVTNSLYVATVALRVVSFFQVQKEMIYNSHATDLPRERWDAWDPMLISEGLFSAANIFSSLKLVYIFSVNPHLGPLQVSLSRMVMDIMKFFFLYVLVLFAFGSGLNQLLWYYADLEKKRCPEVSPMSALLNMNGTNDPNACIVWRRFSNLFETTQTLFWAVFGLIDLDSFELDGIKIFTRFWGMLMFGTYSVINIVVLLNLLIAMMNHSYQLISERADVEWKFARSKLWISYFEEGGTCPPPFNIIPTPKSIWYAIKWMRRVFCSGSSAARREHLKTIRRKAQQASDRDFKYQQIMRNLVRRYVTVEQRKAESQGVTEDDVNEIKQDISAFRCELVEILKNSGMDTNVTAGQGGGGGGKKNRQKERRLMKGFNIAPPGSTGSLAPVAEFSTSLDNYDNQHEILSSTLSTLFTPNFMHKRQQSQAGSGGGGSESPTTPTAPQGTQGAAMTASSQVTKYNKSALKPYNKRIAGHKKRWGTLIEAAKVGNVSKMLGRSKSEDSVCNSSHTSTPVHGQMRVTYAQNSPQQEYGYHGETSSTTISTPTPTISVVSNSPAAHAGVGSHFFHTTSGLTAIAALKRKRKKFSSSKNICPVTESVAAANAAEILNDKTLKRVSSYPAAEAGVQHNPAQLVKPRRHEQTQSQHDSVETNSTFTLSIDPSNTSVNSREPLISTSCVSTTGAIG

SEQ ID NO: 12760 - DNA, 5071 bp, DROSOPHILA
ctgggtaagacagtcgagaaaagctaccatggcagcatcaaacttggtgtcccagaaaaacttaaatccgccgctgccataaagcgggagctctcgattctcgccgagcacctcaacatacgaatgatttccaaagggtactacacgataccgctcgaaggtgagccctatcttacgagcaagcgcagagagcagaagcaccgtctggccccaagcggcgttgatctctgaccagtccacggatacagagggcaatcgacccagcctaaagttattaatggtaccgaaatgcccggcatgccagatgtgaaaggtgatgttgaatatgttggtgtcgcgcagtttgtccagctgctgtttcgagtaggcgatctgacactccagacttcgtttgtcatcctcggtgagcattagctcacgcctgtgcttggtatactcgcgccagtagctttcctcctgctcgtgcagctcctctcgctcctgttcctcctcggcaatggcatcatttagcgattgttcctcctttttgagctcttttagctccgacagaagctgttgctcgctgcgctttagttcgtcgagctccttgtccagggcctcaacgttgggtgctacacgctgttgctctagttcatccaaataagccttgtacacatcccactcgtcctcagcgatgcgcagttccctgtccatgatttccagcatggagtcggcacactcttcgcacagcggatggtcaatctcagagttggaggagaggcagtcaaacagctccgctttcagcttaaaagcagcactcattttcttgttgtccctgccatcggaaaccagcataaaaccagtgccatttatagagtccgtaagcctgtagggcggcacaaagtggtcgaagctgctggcgtcctgcgggtccaatgtattgccattgtctccgtagatgggcactgaaaaagtgatttattagactaatttccagagtgtatcacccatcatcacctacaagataactccgccattgcgtgcacgctaatcttctccagctgctcgtccaggacgatgggctgcaggcagcgctgacaggcgaaggacaccgcctgcttttccgcctcactcattgtcgttcctgtttgttgtccttcgatttttgcatacaattaaatctttcaccgagtgtaaaaacacaaataatccatcagctgtttgcaactgctaccagagttgccaccccctccgaaaaagagtgtggaaaaatggcgcagttaatcggacagtaaatcgtcaaccaacaacaacctgagacagtaaaaaagagagaaataacagaaaaccagttttaaacaataacattgcctaattgtgtccgccggagatgcttaagcgtgccgcgaagctgcaggccttgaccacaattcccgctgataagagagaactcaaggggttggcttttggtttgttttggtaagcgacagaacattagacggagtgccgtcgccagtgctgccaacctattttagctatagcaaatatttcatagtagcaaagaggtagaacccaaatacaatttttataaataatagtttatagttagcgaacggactaaaagagaaacctgatatcgaacgacttattatattttttgttaactcaattttaaacttactccagcgtaaaccatactttataaatagtttaccaaaaatgatagcacaagtgccagaaagctattcacttcatttttaatttgattaggtaaattgtgcgaaggaagtatttaaaaaaatgtgaaatgacgtactaagcaccccacatatagactaagaattaaaggttaaggacattgactttcgcaatctttgtattgtagttaagccacaagcattgataagcaaagaaattgtaagagtgaaataaaatcataataagatgaattaattaaagtagagaaactgataaagacttgcacttgaagctgacacatgtgtttaataactatataattgctaagggaaattttgtttttgaaaagtttccgttatcaagctcgaaatttctagcaatggggcagcacgaaatttgccgctgtaaatctagctttcaaaacctggcagcactgtcggtggtcacattgtagcctcttcgcatttgacgacccatggaaaactttcagtctcttgcaggcagcacagcgatacggaagcaacaattgaaacgtccagaactcctcctcccacgagtatttaaattctgacacaagagtgcctgaaccaaaatcccactcaccgaatgctggtgctttgatttgcaactgttcctaggttccggctgaatccctagatttgcggatctacgcaactcattcactcaaaagccagccgaatttatcgcgccagattaaacaaacagaaacaaaaaacagaagccgagaccagttccacatcgtgccatttttatctgggcatataggcagacgtgattacgtgattagtgcggctggggctgccgtttatcaatagcgagagcaacaatggtttcctacttcgtacctcgtggccgcttcctgctgaaggccggcaatctcagacaggtggtgcagcagcagcatcagccggcccagctacagctgcagcccattaaaggaccacagccgcaggctcagaatgccagtctgccggtggcccgtcacttgcgccaattctcctcgaatccagcctccaaggaggcaccattacaccaccggcgcccgcaacataaacaacaaccgaatcctagtcaggagttagctcagattcggcgcaatatactctcacggtggacgggcttcctgttgcgttgggctcccatgggcatctgtgtgtttggcgccatcgagtggcagttgcagaagaaccgctgcgaaaaggaaggaaaacctcggacagcgtccgagctccagtcgcgcatttactgctccctgccactgcgcataatcagccgttgctggggctggctggccgcttgctacttgcctcccagtctgcgtccctacgtctacggatggtattccaacacgtttgatgttaatttgagcgaggccatgtatccggagtatgagcactacaatagtctggctgagttctttaccaggccacttaaggagggcgttcgtgtcatcgatcagcaggctccactggtctcccccgccgacggtaaggttctacattttggcagcgcctcggactcgctaatagagcaggtcaagggtgttagctacagtatcgaggacttccttggcccgctggagactgtggagcaggcaaattccggtgcctcctatgcccaggccctcaaaaagaagagcgatggttctacggagctgtaccagtgcgtgatatatctggctcccggagattaccatcgattccactctcctaccgcttggaagcccaccattcgtcgtcacttctccggcgaactgctgtccgtgagccccaaagttgccggctggctgcctggtctgttttgcctcaacgaacgtgtgctgtacatgggccagtggaagcacggattcttctcctacaccgccgtgggtgccacaaacgtgggatccgtcgaaatctacatggatgccgatctgaagacgaaccgttggactggattcaatgtcggcaagcatccgcccagcacctacgagtacgatgaactggtcttgaacaaagaactaacagaagcgcccaaggaattcggcaagggggatctggtgggccagttcaatatgggcagcaccatagtcctgctcttcgaggcgccaaagaatttcaaatttgatattatcgccggtcagaagatccgcgttggcgagtccctcggccacatcgtcggctccaaatgaaaatgggagccacaattatgtaccgaatcagtgcaaagtcctgtcccccaactgctcagatcacttgttgtattagcattagacgctcgtgtcctaggcaaatgtattttgtgaacatcctgcgaagctaactctgtgtattgttgccatttcagtagttttaagctatattttatacaataaacgtcgaaattatatttgagaacaacaacagcaccatccatcaattaactcattcaggcacgcgcttctgaagtagaacaccgattgttgaggtggggcgttatcagggaacgttttgataagagataccaggctgaaacgcagtcgttgaacccctcgttgctgaggattcagaaagactaagtctgtgtctgtagccagcttatcgggccaaataacgctccgggggtccacactcacctccttttgcggagtccacgctatcagtgaacctgaaaatgaagcaaaacctttttgggctagacaagcgcgtgccgctgccgacgacaagatgacaagtcgtctatgccttgcgccacccagtgtttactttagcgcagaatccgggatcgcaatccattccgtttaattaattcaatcaagcccggacgccgggaatcttgttcgttgaacttatcaggcggtgacgggtgatttggttcctggccttgacacacacactccacgaagtccgtgagtgttaattattcgccatggcaaccgatttgattgcaaatcgagcatcggcttaagggcaatcactaagggaacttcgaatatggcgccaacagtgctgtaaatgtttaaataaaagtataagtcgtggaattgccactctttaaagctattcgttgtgaaaaaaaaacataaggaacttttattttggcatatcacgccatattcttatcaaataattttttttcggtttaattttaaaaattcgcgccaactcgataaatgaacgttcagttaaattcacctcattgtacaaacgaggtgaactgtgttaaacagctgacagccggcattcatttgttgttctctgtgattttacgtaatattggtatttattctgaatataattgtttataaagcacattaaaatgatgatgcgacactgtatgatggccttgagggtcgctagatcccagatcccgttcagcactgccaggaatactcagagcaatctcctccaacgtt

SEQ ID NO: 12761 - DNA, 2409 bp, DROSOPHILA
aagataactccgccattgcgtgcacgctaatcttctccagctgctcgtccaggacgatgggctgcaggcagcgctgacaggcgaaggacaccgcctgcttttccgcctcactcattgtcgttcctgtttgttgtccttcgatttttgcatacaattaaatctttcaccgagtgtaaaaacacaaataatccatcagctgtttgcaactgctaccagagttgccaccccctccgaaaaagagtgtggaaaaatggcgcagttaatcggacagtaaatcgtcaaccaacaacaacctgagacagtaaaaaagagagaaataacagaaaaccagttttaaacaataacattgcctaattgtgtccgccggagatgcttaagcgtgccgcgaagctgcaggccttgaccacaattcccgctgataagagagaactcaaggggttggcttttggtttgttttgtcacattgtagcctcttcgcatttgacgacccatggaaaactttcagtctcttgcaggcagcacagcgatacggaagcaacaattgaaacgtccagaactcctcctcccacgagtatttaaattctgacacaagagtgcctgaaccaaaatcccactcaccgaatgctggtgctttgatttgcaactgttcctaggttccggctgaatccctagatttgcggatctacgcaactcattcactcaaaagccagccgaatttatcgcgccagattaaacaaacagaaacaaaaaacagaagccgagaccagttccacatcgtgccatttttatctgggcatataggcagacgtgattacgtgattagtgcggctggggctgccgtttatcaatagcgagagcaacaatggtttcctacttcgtacctcgtggccgcttcctgctgaaggccggcaatctcagacaggtggtgcagcagcagcatcagccggcccagctacagctgcagcccattaaaggaccacagccgcaggctcagaatgccagtctgccggtggcccgtcacttgcgccaattctcctcgaatccagcctccaaggaggcaccattacaccaccggcgcccgcaacataaacaacaaccgaatcctagtcaggagttagctcagattcggcgcaatatactctcacggtggacgggcttcctgttgcgttgggctcccatgggcatctgtgtgtttggcgccatcgagtggcagttgcagaagaaccgctgcgaaaaggaaggaaaacctcggacagcgtccgagctccagtcgcgcatttactgctccctgccactgcgcataatcagccgttgctggggctggctggccgcttgctacttgcctcccagtctgcgtccctacgtctacggatggtattccaacacgtttgatgttaatttgagcgaggccatgtatccggagtatgagcactacaatagtctggctgagttctttaccaggccacttaaggagggcgttcgtgtcatcgatcagcaggctccactggtctcccccgccgacggtaaggttctacattttggcagcgcctcggactcgctaatagagcaggtcaagggtgttagctacagtatcgaggacttccttggcccgctggagactgtggagcaggcaaattccggtgcctcctatgcccaggccctcaaaaagaagagcgatggttctacggagctgtaccagtgcgtgatatatctggctcccggagattaccatcgattccactctcctaccgcttggaagcccaccattcgtcgtcacttctccggcgaactgctgtccgtgagccccaaagttgccggctggctgcctggtctgttttgcctcaacgaacgtgtgctgtacatgggccagtggaagcacggattcttctcctacaccgccgtgggtgccacaaacgtgggatccgtcgaaatctacatggatgccgatctgaagacgaaccgttggactggattcaatgtcggcaagcatccgcccagcacctacgagtacgatgaactggtcttgaacaaagaactaacagaagcgcccaaggaattcggcaagggggatctggtgggccagttcaatatgggcagcaccatagtcctgctcttcgaggcgccaaagaatttcaaatttgatattatcgccggtcagaagatccgcgttggcgagtccctcggccacatcgtcggctccaaatgaaaatgggagccacaattatgtaccgaatcagtgcaaagtcctgtcccccaactgctcagatcacttgttgtattagcattagacgctcgtgtcctaggcaaatgtattttgtgaacatcctgcgaagctaactctgtgtattgttgccatttcagtagttttaagctatattttatacaataaacgtcgaaattatatttgag

SEQ ID NO: 12762 - protein, 447 aa, DROSOPHILA
MVSYFVPRGRFLLKAGNLRQVVQQQHQPAQLQLQPIKGPQPQAQNASLPVARHLRQFSSNPASKEAPLHHRRPQHKQQPNPSQELAQIRRNILSRWTGFLLRWAPMGICVFGAIEWQLQKNRCEKEGKPRTASELQSRIYCSLPLRIISRCWGWLAACYLPPSLRPYVYGWYSNTFDVNLSEAMYPEYEHYNSLAEFFTRPLKEGVRVIDQQAPLVSPADGKVLHFGSASDSLIEQVKGVSYSIEDFLGPLETVEQANSGASYAQALKKKSDGSTELYQCVIYLAPGDYHRFHSPTAWKPTIRRHFSGELLSVSPKVAGWLPGLFCLNERVLYMGQWKHGFFSYTAVGATNVGSVEIYMDADLKTNRWTGFNVGKHPPSTYEYDELVLNKELTEAPKEFGKGDLVGQFNMGSTIVLLFEAPKNFKFDIIAGQKIRVGESLGHIVGSK

SEQ ID NO: 12763 - DNA, 4886 bp, DROSOPHILA
gctagcaacgttgctgcgccacaagcttcagctggaggagattcgacggaactggagcgctgttgctggatctgttttgagaccgataaggaggcaggtcgccaggcttgggtgaatccatgtctctgccgaggaaccaataagtgggtgcaccagagctgcatttccctctggatcgacgagaagacccgaataaacaacaatctgcaagccgtttcctgtccacaatgccaaacggagtacaccattgcatacccgaatctctggattttcgatagggctttggagctgaccaacgatcttatcctaacaaacttatataattgcctggccaatgtcttcacggtggtctttgcctattggtcagcggtttcattcggagcaaaaacatatttgcagatcactggtcaggaaggtcacgttcatcaaataattcaatcgggagacctgttggttgttctggtcggattcccattaatctcggtagttctgatacttggacgcttaattccctgggaagatgccctgttgcgcttcattagaatatgttattcattgctgcgaagtctttcaatgatgtgcctaggacggaaatatgaccaccagaccgaaccatacccttctgcgccaatgaccgaatattcagcatcgcgggtggtctgtggagccatcctcttgcccaccatatccatgtacgtgggtagagttctttacagctctgtcgacgatagattgcaacaaactcttcttgggggattgactttcatagcgatcaagggattcctcaaaatgtacctcatgcatagccaatacatctgtcgtatgaagcgtcgtgttttggattacacgaaggaaaacctagcggaggcagacggacactaggtaaactcaagatctgcaagagaagcaagaagtaatttgaatatctatttaaattgtaaagtgtacaattttcctaagactacgtgtcaatagtgcattcttactaccaatcataaataatcgttaaagcatttattaatttatgcataatagtttacagctaacagtaggaaatggtgtctaaatgtaatgtactccctaggatctctatgcacgattgatcgatccagccccctctttacggaagtcaactctgtatcgagggcgcgatcgtcgagaactaaaactccaatgtatattttaactatacaaaaaatactgtatgccgtgtgtgtgtccaatgaacttggccgcaactcagatgcggttaagtaactgcgcgccaccttaagtaatcctcgcctaacgtctcacttcgttcggcttctgtgcctggttcctggagctgcgtcgtccaacaactcgttcagttgttgggctcctgcttgtattgttattgtcggttgttcaccccctcgggattgtggctgctgaccatgctgtgctccatgttcttcacgatcacatagttggtgatgtggttgatggcctcgtcctgcagccgctccggccagcgcttcatgtacgatttgatgaagtcgccgaacgtgtccaccttatcgggagtgctcttgtgcgtgtccacgatgttcttcacaatgtccacgaacttgtcgtagtcctcgtgcgacttcttgatcttctggtagttggccacgcctccattggtgttgcccccaccaccaccactgccaccgcttccaccggcagccgtgttcatttgctgatccatgttgttatccgccaggcgggctgaggcagcggcagccaccgccgccacggccgccgatgaggccatgaagttgtccacgctgccggcattgggtggtggctgggagtggtccataaagtgccgatgcatcccgtactcggtcctgcaaatcccaattgttatttaaacatgttgtgaggaaggtgttccaatgctagtgcttacttatagaacccctccgtgttgttactattaaactcttgctgagacattggattcttccaaactggtgactcggatgtggatggtaagctgctcgtattggacgcacttgtcatgcgtttgtctctggaaaataataagatattttgttagtttgggattgctatatgggaagtatctatcatatctcaaccaacttgtaaccggtgtgtgcggccagactcttaaacacatcatccacttgactgtagaacttccaggtgctgatgatgcctgtggtctcaaaggtcttctgctcctgccggtagcgctgcgttagattgttgactttaaagtgaacctcgagtgcggtaacagggacgcccagcgaggttagctgcttggccattgccacatacagatggccattgcgtttaatggtgcgcagctcataggcgcagactttccatagtttgatcagctctagaacaccactatcctcccattgtcggcgctttttgttgaatttttcatactgcgaataggtatacgattatattgatgataaagctactgattccaaagacaacttacaggcatttcacatgggtcttactgccgacaaatgggattgcccgacaatcttcgtctgccagctgatggaggacatgaagcggtttatctagtgggctggcatactgtacacggattcgctcctgaaataaatcaaatgattagttaacgtgcaggtgtcgttgtttactatttgtattgttagacgtattaatattgcaatccctatgagtttcagggatttcttaaaaagtgcacaccacacgtaaataaacaaccgaacatatggtcagccacctatttgatgactatttaattgaattgaaatggtaattaatcttttgtagcctaataccttcccacaaaaagggttacgaatgattgcatttcatagttaacttagttctcgcggcaattaaagggtataatgttgtaatacacataaaattctattatattgcagcagagtttggattcatagaaatatttatgtatttttaagctcctagaaggactcattccctagttgtcatgggtattaattactatacgatataattatgcacaatttgaagttctatttatattcactaattaatttcagcttaaacttttaaaacgcaagtatttttaacaattcttatcacaggaaacaaaatgttataggaactgttttaaatttggcatccaatgattttaaaatgggttattgtcgcttccgtgttgtttgtaccgtaatcccattggctaacaacccattttctggcactaaagggtatttactagtcggtgtactttgtctattttctagctttcaattatcattaagccggctcacacacaccgacgcagctcagccgctcccgcacaaacacacacgcatgcaatgcaaatcgaacggtaaacggtaaacaaatattaattgtgcgagcgaaacaagttgcgatatgcatgcagcagctgcggcagcagcagaagatgagaagtggatgcggcgacgtttggaatcgaagtgaagcggtaactcaagtgtagaagggagttgggctcagatgcggatgaagatgctccgccgacgtcgacggcgacggcggctgcgggatagcagcattggagccaatgtacatatatgtaagttcgcggggggtgagaggttacttttctcgaatacacacacgcacacacttttcccatttcagagatacacacactcacatcgcatccacatccgattttcttgcgttgattgcgttctattgttacgtttttcgctttgctccatgcaacaacgggcgaaacaacaacactacgacgccaacagcgtgggcacaaaacttaataataagtcaaataattaaattttaattatcttcaagagggaaacacacgaaaaacgtagtttgtagctcctacgctgcgcagctctcgcaattcgactctataatgatgttctcggcgtgagcgagacagcatggcatggcaagagcaacatggtgtgagcggtgcggctagtgtgacatggcgttgccagacagtcgccagtgcagtgcgttggggtttcgaacagcgccaaaaggtgggaaattgaaaatgtttattgcggctttaggccaatagaaccaagtcatctgccatttatcgtgctcaatacagtacttttacttcaatctcggctcgttagggcgcaacaaagcaagcgcatttcatcgctcatcatcatcatcaccaccacctactcccgcctcccttcaacaaatcgcttttcttggagcataatgcacacacacactggcacagtcacaccgacacgtatgtgccggtcatcatcatcatcattaggttgtgcgatggagcaacaacaacaacaacaaaagcaaacgtcattagcgggctaaataacaaaaaatgataatgtcgctgctgccacaaagtcgtcgtcagttggctttgcttgtggggtaatcatcattaaattgcacatcgtctcgatgaaaaagtgctggcggggcggggcgataggcgatgggggtggggcaaggcagaggaagaagaaattgggggaagcgaaatcccaataacaaggtcaccaaatattcaaaaatctacgaacctagccaactatataaatagtaaactttgagataattaataatagacatacaaactaatgttgtttatttgtattttgaaaaatatattacgtaaatttctagttattgacacatatttttactttcaaataggttttagttgaatatcaatctattttcattctccctaaatatattattataaacaattatgttcttcagtgtttacaaatttctatattgcaaatatgtatctttttcttttgttactaagtacagattgtttaggaatacaaaatgaatatgtcatcatcttcaagaacttgaca

SEQ ID NO: 12764 - DNA, 1449 bp, DROSOPHILA
cgcagcgtaggagctacaaactacgtttttcgagcgaatccgtgtacagtatgccagcccactagataaaccgcttcatgtcctccatcagctggcagacgaagattgtcgggcaatcccatttgtcggcagtaagacccatgtgaaatgccttatgaaaaattcaacaaaaagcgccgacaatgggaggatagtggtgttctagagctgatcaaactatggaaagtctgcgcctatgagctgcgcaccattaaacgcaatggccatctgtatgtggcaatggccaagcagctaacctcgctgggcgtccctgttaccgcactcgaggttcactttaaagtcaacaatctaacgcagcgctaccggcaggagcagaagacctttgagaccacaggcatcatcagcacctggaagttctacagtcaagtggatgatgtgtttaagagtctggccgcacacaccggttacaaagacaaacgcatgacaagtgcgtccaatacgagcagcttaccatccacatccgagtcaccagtttggaagaatccaatgtctcagcaagagtttaatagtaacaacacggaggggttctataagaccgagtacgggatgcatcggcactttatggaccactcccagccaccacccaatgccggcagcgtggacaacttcatggcctcatcggcggccgtggcggcggtggctgccgctgcctcagcccgcctggcggataacaacatggatcagcaaatgaacacggctgccggtggaagcggtggcagtggtggtggtgggggcaacaccaatggaggcgtggccaactaccagaagatcaagaagtcgcacgaggactacgacaagttcgtggacattgtgaagaacatcgtggacacgcacaagagcactcccgataaggtggacacgttcggcgacttcatcaaatcgtacatgaagcgctggccggagcggctgcaggacgaggccatcaaccacatcaccaactatgtgatcgtgaagaacatggagcacagcatggtcagcagccacaatcccgagggggtgaacaaccgacaataacaatacaagcaggagcccaacaactgaacgagttgttggacgacgcagctccaggaaccaggcacagaagccgaacgaagtgagacgttaggcgaggattacttaaggtggcgcgcagttacttaaccgcatctgagttgcggccaagttcattggacacacacacggcatacagtattttttgtatagttaaaatatacattggagttttagttctcgacgatcgcgccctcgatacagagttgacttccgtaaagagggggctggatcgatcaatcgtgcatagagatcctagggagtacattacatttagacaccatttcctactgttagctgtaaactattatgcataaattaataaatgctttaacgatt

SEQ ID NO: 12765 - protein, 308 aa, DROSOPHILA
MPYEKFNKKRRQWEDSGVLELIKLWKVCAYELRTIKRNGHLYVAMAKQLTSLGVPVTALEVHFKVNNLTQRYRQEQKTFETTGIISTWKFYSQVDDVFKSLAAHTGYKDKRMTSASNTSSLPSTSESPVWKNPMSQQEFNSNNTEGFYKTEYGMHRHFMDHSQPPPNAGSVDNFMASSAAVAAVAAAASARLADNNMDQQMNTAAGGSGGSGGGGGNTNGGVANYQKIKKSHEDYDKFVDIVKNIVDTHKSTPDKVDTFGDFIKSYMKRWPERLQDEAINHITNYVIVKNMEHSMVSSHNPEGVNNRQ

SEQ ID NO: 12766 - DNA, 3758 bp, DROSOPHILA
tgaccttccactgggccttcaggtcgctctctgtccaggccttgcgcacgatgcgcgtgggcgcggtgtaggggaacttgatgcggtacttggtcagatgcagattgttcaatctgtattcctgacggggcacgccagtcagaggaccatctaccagaacctgaaaagtgaaaagccattaattagtttggatcactttaaccatgtatggccatgaagggaggagtacagcaacaaatgctggttttgcttgcttgctttcagagggttaaactagcttcatttatgtgtcagttggcacttcctatcaagaagacaaattatcatcatgtgcaagagctcgtcacttggcaatttgttgctgttactccactatggaatgatgcacttactctgttttggtcaatgacgtcgacaatggccaccaggcgccccttcaggggaccggcggaggccttggcaatgcgaccagtttgtacgaatctctcgaaaggctgcaaacagagagaagtccattaaaaatgggtgaaaatgttggatttcggttgttgcatggccagcgcgttgcttgtgttggtgaccaccacgtgaactatttgaatgttggatatcccatggttttccaacgcttttacgctgctttcgctattcacacgttcaacgcactgacccgttcgcttggccgccaaatttaattcatctcgggccatttagaccgctgaattttcacatttttcaaccgatccgcagaaaccttcgtcgattcttaccatgacgctaaccggaaagaaagagaaggaaagaacttttttgacagctcggtggtagcatggcgttagtgttgctaaacacagagttgcatgtggtctagtgttgtgcagaaatagttaatgtgacagtaaatcatacacatcttatgtggtatttttcgctatcaactgttacagtcacactaagccaattcgatagatttcgatagtaaaaataaacattttggaataacataattacttttgtagaagttactttttacggggttaatttcaagcagacattttcccaacatggtttacatacacttccccaacaatttaaccgaagaggagcaaatgctgcaggccaagtatcagaaactcaagaaaaaggtgggaaaactcatgccacaaatgtgattatttatattaacaagtttttaacccgtagaaaaaggcactgcaagcgcacaaggcgcccaagccggagccggagagctccttgaccttgaagcgtcccacggatgcgcgagatgcccgtgaagtggccaggaaactaatcaaaagcggcgccattcccgccatccagaagcagaccaagcaagatcaaacctccttcaagcggcccaaaggacaggaaagagccaagcgctccacctcggaaaccactgttgcctcctaccagcccttttcgtctacgcagaacgacgtggcccaggagacgatcattagtgagatcattaaggaggagccgcgtcgacagaatctctaccaacacttcgccaccgagcgggatcgagaggagcgcggcatgcccgagaaggtgcccatggacacagcgcagccagagaagccacgggccggcaataccatcttcgtgtccggcaacaaggtcaccgaggatttcttaaaaaagacattcaacgactacggcaccattgtcaatgtctccatggagatcgaaaagaggtaagtgaacatggaaagtccatgttatagcttacatatatattttcccaactggagaaattataaatttatcctgtatggccttgcagtcgcggctttgtttccttcgccaaacccgagtcggcagatcgcgccattgcggagattcatggcaagaatgtgaatggcatcaacttgcaggtgcagttggctagacgccagccccagattgagcccattaacgatgcctcctcgtcggcagtctggtcatctattggtaagtgctcagtgtttctctataacttaaaaacgaaatcaaaccttatgtactccccaaatagccgccagcaaatcacaaaagggtagccacaaggaccaccgcgagatggttcaatacgatgaagacttcttgctctagagcgcaataattagtttctacgtttagctttctacttactttatcccttagtaacagaacacatttcagtttattttaaataattttgctttattgaaaatacgcttctatatatatgttcactttctggctaagtactcgcatttcaagttataacgttcaaatgaattcaatgaaaaagattgtatgttttgtatattaattcctacgttttgatctaaattaaacaacaatatgtttaacaattgaatctctcgctttgccttacgtggtagaaaagatgagcaaacaaaataagttcttattagtggtcctcgccccctcctcgcaagaaacagagaacgtcgtatgtatgtacatagcatgagttaagtaaatagttaatacatgatcgttgcttctgttgctatgctctgccatatagatttctatatcgttggtagacaacgttgaaaaatgttccctctatatttctggttagtacaagttagatgtcggtatgtgtgtgatgatgggtcattgaactgggattctggtttcgattgttttgtgtgactagtagcacgggcacgcccctgcccaacgccgcccccattggcgcacctcattcctaaagtaatttcttgttagtatcattaaggccttcaagtttcgagcggacacctggccgcgtttaaattcgtttcttcatcccgccaagtatcttggccagattcgatgctccaaaatgcaataccgctccaaaggataacaaaaccaggatgggactgcccacagtccctcacgtctgccttccatgatcgttcccgggcggattaaagtagtcccaatgatgggtgtgcacctgccgccccgttaacaggaataccaaaactgcgagcgtgatcgcgatgaagaggatcaccagtgctgatatattacgtgtcgcctgttgaggctccattgcttcacctcgaacatagtgcgtcagctggttgataatgttaaccagttccaggctgcaggcggaggcaaaattccgtcctgcttgagcaaccgtcttgggctgatcgtcgtcgtagtcttcatccaatggctgggtagcactgcgggtacgagagcgacgcgatcgcgagcgtggtcgctccaccaagtgttcctctggttcggaacctgattccggttcgaggggttcctggacatgacgacgtcgacatttgtgcggtgcctttcgctcgactgatttcaagtcctccgcttcctccgcctctgcgcttcgctgcagattaaagaaggctagtggggccaaggactgaaggtactcaacactgggataggctgtcggcggtggaggtagtggcaacaaaccggcatccgtctgggtctgctcgtccagattggatgcgggtggcacttgctcggtggtcttgctgtgacgaggtggcttaacgggcagctccttctcggaggtggcgggttcgctacttgcctgccgactagtctgggtttcagtggtaagcaaagatggacgctgctctcgctgcacccgctccacaatgtcatcaataaaaccaggcgggagttcgatattctgcaccaccagttgtccggacttgcactgcagatcgtctgctttgacttgattgccatgcagttgcgat

SEQ ID NO: 12767 - DNA, 1547 bp, DROSOPHILA
aacataattacttttgtagaagttactttttacggggttaatttcaagcagacattttcccaacatggtttacatacacttccccaacaatttaaccgaagaggagcaaatgctgcaggccaagtatcagaaactcaagaaaaagaaaaaggcactgcaagcgcacaaggcgcccaagccggagccggagagctccttgaccttgaagcgtcccacggatgcgcgagatgcccgtgaagtggccaggaaactaatcaaaagcggcgccattcccgccatccagaagcagaccaagcaagatcaaacctccttcaagcggcccaaaggacaggaaagagccaagcgctccacctcggaaaccactgttgcctcctaccagcccttttcgtctacgcagaacgacgtggcccaggagacgatcattagtgagatcattaaggaggagccgcgtcgacagaatctctaccaacacttcgccaccgagcgggatcgagaggagcgcggcatgcccgagaaggtgcccatggacacagcgcagccagagaagccacgggccggcaataccatcttcgtgtccggcaacaaggtcaccgaggatttcttaaaaaagacattcaacgactacggcaccattgtcaatgtctccatggagatcgaaaagagtcgcggctttgtttccttcgccaaacccgagtcggcagatcgcgccattgcggagattcatggcaagaatgtgaatggcatcaacttgcaggtgcagttggctagacgccagccccagattgagcccattaacgatgcctcctcgtcggcagtctggtcatctattgccgccagcaaatcacaaaagggtagccacaaggaccaccgcgagatggttcaatacgatgaagacttcttgctctagagcgcaataattagtttctacgtttagctttctacttactttatcccttagtaacagaacacatttcagtttattttaaataattttgctttattgaaaatacgcttctatatatatgttcactttctggctaagtactcgcatttcaagttataacgttcaaatgaattcaatgaaaaagattgtatgttttgtatattaattcctacgttttgatctaaattaaacaacaatatgtttaacaattgaatctctcgctttgccttacgtggtagaaaagatgagcaaacaaaataagttcttattagtggtcctcgccccctcctcgcaagaaacagagaacgtcgtatgtatgtacatagcatgagttaagtaaatagttaatacatgatcgttgcttctgttgctatgctctgccatatagatttctatatcgttggtagacaacgttgaaaaatgttccctctatatttctggttagtacaagttagatgtcggtatgtgtgtgatgatgggtcattgaactgggattctggtttcgattgttttgtgtgactagtagcacgggcacgcccctgcccaacgccgcccccattggcgcacctcattcctaaagtaatttcttgttagtatcattaag

SEQ ID NO: 12768 - protein, 280 aa, DROSOPHILA
MVYIHFPNNLTEEEQMLQAKYQKLKKKKKALQAHKAPKPEPESSLTLKRPTDARDAREVARKLIKSGAIPAIQKQTKQDQTSFKRPKGQERAKRSTSETTVASYQPFSSTQNDVAQETIISEIIKEEPRRQNLYQHFATERDREERGMPEKVPMDTAQPEKPRAGNTIFVSGNKVTEDFLKKTFNDYGTIVNVSMEIEKSRGFVSFAKPESADRAIAEIHGKNVNGINLQVQLARRQPQIEPINDASSSAVWSSIAASKSQKGSHKDHREMVQYDEDFLL

SEQ ID NO: 12769 - DNA, 3755 bp, DROSOPHILA
acgagtagaaagtggcagtggattatacttatgcccccgatccgtcagagtcgacgacttgcgatcaactgcgatcgcatcgtatcgaaatgtttgcttttatcctgtctcggctcacgattttgctatcggatgcattcacacggaaataaatcatggtgcagatgtcattggcaaaaaaaaaagtaagttactaactattgttgctaccacagatcaatagcttgtactaactagttgaagcaactaataatagtacagcttatacaacttgaatgtattcaaagatgatgcacgcatacttttactttcgagcttaacatctgaaacctggatattattcactcactttcgcttttatcaccaccacccccatagaacgttacggttttcactctcatggatcgtgctccaccttaagatagcagatcttgagaagtctccaagtcgacagaggtttcccctatcgggcgagttatactgcgctacggatcggtggcaatcttatctcatgtcgcatgtcgtcgggccttttattcgcacttaatctcatttcttgcacattctgcatatgtaaattgaccttcgaatcgcaactgggattggatgggatgtgatggagcagcaggcatttatgaaaatggaacgcacttacaatgcctcaatgaaaatctggggtatctgcaatggtacccattacacattctgttccatttcgcaaattaatgggttttatttaacgcgggttcattcttaaattaacccgaagtagttataatcgaattgagagagctatgcaaatagctttttccatatgggaaatgcggtgagcgttatgctgtttcgaatatcttccagatacttttctttgttgccaccaaagtgaagatagttgcacattccctgttctttgaaatccgaaactttacagatggattcttcgtggaaaactctatagagatataaagatatgaaatatatctactaagctattcccagcttaccccgttttggcgaaatccgtcatcagcgaagacattcgttgtataaccttggcatcttccgagtccttgggaaaatcatcgaagctaaccggaatgcgtatggtgtgcagaccatcatccatgtgaactgctccaagaccatagtcgtcagtggtgccagcaaaaaactttgttatagagtttaggccggcaaactcaaagatatagatgaatagtggattctcttcgagatttgcataggtgacatacgacgaaatagtttcataaatcggataataaaagttgaagtcaccagatatctctgccaatttcaacatggtatcgttgttaagactatctcctttaaagtcgtaagcatcaagtatttcgctgaccatctggacgggagttccctcgggcaggttaagcagcagggccatatgttccaggaagttctcattgaactctgcccgcagcttgggattaatgaaggcacgcattatgaatagagaaccttcaccagctcgcgaacttaggcttagtatccagggcatctggttaatgcgacctgcccgatgggcatctagcggatcctcgaccaggaaggcatcgggagatggagcctccagtactgggagagtggttagatggggcatgttatcccacacctttaagctgtccacactaacaaggagttttttaggacacacattacgtagcgcttccgcaagatcctgggaactgagactctccgcttgatcgatggccaattccttgcccagacgccttgcctgacttaggggatctttgagaatcttcatggccgacagaaacatggtgccagtcaaggacatggaattttggaaaagtcctgcaaacaagcgtgtgacttatttgcgatcaaaatacaattaaaaaacaaactgaccctttgaattggggctaatcatgtgcaagtgggcagatattccgccagcactgtgcccaaggaccgtgaccttttttggatctcctccgaatgtagctatgtgtttttgtatccactgcagagccaatcgctgatccttgaaaccgaaattccctggcatgtgctcatcgccagtgcttagaaaacctgcaacatttgatctccacgtgagtggtgtttttttttttgataatccctacaacttaccgaagggaccaaggcgatagttcattgttaccatgaccaccttgtttgtatccatcagatactctggtccactagccatcggatgggcagatccgctaaagaaaccgcctccatgtatataaaccatcacgggcaacttatcttcagcgcgattctataaaaccaaacccatcaggactatcttagaatgcttactacaaatcttgataccttcggtctgtagacgttcaggtagaggcagtcctccactcccatcaaaccccattcttttgcaaagtaacttctctgaatgcagctgtccttcgccgctccagcatcgagtactccctcccagggttcattcggcacagggttctgaaagcattcaatatacgtaatccttctgaaagtatgagagcaaagaacaatccacctttagacgcagcggtccaactggcggctgggcaaagggaatgcccatgaaggcttcgaactctccgctctgatatcctggcattagagtgcctcgcatacagcccatatcctccaggcacacatccaaggaatctccgacagcaacagctacaaacaatagtactccaaatccggcgaacaacattttgttgtgatatccattagtaaaacgctagctcacttttatacttcatctttcaacagagagcggtatatttgcaaattcaggtaatcatgggcataaataaaaaccacaattatcaaatcctaaaaggttttatttctgtcaagtagaaaagcgagggtaagctgccagccaacgctaatcgtatatgatacacagatgaattgacgtctacatagcctaaacacgcattcaaaccgaacttacgactaagaggtataattacaatgtctatacaacatggcgatttaactaacaatgtagaaattaaactaaattgcaggcctaggaaccggaactatgaatagaacaactaagtgactaccggtcaaatgggtgataaactgcggcgctgggcggcactcagttgcggatgccacatatctaggatgagcacaaggcgtgactggcttccgttgtgccacacctcgtgttcgaagctatcatcaaatatgaacagttctccctcacgccaggttctaaagcaaatcaggttagtcaatgaaaatggaaaggttttgtcgtttttcctcacctttcctgctccgccacgcggagtgatgctttttccggctccggagcagctagcgtgaggtgggccctcagtcggcaattggtgggtccacaatgcggccacacatgcgtcttggcctgcataacactaaacttcacttggccacgtcgacagccggcggactcgggaaattcctccagcaggctacaggtgattggggccctgcggcagttgtccttcacccgacgaccctgggcatatagctcatactgttgccacactcctttgtcgcgcagcagttccgcttcatcctcgaagaatccacttcttcccagcagtgctagtccttcatcgcgaatggcacgccaattgagcgtcagcttctccagctgcctttcatagcccgtttccttgggctgccaaaatggctgtgctctcaacctgggc

SEQ ID NO: 12770 - DNA, 1524 bp, DROSOPHILA
atgttgttcgccggatttggagtactattgtttgtagctgttgctgtcggagattccttggatgtgtgcctggaggatatgggctgtatgcgaggcactctaatgccaggatatcagagcggagagttcgaagccttcatgggcattccctttgcccagccgccagttggaccgctgcgtctaaagaaccctgtgccgaatgaaccctgggagggagtactcgatgctggagcggcgaaggacagctgcattcagagaagttactttgcaaaagaatggggtttgatgggagtggaggactgcctctacctgaacgtctacagaccgaagaatcgcgctgaagataagttgcccgtgatggtttatatacatggaggcggtttctttagcggatctgcccatccgatggctagtggaccagagtatctgatggatacaaacaaggtggtcatggtaacaatgaactatcgccttggtcccttcggttttctaagcactggcgatgagcacatgccagggaatttcggtttcaaggatcagcgattggctctgcagtggatacaaaaacacatagctacattcggaggagatccaaaaaaggtcacggtccttgggcacagtgctggcggaatatctgcccacttgcacatgattagccccaattcaaagggacttttccaaaattccatgtccttgactggcaccatgtttctgtcggccatgaagattctcaaagatcccctaagtcaggcaaggcgtctgggcaaggaattggccatcgatcaagcggagagtctcagttcccaggatcttgcggaagcgctacgtaatgtgtgtcctaaaaaactccttgttagtgtggacagcttaaaggtgtgggataacatgccccatctaaccactctcccagtactggaggctccatctcccgatgccttcctggtcgaggatccgctagatgcccatcgggcaggtcgcattaaccagatgccctggatactaagcctaagttcgcgagctggtgaaggttctctattcataatgcgtgccttcattaatcccaagctgcgggcagagttcaatgagaacttcctggaacatatggccctgctgcttaacctgcccgagggaactcccgtccagatggtcagcgaaatacttgatgcttacgactttaaaggagatagtcttaacaacgataccatgttgaaattggcagagatatctggtgacttcaacttttattatccgatttatgaaactatttcgtcgtatgtcacctatgcaaatctcgaagagaatccactattcatctatatctttgagtttgccggcctaaactctataacaaagttttttgctggcaccactgacgactatggtcttggagcagttcacatggatgatggtctgcacaccatacgcattccggttagcttcgatgattttcccaaggactcggaagatgccaaggttatacaacgaatgtcttcgctgatgacggatttcgccaaaacggggtaa

SEQ ID NO: 12771 - protein, 507 aa, DROSOPHILA
MLFAGFGVLLFVAVAVGDSLDVCLEDMGCMRGTLMPGYQSGEFEAFMGIPFAQPPVGPLRLKNPVPNEPWEGVLDAGAAKDSCIQRSYFAKEWGLMGVEDCLYLNVYRPKNRAEDKLPVMVYIHGGGFFSGSAHPMASGPEYLMDTNKVVMVTMNYRLGPFGFLSTGDEHMPGNFGFKDQRLALQWIQKHIATFGGDPKKVTVLGHSAGGISAHLHMISPNSKGLFQNSMSLTGTMFLSAMKILKDPLSQARRLGKELAIDQAESLSSQDLAEALRNVCPKKLLVSVDSLKVWDNMPHLTTLPVLEAPSPDAFLVEDPLDAHRAGRINQMPWILSLSSRAGEGSLFIMRAFINPKLRAEFNENFLEHMALLLNLPEGTPVQMVSEILDAYDFKGDSLNNDTMLKLAEISGDFNFYYPIYETISSYVTYANLEENPLFIYIFEFAGLNSITKFFAGTTDDYGLGAVHMDDGLHTIRIPVSFDDFPKDSEDAKVIQRMSSLMTDFAKTG

SEQ ID NO: 12772 - DNA, 12653 bp, DROSOPHILA
tgaggttaacacgcaagcgaacagcagacaacaacaaagaaccggccttgattatcagcggcaaatcgaatgcacgtacatgcgaaggatgcaggaggggatttgggagatggagtcggagctgaagctggagctggagcaggggtatatggtacagggaccattgcgttggagcaggggagatccgccgaaaaggaagtcaagtctgaataggccaaaagaaattctattacaatgttgaaatattgccaaatcatggctctggggtaaataaatttccacgccgccactcgccatgaccgctgaaccgggatggatggaaatggaggatggatccgaggctggaggatggatagatgctggtgcacggtaaataattgcgtgataaatgaaaatacaaaagtattgtatatatcagtaacaactagaaagtatatatatagaaatatatcatcttggaaagtgatgattcatatttcctgcctttacaatggattttacaaactataatatcaagcaataagacaaaaagacaaaataatatcattttaagctaataaattgaatgaatgaacgaatgaatgtatagatagatataaggatgatttcctagcggcgcgatatttctttctctgtgatcaggagtaccaggagcgttcatggaagctaaagtccctggccgtgtataaataagtaacctgatcccagcaacacgctgcccgacaggggcccaaaaacggcacacagcttcgcttcgctgcggatgggatgagatgggtatgggtatgggtatgggtcctccacagtaccaggtcccatcccatcgcatcgcatcggatcggataggtttagatcggagaaaagcggaacccgtttggagcttctgcggcagcagcgtcttgcggcattttgatttataggcgatttatgcacttggcagccgcggtgggagtggaactcgcagctgagatggaagtgggagagacgtcttgaccgaattcatgagcggacagctggccagggtttattacatattacacggtatacatatcataaggtaagcctcgacaggcacgggaatttcagtattatatcgtgtgcgctaggcgcactcacaatgcgctcggttggaaagcattcgaaatggttggtgttgactaaaagatgtgtataaggcaacgctgcggatgcggacgcatcttatcatcttatcatcttatcacggccgccgcttatctgggtgaatcaacagcaacagcgttcgcctctaggccttcgcaccgggtgccctgttggcgaagaaccacatcaggcccatcaggcagctgggcgggctgttgttgacggctccctgttggatcatccgcttggcctcctccagggacagctccaccacctcgatgatctcgtcgtcgacgccgccaccacctgtggccttgtccgcatcggtcacctcgcagtagtacatggtctgcttggcacccgatgaaccaactccagatctgcaaaggattgagttggttatgcatcaagcaagttgtgaaggatggattttgaaaaatcaattaagatatttaaaattgtatattctattctatttatataacaatatatgcacacccatttacctgtagaccatgacttcctcaatgcgttccacgggcacatcgtagccacactcctcgaccacttcctcccgagcgatttccacccagcttttgtttttgtccacgatgccggcgcacagttccaaggtgacaccgatggcgggcgggaactccttgaggtccacctcatcgaaggtgcccttggcgctggagatgatgccgtggtagacggcgggtcggaactggcggaccaggaccagtttctggcgagaagtgttgtacaagataatagccacactatcgtggaccttcagcaggtcccagttcttctccacgccattctggacgtagtacagccggaagggctttacgtacggcgaatcctggggcaggggacccagccaaatcttggaaacgttctccatgctgaaaaagtggacttggtgcacgaaaacacggcagtggcaatcagctgactgcgaaagctccagccggcggtgggtagccacaatcagatggcagcttttatctcgggagagcttttttttgacgtttaatgccaggcagcagatggtaatactattcgaatttgaaaagttcgttacaacaagcaaaataaattaattaatatattagctaattagtatatttaaagtgtttaaccctactatgctaagctaaaaccttgggtgccttgtgctgaaagaaccaaagcagacccagcaaacaggatggtccaccattggtggtcgccccagtttggaccagctgcctcgactcctccaaggacatttctagcacctggattcgctcttctccaatgccaccgcccgccgagaccttctgagcatcacacacctcgcagtagaacagagacatggcactacttgaggtaccaatacccgacctatagtcgtagacatgctgcagggattcggtgggcacctcgtaaccgcactcttcgaggacttcctccttggcgatctccgccaggcttttgtccttgtccacggcgccaccgcaaagttccaaagtgactcctacttcgggaggaaactgctccagatcagcttctcccttggacatgtctggtgatccagccgaatgtattccctggtaaactgctcccctaaattgacgcacgaagattagtttttccctcgctttgttgtacagaatcacgaccacaccatctatggttttgataatgtccacctgtttctccacatcgttttcgatgtagtgaagtcgacctggcttaatccaattcgaatccttgggcatcggaccaaaccaaatctttgaaatacaacttggctggatcttgaagcccgatttggctgacgagcagcaggagcgacccaaactgcccagtagtcttaacatgttttgtgtttttgaaaagcatttcgatggtttttaaatagttatgaatgattttccaacgtttgtttgtttagtttaataagttttgtaacacaattttaataatttgtttacacaactgcataaatgtactataatatacatatatccccaaaaagggtattaatcattaggtcaagtggtcaaaggttgcgattcttgaaggggcggttgacatcaataaaatttaggaatatttcaattatctcattattattacatacgatacgagcacaatattaccattaaatggaacaggatgtttgcttataaatattcaatctcgcccgcccccacaactcctagtcgaaccagtcacccatgtccagcatgcagagcacatcatcatttggcggcatagcaattgtcacacacacgcactggtttccccggctgaccctgggcattgaggaggggcagcgtgtgctccgaacaggccttgcagaaaatctcgccgcagctgcggcagtggtgcttccgtcgcgtaagattgaactcccgctcgcaggcggtgcagtgggtggcaatggagtccggtgcccagatccccggactacccaccgcctcgggcatggcttgcagcgattgggcggagccggagagcagctggcgctggcgacgctcctgatcctgcatctccgacacctttagtttgctcacgctcagctggatgccgagctcctccagtgtcgtttgtgcctccgaccattgcgttcgcaccttgtccagatcagccttcagcttgccattcctctccttctcctccgacagttccttgaggcagccctgcagattggctatcttctcctttagcttcagctccttctcctgcagcgatatccgccactcgcgttcgatcctcgactcggcctccgcccgggcagcccgctcctcactggcggtcacctgggtggtcagtgtttgcgacgtggtcttgagaatctcccccaggttgctcttatcatgactccacctgcggaggggaaaaacaggggtttatgaggatttctttatcttgcgtatattcggaaagtaacttcatgatccagaagctaacaaaattagctccggatcagtaccttccccgccatcttacttcttctccagctgatcgatggtgctggccatgtcctccttttggacctccaacttggtcatcagctccgttttgtgcgttaacgacgccttacagtcctgccaacgaagaaaataatcggatgtaccaacgttgttgtaatctgtcgtcgttaactttaatctcgatgttagtatggtggaaaatgaaagacttgaggttcggataagttttatttctctgggttcgatttggaggagtacgtggattagaatatatgcagaagttccaacgcgtatagtacattgcatggatttgtagattcatatagtctcgatatttattcatagtatataattacaataatattattatttgtatttgactagactgagtgtataattacaatataagcgattgcgtgggtatcccatacgtacatacatatgtataataaacatctgaagcctcttaatcacactatacatatatacaacgacgtatggttacaatataatcgtacatatataatctttgtttacggggactctgggtagataatttagctaacaggttgcatacataagttattcaaaacaattctggtatctggtatactttcctctaaaaggatctggtctacggagtaaaggcatcctatatatggtacacactgtctatggtgttcatttagttgtggtctcccgaattgagagtcttgttaagcagtttgatttcccttcggcacctggatccggactttgagtggcgatccaggtccttggaatgttgagagcaatgcaggccgttccgattttcacatgctaactttagtggactgatctttggatcagacattacatagatcattatttcaaagaggatctctttagaaagccaaataatagttgaacaaatgaatttatgcttaggtttaaatgcagtcaggcactaaatacattgagtaaatatattaaactagtttcagattagatttcaattaaaaaaaaaaacgaacaagttaatacatttatgtagaactcattctgtgaaaaccgaaactggccttataaattaagtatcttaagtattcttatttagccttagcttagcttaagtttctccatcggcggcctgctcgcggcacaggacataatcgctttgggatgcatccaccccaaagtgctgggtcaccgcagccgccgcctcggctagctcatcgttcagggacttggcggacgtgggcgtcttggcatccttgctctgctgcagttcctccgtgttgggcgcatccggctggcgcggtgacttgcgatacttgctgggatcgaagggcggaaaggcgtccatcttgagatgcatacgcttcatgggcgggccagcgtcctgtttgtgcttcttggtgagcgcctcgaacttttccagattctgctgtcgccgcgtgttcggcgatcggtctccgccaatggctccgttcccagctccagttcctgctccagtgcccgatcccgatcctggtccatggtgttgctggtcgatgagcttcgattcgtatttcttttctagcgattgtaaaatgttaccaatttgtgaggctttcgtttgcaggcgcgagaccatctcgcccttctgtgtgagttcatcttcacattcctggttaaattttagacgggattactttttgacttgaaggcttaaaccgatttacttggagcaaatgactaaactataaaccaaagcttaaaacacaaagtgaaatgataccagagctacgaaccagatgagcgaatgaatgtggatagatgagttgtgagcagtgtaatgagtgtaatgagaatgagtcattttgtttgtccgcccaggaaatcaaatgcagattacccagactccaaccaaaatagacccaccctgatgatgactactcacctgcagctttcggtacatctccaggttgatctgcttgatatcgtccagctggcggcgcagtgagactatcgtgtcctgcttttcgtgaatatccttctccagcagtttcatggccatgtccgattccgccttgagggacacctgcaatttgagctccttctccagctcgctgttcttgcgacgctcctcaaccagctcttcggacgccttctccttgtccttgtcggatgaaccacccgaaccagttgaattgttgtcccctgccgacgtggactgtcgcatggcctggttctcggcctgcaaggccaacaagctattccgagcgattgccaaatcctctttcatcagggcatttgtggtcgttaaggactctactttggcctgcagattgcccacagtggcgctgaaaaatgaggaataacttagctggggaggcacttcataacaacagccgaaacccactttagatgcctgttgagctcctcaatgtagttcttctggtccagcaccgcaatcatgttgccctgcccagtggcatccagcagagcaggcggagcactgtcttctggagccgcatcggcgtttctcgagcttgaacgcaggtacaacgagaagtcgatgacgccctgctgtgagtccagatcctcctccttgacgcacagattgcaatcgatcacgtttaagcccaccaaaatgcccattatcacaacgatctgaagcaggaagagatggatgggttaaagggattccttgagaagattgcgcgcagcctaacctcatcgctcatcatcagagcatgtggctcatagtagtcgaagagtgaatcctcccggtgctcgatgagtgcctgcaggtaatccgatagcttcttttgcatcaaagcgatcctcagccaggctcgagcgcggccaatgtgggtacgaacggtgggcagatcccttacactcgccgtaatgtcctgcgcctccgggcagtaatgctcgacgctctgcagcagatcccacaattccttcctcggtcccagcagacccttcttcgggcgcaatccatgccccaggacatgctcgatgacgatgaagaaatgctgcaacggcaggtgatccgagtccagcatgcgaccataacgcagcgactgctccaacagctccttgaccaccagcttgcagatattcaccagattactgcgctcaatttccgccgtgtcccgggctgcaaatggaggaacggtggttcccagattaaagactcggccggcgcagaaatttgcttcaaaacaactgacaactgattaactgagtaatgaaacttcatgtgctctcctggctgcttttctttctggcacccgggggttgtcccatatacagcatcgacctggctactttggaggtgcccacaaacgatttccaaaacgaactgaccctgcaatccatgctcagctcggagctgcgggattaccgcaatggcctgatcgagacggtcgatgaacaggtgaccaatcctccctattccccgccgcgcagataccaagagcatgaatggtttaaggatctgcccaacgagctgcaaaaggcgacaaggagtaccacagaatcggactcattcctgggcaccaatctgtttggcaactaccgcaagaattgcttttccacggaggacattgctatcatatctgcacgcaaagacttcgagctgctggtgccgaaatcctttccacaatcccttctcaccgacagccttgtctacatgcttctccggtactttaatactgttaaccagatcgtgaagcgaatgtcagacgatgatacgcggctcatcatgcagagagcattctacgatgccctgggtggctatctgcgctactatctggtgcccatggcccagttatccttctatgccggacgcatcaagctgaacaccgtggagcgcttggtgaacatttatcagcagtgcaaaacgacgctcaatacgaacggaaatgggtggcgagctccggacaaggatatattgtcgcagttcaaggtacgaaagatcgaacccgtcaagctgcccaagagctgctattcccaggaggatgcctccagctgtgctcaactggatcaaacatgcatttcccaagagccggatcaagggagcatgattgtgagcctgcctcgactggagacgctcgatgagaatggctatatgggcaacatatacttgccctttcgaaagcgacgcatctacaatctgcgttctcccaaatcggaatttgtcgtggtgaagttcttccaaaccctaaccaactgtcatcggtttcagggcattagccaggctaattacaatcgccagttgctcgcctggataaaggaaaatctggaaatgcactatggcgatgatgtattctacccgggtctgggcggtattctgcagattcaggagaggctgtcgaaagaagcgaagaatgcggaggaggaggcccgggcgccaaccaataagaatgacgggcagggatcaccatcctgtcccaaagaggactcccgcaagatgagtcgctccgctattcactggcaggaggcttcagggccagtcgaggagtcggggccggagccaatgcaccaggacgaatggcttaccggattggataaggttcagagtcggccggaggaagtggaagagtgccgcgagtgcgacaacgatgagacactgatctggtgcattgccgcctttctgaccctgcttctgctcctcattctgctcatcatttgctgttgcatgcgaaggggcaggaagaagagggttgccccaacggatgcagaggctcctccgccgaaagagaggccaagaaaagaaaaggagccgctgaaagccaaagaaccagagaaggaaaaagaaaaaaaagatgaaaaggacgaaagtgatgctactcggcggtactactactccggttctggtcgctccacctcacaaagatcggtgccgagcaatcgtaagtcaaataagtttgtggcaactaaatcaactaaatctaactgctcgagtttataggatatgcgaataatcccgagctagattccttcacctcatcttcgtcgctgggatgtcagttcaacaggaagtgcatgccactgaagttctcccgagcgaaaggaggggactactacgcaccggacaagagccgagatgcggtgggaaagcaggtcacatccctcaaacttctttccgatgattcgtctcctagccgagttccctacagggacgtttgtaagcccgctctaaagtcgaccctatccgtcattccctcgtcggacagcgaagtggacagcagagaggatagacatcgacataggcatgcccgcgaagaagacaggcggaagaagcataaggactttgagacgggtcgtaagaaagaggtaagttatcagtgcttcgcgtgcttttgatatcctgaactcagagtcaccagcagaccaaatcctcagaagacaaaaagcagccatcaccagaaaggcgattgtccaaacaagtgaggataggtaagtgcatgactggtcatttcttaagcctaatcgattcattcacttaatcctctgatgctgccatcttaaaagcaacaccggaaatgtacaaggatacatccgatgatcctcttctgcacaggaagaagtcgcaggagaaaccagatgtccctgccggtcgacagaagggcggtgcagaggtgagtgggatgtgcaaaatgttatatgccaaaataatgatcttgacggtttttcagtatttaaaggactctcccagctgggaaacgacttttgacgataactagttggcaattttttaaccctttttcgttttttaaccttcctatttcttaagtgtatattttttgataagttaataaaccctatgatttttaacttttccatttctccattgaaaggaaaatgaagttttaaaatgggagttttaactgcctaattgaaatcctaatccttagggtatttcctaggtaaatcacttaacttttaactaagagcaagcaactaaatgtgcaacaatgcaaagaggcatgcaacaagatggaagattacaagggccaataaaatcgagaacatagatctagccattcacacattttaaagactttcgtgcttgataagaatctgtcgtcttctataaaagctaatgtctacacaataaacaaatgccaatatcttacgaagaaagataaaaatgttaataaaaaacaatattttaagaaaactaataacgtagaaaagtctgaagcctatagaatatgatgacttgactcttcgagttcttcggatttgtatggcccttgcaatctaacgagaaatgaagagaaactacaaagtaggagcgtgcttggcaacagaggcaacaagaagcgacctacagagatgcgaccactcggcgaagaggccaacactctggtgctgcgactgggagtgcgactgggactggccgagtgccgaggagccactattgaccatgtcgcacagccggcggccgataaggttttcaattgccataataccattgtcggtgatgtccaagccgcctcctccaccggcgttgccgccacttccactgccggtggacagtccggagaagcgtttgctgttgcgcttgctggagctggagcccacattgtagttggacccgaagccgcccgtttgggaactactgccgcctgccagtttctcactggtctgagctgcctggttgcccgttccgccggccacatcaatgtcctgcagctccttgaggcacagccactcgccatcgacggatacccggaaattgcacaggtaaatggtgtcctggacaccgccggctagctcctcgctggtgttggcatgcgatgcctttggcaaggcaatcgtattgctgctgttgctcgcctgttgttgctgcaacaccaggggttgctgctgtgtctgttgcggttgtggcggctgctgtttcggctgcacttgttgtgagggtggattctgacccttttggctcttcgccgctgctgcttgcgcccttgttgttgccgttgctccaattgctgttgctgttgtgccagttggagttgctgccgtggcggactttgcagacttgcctacttgttgttgccccgtttgaggcgccttcttggcagccattgttcctgacgacaatgacgtcgcgctgcccgatgttggcgttttcactgcacttctcaagggcttcgagctgctgccgctggcacttgatcctgttgcaaggctgctcgacttgatgcgaccgctgccgctggtgctgctgaggttgttgttgttcgccgacgacaacttggtcctttttgtatcctcgacaagtccacgcatttcgctgctgcttcaaagtacgcctgagtagtgtgtgtgtgtgcgtgggcgtccataaaaatacagatatatacatatatcgatattagctgttcaataagttccgagtttcctttgctgccgctttccctcaactgttttttcattaccttagaggggttttttccttttgtaaacctcttttccagagggttttacttctgaaattaacaaaataaccgaaagttctcgccgctttgattttgcaccgttatcctgttgtgtacgcgttgagtaagactggcaaaaagttctttatcctattgatttgtccagtgcgccaagctcgcaagctcctcgcgagctttcgttgggggtgttctcgatggtcacgctgtgtgtggtgcgcaaatcacctttgacactttcccaatgcacttttaagttatttttaatcatattatttatacaagtaccgaaatatttcaacgacagtttcgcacagcccacgaaattgctaatactaattaataaatacattttagaatagttttgagtacctaaattgttatattaaatatatatgtgtatatatttatatatattatatataatatattttatatatgcaacattattacttaacatattattattagcgcacaatggaaatttggtttccattgctgcttatcatcgaatgaataataattcggactcaccgcgtttcagtcgctttgctttcagtttcgatggcgacggggatgaagcactggcgctcgccaccgtgtccggcgcaacaggtacaacaggtggtgcgggctcgtcgggatacgggtacgtggtggtgccatcgattacctcggaagaggcggctgctgcggccgcattcgagaactgtgtggatatgtggctgaagatctgcgaggagatgctctccgtgcgccggaaggtgttccgcaggcggtccagcgatgacgtgggggcgctgggcgcaggcgcggcacctccggtggtgggcgtaaccggaatggagacactcgaggattgggagtcttcactcctttcgcggcgcaccagcagatcgtccgtgctcatggcgaatcacttgcttcgcggcgattatcaggacactgtgcggagtcacatgaatcaaaatgacgcgattacagccgctaatttcgcttgttttgcgcttgaacgcgggtaaacaaaaaagtttgtcaatacaaaattaaaacagctgttgcactgcgattggggatgggcgataacaatcactggttacag

SEQ ID NO: 12773 - DNA, 4466 bp, DROSOPHILA
cgcgtacacaacaggataacggtgcaaaatcaaagcggcgagaactttcggttattttgttaatttcagaagtaaaaccctctggaaaagaggtttacaaaaggaaaaaacccctctaaggcgtactttgaagcagcagcgaaatgcgtggacttgtcgaggatacaaaaaggaccaagttgtcgtcggcgaacaacaacaacctcagcagcaccagcggcagcggtcgcatcaagtcgagcagccttgcaacaggatcaagtgccagcggcagcagctcgaagcccttgagaagtgcagtgaaaacgccaacatcgggcagcgcgacgtcattgtcgtcaggaacaatggctgccaagaaggcgcctcaaacggggcaacaacaagtaggcaagtctgcaaagtccgccacggcagcaactccaactggcacaacagcaacagcaattggagcaacggcaacaacaagggcgcaagcagcagcggcgaagagccaaaagggtcagaatccaccctcacaacaagtgcagccgaaacagcagccgccacaaccgcaacagacacagcagcaacccctggtgttgcagcaacaacaggcgagcaacagcagcaatacgattgccttgccaaaggcatcgcatgccaacaccagcgaggagctagccggcggtgtccaggacaccatttacctgtgcaatttccgggtatccgtcgatggcgagtggctgtgcctcaaggagctgcaggacattgatgtggccggcggaacgggcaaccaggcagctcagaccagtgagaaactggcaggcggcagtagttcccaaacgggcggcttcgggtccaactacaatgtgggctccagctccagcaagcgcaacagcaaacgcttctccggactgtccaccggcagtggaagtggcggcaacgccggtggaggaggcggcttggacatcaccgacaatggtattatggcaattgaaaaccttatcggccgccggctgtgcgacatggtcaatagtggctcctcggcactcggccagtcccagtcgcactcccagtcgcagcaccagagtgttggcctcttcgccgagtggtcgcatctctcccgggacacggcggaaattgagcgcagtaatctggtgaatatctgcaagctggtggtcaaggagctgttggagcagtcgctgcgttatggtcgcatgctggactcggatcacctgccgttgcagcatttcttcatcgtcatcgagcatgtcctggggcatggattgcgcccgaagaagggtctgctgggaccgaggaaggaattgtgggatctgctgcagagcgtcgagcattactgcccggaggcgcaggacattacggcgagtgtaagggatctgcccaccgttcgtacccacattggccgcgctcgagcctggctgaggatcgctttgatgcaaaagaagctatcggattacctgcaggcactcatcgagcaccgggaggattcactcttcgactactatgagccacatgctctgatgatgagcgatgagatcgttgtgataatgggcattttggtgggcttaaacgtgatcgattgcaatctgtgcgtcaaggaggaggatctggactcacagcagggcgtcatcgacttctcgttgtacctgcgttcaagctcgagaaacgccgatgcggctccagaagacagtgctccgcctgctctgctggatgccactgggcagggcaacatgattgcggtgctggaccagaagaactacattgaggagctcaacaggcatctaaacgccactgtgggcaatctgcaggccaaagtagagtccttaacgaccacaaatgccctgatgaaagaggatttggcaatcgctcggaatagcttgttggccttgcaggccgagaaccaggccatgcgacagtccacgtcggcaggggacaacaattcaactggttcgggtggttcatccgacaaggacaaggagaaggcgtccgaagagctggttgaggagcgtcgcaagaacagcgagctggagaaggagctcaaattgcaggtgtccctcaaggcggaatcggacatggccatgaaactgctggagaaggatattcacgaaaagcaggacacgatagtctcactgcgccgccagctggacgatatcaagcagatcaacctggagatgtaccgaaagctgcaggactgtaaggcgtcgttaacgcacaaaacggagctgatgaccaagttggaggtccaaaaggaggacatggccagcaccatcgatcagctggagaagaagtggagtcatgataagagcaacctgggggagattctcaagaccacgtcgcaaacactgaccacccaggtgaccgccagtgaggagcgggctgcccgggcggaggccgagtcgaggatcgaacgcgagtggcggatatcgctgcaggagaaggagctgaagctaaaggagaagatagccaatctgcagggctgcctcaaggaactgtcggaggagaaggagaggaatggcaagctgaaggctgatctggacaaggtgcgaacgcaatggtcggaggcacaaacgacactggaggagctcggcatccagctgagcgtgagcaaactaaaggtgtcggagatgcaggatcaggagcgtcgccagcgccagctgctctccggctccgcccaatcgctgcaagccatgcccgaggcggtgggtagtccggggatctgggcaccggactccattgccacccactgcaccgcctgcgagcgggagttcaatcttacgcgacggaagcaccactgccgcagctgcggcgagattttctgcaaggcctgttcggagcacacgctgcccctcctcaatgcccagggtcagccggggaaaccagtgcgtgtactactgggcagtttgggtcgctcctgctgctcgtcagccaaatcgggcttcaagatccagccaagttgtatttcaaagatttggtttggtccgatgcccaaggattcgaattggattaagccaggtcgacttcactacatcgaaaacgatgtggagaaacaggtggacattatcaaaaccatagatggtgtggtcgtgattctgtacaacaaagcgagggaaaaactaatcttcgtgcgtcaatttaggggagcagtttaccagggaatacattcggctggatcaccagacatgtccaagggagaagctgatctggagcagtttcctcccgaagtaggagtcactttggaactttgcggtggcgccgtggacaaggacaaaagcctggcggagatcgccaaggaggaagtcctcgaagagtgcggttacgaggtgcccaccgaatccctgcagcatgtctacgactataggtcgggtattggtacctcaagtagtgccatgtctctgttctactgcgaggtgtgtgatgctcagaaggtctcggcgggcggtggcattggagaagagcgaatccaggtgctagaaatgtccttggaggagtcgaggcagctggtccaaactggggcgaccaccaatggtggaccatcctgtttgctgggtctgctttgcatggagaacgtttccaagatttggctgggtcccctgccccaggattcgccgtacgtaaagcccttccggctgtactacgtccagaatggcgtggagaagaactgggacctgctgaaggtccacgatagtgtggctattatcttgtacaacacttctcgccagaaactggtcctggtccgccagttccgacccgccgtctaccacggcatcatctccagcgccaagggcaccttcgatgaggtggacctcaaggagttcccgcccgccatcggtgtcaccttggaactgtgcgccggcatcgtggacaaaaacaaaagctgggtggaaatcgctcgggaggaagtggtcgaggagtgtggctacgatgtgcccgtggaacgcattgaggaagtcatggtctacagatctggagttggttcatcgggtgccaagcagaccatgtactactgcgaggtgaccgatgcggacaaggccacaggtggtggcggcgtcgacgacgagatcatcgaggtggtggagctgtccctggaggaggccaagcggatgatccaacagggagccgtcaacaacagcccgcccagctgcctgatgggcctgatgtggttcttcgccaacagggcacccggtgcgaaggcctagaggcgaacgctgttgctgttgattcacccagataagcggcggccgtgataagatgataagatgataagatgcgtccgcatccgcagcgttgccttatacacatcttttagtcaacaccaaccatttcgaatgctttccaaccgagcgcattgtgagtgcgcctagcgcacacgatataatactgaaattcccgtgcctgtcgaggcttaccttatgatatgtataccgtgtaatatgtaataaaccctggccagctgtccgctcatg

SEQ ID NO: 12774 - protein, 1351 aa, DROSOPHILA
MRGLVEDTKRTKLSSANNNNLSSTSGSGRIKSSSLATGSSASGSSSKPLRSAVKTPTSGSATSLSSGTMAAKKAPQTGQQQVGKSAKSATAATPTGTTATAIGATATTRAQAAAAKSQKGQNPPSQQVQPKQQPPQPQQTQQQPLVLQQQQASNSSNTIALPKASHANTSEELAGGVQDTIYLCNFRVSVDGEWLCLKELQDIDVAGGTGNQAAQTSEKLAGGSSSQTGGFGSNYNVGSSSSKRNSKRFSGLSTGSGSGGNAGGGGGLDITDNGIMAIENLIGRRLCDMVNSGSSALGQSQSHSQSQHQSVGLFAEWSHLSRDTAEIERSNLVNICKLVVKELLEQSLRYGRMLDSDHLPLQHFFIVIEHVLGHGLRPKKGLLGPRKELWDLLQSVEHYCPEAQDITASVRDLPTVRTHIGRARAWLRIALMQKKLSDYLQALIEHREDSLFDYYEPHALMMSDEIVVIMGILVGLNVIDCNLCVKEEDLDSQQGVIDFSLYLRSSSRNADAAPEDSAPPALLDATGQGNMIAVLDQKNYIEELNRHLNATVGNLQAKVESLTTTNALMKEDLAIARNSLLALQAENQAMRQSTSAGDNNSTGSGGSSDKDKEKASEELVEERRKNSELEKELKLQVSLKAESDMAMKLLEKDIHEKQDTIVSLRRQLDDIKQINLEMYRKLQDCKASLTHKTELMTKLEVQKEDMASTIDQLEKKWSHDKSNLGEILKTTSQTLTTQVTASEERAARAEAESRIEREWRISLQEKELKLKEKIANLQGCLKELSEEKERNGKLKADLDKVRTQWSEAQTTLEELGIQLSVSKLKVSEMQDQERRQRQLLSGSAQSLQAMPEAVGSPGIWAPDSIATHCTACEREFNLTRRKHHCRSCGEIFCKACSEHTLPLLNAQGQPGKPVRVLLGSLGRSCCSSAKSGFKIQPSCISKIWFGPMPKDSNWIKPGRLHYIENDVEKQVDIIKTIDGVVVILYNKAREKLIFVRQFRGAVYQGIHSAGSPDMSKGEADLEQFPPEVGVTLELCGGAVDKDKSLAEIAKEEVLEECGYEVPTESLQHVYDYRSGIGTSSSAMSLFYCEVCDAQKVSAGGGIGEERIQVLEMSLEESRQLVQTGATTNGGPSCLLGLLCMENVSKIWLGPLPQDSPYVKPFRLYYVQNGVEKNWDLLKVHDSVAIILYNTSRQKLVLVRQFRPAVYHGIISSAKGTFDEVDLKEFPPAIGVTLELCAGIVDKNKSWVEIAREEVVEECGYDVPVERIEEVMVYRSGVGSSGAKQTMYYCEVTDADKATGGGGVDDEIIEVVELSLEEAKRMIQQGAVNNSPPSCLMGLMWFFANRAPGAKA

SEQ ID NO: 12775 - DNA, 3689 bp, DROSOPHILA
gagttcgcagaagagtggatgcgaattttaatgaatatgcgctatatggtcgtcgtggtcccgtccacttccacttccatacccgcctccagtgccacgtccgcacataaccactcatcactcggcctcctttgagccggggatcgagccatccgaatcctgcaaatgtttcaattttacgtgccactgtttagtgctgcggctgccggcactgggttcgattttgatttggctccagcccgtaatgagctgtaggagttttatgggccgtcggcggatgcagtcaggttgggtcctgcaaacatgtatgcgaccataaaattgatggaccatcgcaagagtgtgtggatgaggcatttggtgctgccagctcaacttatcaacgcattgtatttggcttgaaatggtacacaggaactatggttggatacaaaatggatgtggcttaagtcaccttcttaaaatctgtatattttttcgatattaataaagtggagttctcagcattggacagcacgcatgctgctagtgacttgtgcttcaagtctctttgcattattgaacttattttttaaatacgacttcttagaaaatatgtaagaggacctggctaactagccagtttggtctaaataaagccaaatcggcatacatggtgctctatctgccgccggccgtggcagcctcatcaatttgatgtcgtgcacatttaatgcggtgttgagggcgcgcggatgcataaaaaaccgatgcctgaacccagtccgcgatccaacgaggccataaattactaataaaagccgcatgtgtgtgtagttgacggggtcgcggctttagtgtgttaaagcggaaatgcgttgggcgccattttgtgcacggggtgtgtatataacggcaatggcagggcgcaaacaaatgtgcggcctattgacacattcggcgtgacacattttgtagggtaaataaattgtgtaaatctcatgttcggctaacgaaatcctaactaaattctccatgaaacccttagcgaaatagagtgggcaacgaaaagagctcacgcaaatatgacggccatcaaacatgtggccatctcctgtcgccgagcattgaccaaatgtgcaaaaattggccacactacagtgtccgtgagtcggtccctccggaaactgtcacccacggcgttcaagacacttcgacaagcaatcgccaaggtggggcacttaaacatcatgggtcagaagatacgactgaacgatcgggaattagcggccaacaaagtgatcatggccgtcaagaaggaagagatatccaagggcatactggatcccagtcagttcacgccgggccagcacatctttaagaccctggccgaggtgcaaaagtcgccgatctttaacctgattaagggtatgccgaagggcggcgcgcttcatgcccacgatacggcgctctgcagcacagactacctcataagtctgacctaccggaagaatctttggatttgtaccgctgaggagggctgcaaggccattgctttccggttttccaaggaggagcccaaggaaaaacctgttaaggaatctatctgggagccaatggaggagttccgtgaacggcgaggagaggagaatgttacaaaatatctcacacgtcgattcagcatgtaccccttctccaagttcatatcaaacaatcaagcctgggcacacttcatgggcatctttattttgctcgacggtttgctctgccatgcccccatttgggctgagtactactacaatgccctcaaggagtttgccgaggacggagttcaatatctggaactgcgatccctgctcccgccactctactgtattgatggcgatatgctgaccattcgggacacagtggccatttacaactcggagctggaacgctttcgagccgatcatccggattttattggctccaagctgatatacgctcctctcagaggagtggagcccagtgtggtcgagcaatatgtgaaaacagctgtcgaacttaatgtaagctaaataattatgatgggactttgatttaccttttttttttgctcactttttaacagaaagaatttcctaacttcatggttggctttgatctagttggccaagaggagttgggacgaccgctgattgattttgtggagcccctgctaaaaatgcccgagcacattaatttttatttccatgcgggggagacgaactggttcggatctcccatcgatgagaacctggtggacgccatcctgttgggcacgaaacgcatcggccatggatacgccattaccaagcatcctatgatgatgcgactggccaaactattgggcatagccatcgaggtgtgtccggtgtcaaatcaagtgctgcaactgggcgtggactatcggaatcatccggcggcactgctgttggccgccaatgtccccattgttatctcctcagacgatccatccttctggcactgtgctccgctgtcccacgacttctacttcgccttcctgggcattgcaccgatgaaggcggacctgaggttcctcaaaagcctggccatcaactccatccggtacagtgccctggttggcgaggaaaagcgagtggggtaccgaaagtggcaggagaagtgggacaagtggatcgacgacgtggtggagcacaagtactgttaatgacccccttttagtaaataactcatgctgccttttattttcgcatttaatttactttgaatttcgccggcacacggataactctgacgctagctaagagttgacttacatcgatacatttgatatgggtgatggctaagcctcgctcgtcacatgacgtaaatcagagaactcgattcgggatattttcggggatatgtgtggttggggtataacgaaactatgactaggatcctcgtagctggcgatcatcctggctctgtccatttacatccatctaaattctttgttcaagcagagtcttaggcatacatacgtgtagatcggaatacaagtgagtatatagcacagttataacttgaatgcacacggatctcgcatttgctcgtttggtttagagttgcttaagccttttacatctatattattaaaattattattaccatatacgtcattattgggcagcattccattctaatgatcttctgaaaatgttccattttcatttcatttctattctctttttgtcgcgcttgtttctgtgtatacatagatgcttgcaaaaatattttttaatttccggcctgtgtttgttatttgcccttggtttagtactaaccctatcgttcacatacctaaacttactgcctcgatatgttcaaatcctaagtataacttgcatcgcctctcccatttccctttacagtcctaaccatccttggggccttaagtatcgctatgctgtacaaatcttaaactataccccttcgctatgcaactgccttatatccttgccctcggccgatcgaattctatcttatagtttgcgtgcgaatcgtttacgctatgtgttttgctgccagtggtgctgctgtcgcaacttttcggccttccaactggattcgcccacacttggcggatagggtataatatccggctgctgttccgaggacatgttgtccacatcgttgtggtcgaggttgttgccgctgtcgaccac

SEQ ID NO: 12776 - DNA, 1627 bp, DROSOPHILA
taactaaattctccatgaaacccttagcgaaatagagtgggcaacgaaaagagctcacgcaaatatgacggccatcaaacatgtggccatctcctgtcgccgagcattgaccaaatgtgcaaaaattggccacactacagtgtccgtgagtcggtccctccggaaactgtcacccacggcgttcaagacacttcgacaagcaatcgccaaggtggggcacttaaacatcatgggtcagaagatacgactgaacgatcgggaattagcggccaacaaagtgatcatggccgtcaagaaggaagagatatccaagggcatactggatcccagtcagttcacgccgggccagcacatctttaagaccctggccgaggtgcaaaagtcgccgatctttaacctgattaagggtatgccgaagggcggcgcgcttcatgcccacgatacggcgctctgcagcacagactacctcataagtctgacctaccggaagaatctttggatttgtaccgctgaggagggctgcaaggccattgctttccggttttccaaggaggagcccaaggaaaaacctgttaaggaatctatctgggagccaatggaggagttccgtgaacggcgaggagaggagaatgttacaaaatatctcacacgtcgattcagcatgtaccccttctccaagttcatatcaaacaatcaagcctgggcacacttcatgggcatctttattttgctcgacggtttgctctgccatgcccccatttgggctgagtactactacaatgccctcaaggagtttgccgaggacggagttcaatatctggaactgcgatccctgctcccgccactctactgtattgatggcgatatgctgaccattcgggacacagtggccatttacaactcggagctggaacgctttcgagccgatcatccggattttattggctccaagctgatatacgctcctctcagaggagtggagcccagtgtggtcgagcaatatgtgaaaacagctgtcgaacttaataaagaatttcctaacttcatggttggctttgatctagttggccaagaggagttgggacgaccgctgattgattttgtggagcccctgctaaaaatgcccgagcacattaatttttatttccatgcgggggagacgaactggttcggatctcccatcgatgagaacctggtggacgccatcctgttgggcacgaaacgcatcggccatggatacgccattaccaagcatcctatgatgatgcgactggccaaactattgggcatagccatcgaggtgtgtccggtgtcaaatcaagtgctgcaactgggcgtggactatcggaatcatccggcggcactgctgttggccgccaatgtccccattgttatctcctcagacgatccatccttctggcactgtgctccgctgtcccacgacttctacttcgccttcctgggcattgcaccgatgaaggcggacctgaggttcctcaaaagcctggccatcaactccatccggtacagtgccctggttggcgaggaaaagcgagtggggtaccgaaagtggcaggagaagtgggacaagtggatcgacgacgtggtggagcacaagtactgttaa

SEQ ID NO: 12777 - protein, 520 aa, DROSOPHILA
MTAIKHVAISCRRALTKCAKIGHTTVSVSRSLRKLSPTAFKTLRQAIAKVGHLNIMGQKIRLNDRELAANKVIMAVKKEEISKGILDPSQFTPGQHIFKTLAEVQKSPIFNLIKGMPKGGALHAHDTALCSTDYLISLTYRKNLWICTAEEGCKAIAFRFSKEEPKEKPVKESIWEPMEEFRERRGEENVTKYLTRRFSMYPFSKFISNNQAWAHFMGIFILLDGLLCHAPIWAEYYYNALKEFAEDGVQYLELRSLLPPLYCIDGDMLTIRDTVAIYNSELERFRADHPDFIGSKLIYAPLRGVEPSVVEQYVKTAVELNKEFPNFMVGFDLVGQEELGRPLIDFVEPLLKMPEHINFYFHAGETNWFGSPIDENLVDAILLGTKRIGHGYAITKHPMMMRLAKLLGIAIEVCPVSNQVLQLGVDYRNHPAALLLAANVPIVISSDDPSFWHCAPLSHDFYFAFLGIAPMKADLRFLKSLAINSIRYSALVGEEKRVGYRKWQEKWDKWIDDVVEHKYC

SEQ ID NO: 12778 - DNA, 2447 bp, DROSOPHILA
aagctaactctgtgtattgttgccatttcagtagttttaagctatattttatacaataaacgtcgaaattatatttgagaacaacaacagcaccatccatcaattaactcattcaggcacgcgcttctgaagtagaacaccgattgttgaggtggggcgttatcagggaacgttttgataagagataccaggctgaaacgcagtcgttgaacccctcgttgctgaggattcagaaagactaagtctgtgtctgtagccagcttatcgggccaaataacgctccgggggtccacactcacctccttttgcggagtccacgctatcagtgaacctgaaaatgaagcaaaacctttttgggctagacaagcgcgtgccgctgccgacgacaagatgacaagtcgtctatgccttgcgccacccagtgtttactttagcgcagaatccgggatcgcaatccattccgtttaattaattcaatcaagcccggacgccgggaatcttgttcgttgaacttatcaggcggtgacgggtgatttggttcctggccttgacacacacactccacgaagtccgtgagtgttaattattcgccatggcaaccgatttgattgcaaatcgagcatcggcttaagggcaatcactaagggaacttcgaatatggcgccaacagtgctgtaaatgtttaaataaaagtataagtcgtggaattgccactctttaaagctattcgttgtgaaaaaaaaacataaggaacttttattttggcatatcacgccatattcttatcaaataattttttttcggtttaattttaaaaattcgcgccaactcgataaatgaacgttcagttaaattcacctcattgtacaaacgaggtgaactgtgttaaacagctgacagccggcattcatttgttgttctctgtgattttacgtaatattggtatttattctgaatataattgtttataaagcacattaaaatgatgatgcgacactgtatgatggccttgagggtcgctagatcccagatcccgttcagcactgccaggaatactcagagcaatctcctccaacgtttttacagccaggctcctcaaattggaatcgtggactacgacgtggtcaagaaactacccagcgaaccacagaaactgctcatcgatgtccgggagccggaagagctgaaggaaaccggacaaatccccgccagcatcaacatccctctgggcgtggttagtcaggaattggcggccagtgagcagctttttaaatccaaatatggccgggaaaaaccgaagccagaaacggagattatattccactgcaagattggcaaaagaagccttaaggctgcagaagctgccgccgcattgggattcaagaatgtaaagaactaccagggatcttggctggattgggccgaacgagagggcctgcccaagtaaataacattgctatgcgaataatgacattatccatctggttaatccattattttgcaacaataattccatttcgcccaaacaacccgattactcatttttaaaaataaacacattttatgtgctttggcaagttatatataatatttattaatactatttaatagcatattggaactatatttttagatatttgagtatttttggttatgagatcaatatagggggacttcgtttgaattagtccacctcctcgacggtgggacccttataaccgccagcttgctgtccaaagtttggagcctgctggccatctccacctcccttgtgcatcttggtcatgatggggctgcagaactgttccagttccttcagtttgtactcgtactcctccttctcggcggtggtgttgctgtccaaccacttcatcgcctcgctgcaacgctccacaatactgctcttgtcggctgcactgatgcgatcgccaccattctcggccgcctcctttacaccaaacaaataggtctccagttgattgcgggcggcgatccgctggcgatggcgctcgtcctcctcggcgtacttctccgcctcactgagcatgcggtcgatgtccgcctgcgacagacgacccttgtcgttcttgatggtaatgttcttggcgttgccagtgccctgctccttggcggtcacattcaggataccgtttgcgtccaaatcgaaagtaacgtcgatcttgggcactccacggggtgcgggtggaacgccagtgagatcgaatgtgcccaatacattgttgtccttggtcagagccctctcgccctcaaacacttgaatggtcaccgccggctggttgtcggcataggtggtgaaggtcttggactgcttgcatggaatgcggctgttgcgctcaatcagcttggtcatcaccccgccggcggtttctatgcccaacgagagtggggcaacatcgaccagtaggacatccttgatctcgctgctc

SEQ ID NO: 12779 - DNA, 447 bp, DROSOPHILA
atgatggccttgagggtcgctagatcccagatcccgttcagcactgccaggaatactcagagcaatctcctccaacgtttttacagccaggctcctcaaattggaatcgtggactacgacgtggtcaagaaactacccagcgaaccacagaaactgctcatcgatgtccgggagccggaagagctgaaggaaaccggacaaatccccgccagcatcaacatccctctgggcgtggttagtcaggaattggcggccagtgagcagctttttaaatccaaatatggccgggaaaaaccgaagccagaaacggagattatattccactgcaagattggcaaaagaagccttaaggctgcagaagctgccgccgcattgggattcaagaatgtaaagaactaccagggatcttggctggattgggccgaacgagagggcctgcccaagtaa

SEQ ID NO: 12780 - protein, 147 aa, DROSOPHILA
MALRVARSQIPFSTARNTQSNLLQRFYSQAPQIGIVDYDVVKKLPSEPQKLLIDVREPEELKETGQIPASINIPLGVVSQELAASEQLFKSKYGREKPKPETEIIFHCKIGKRSLKAAEAAAALGFKNVKNYQGSWLDWAEREGLPK

SEQ ID NO: 12781 - DNA, 4826 bp, DROSOPHILA
aaaatacgtcgaaaaagtggtgttttttctgttttatcaatatttcgtacagtacatagttgaaaaggtttgcttagcgtttgtttgtattaaaatggttttgtagacttcgtttgaattaatatttaaatgcatttaagtaacgtgttacaattacaacatattttattcattgctatgcggtttgttctcaggttgctgaaattccttttacattataattagatcatttcatagctatatgggtttatataaatattcaatttatttatcgaatttgtggctgtagttgcactttaacattttacttaaataattttctgactagactagtgcataattagaattggatcgcatttagaattaattcattattgatttaagtatgctagtgcttgggatcaatcgattaaattgttgtcttcgctgcttttgccacgttaattagtgatatttgaaaagtctttgcgtgccgttcccgaagcgaagtagtcgatcctagagagctgtcggctgtgaaggttgcgtagtcctgaattttcggaactatacacttctccataagataaggctccaatgagcagcccgcctaggacgaacttcgctcagaacccacacacctccgtgcaaatctcttaaaactttgacagtttacttttggtgtttccttttgttgtgtgcgctttacaatttgttaatatctcagtaggtgaattagaatcttgaatattgcacgcttaaacaaactctggtttgattatgtttgcattgttaaatttgttcggtgttcatttgcttacgtttgcatttaggtttttggtatacaaatactttgaaggacaaaaaggttttgtgtactttcggcttatgatcgaagagtaagaaatacgcagaaatatacagagtaattacagtaatacattcataatatgtacgttagtgaagggtagccacaatgggcctggaccccaactcgtccatccgatatcggtcagcgatgacgcttctgtcttggttgtattgaattcttgtttgcgaatcgcagtttatatatatttttgcagcagatcagcggggaccaattaaaatggttgcgaaaatgaaacgaattggatttttgggaaggagaaaaaagcagtagcggacgttctaaagcgtttcgtgttggttgttaaacatgcgcgatgggcatctgaagcgtcttcgcatcccgataggtcttatcctacacatactggtggtcgccagccatcccatctggacaatccacgctcagcagcggctccttttcgatggtctgatgcgtttgcgcatcgtagtcgtagtagttcatccagtccactcgcttgggctgcaccaatccgaagcagctgcactcgaggaagtccacgaggttctggatgggaccacgtgtgaacgggctgtggccgcccttggcctggaagtggcgataccgtccccggttcatgcgctcattcgttgtcatgcccaagcaaatcacctgatatgtctggcagatcgtcaacaggatgacccaggacatgtgcagcagggcgttacccattacccagcccacccaggcatcgcagttgccaatggcccgcatggcaccgagaaagtctgttggcgatcgcaatttaagaaggattctaaacgctcaattgttaaactcaccatcgaatcgcacattgcattgattcacgtagtacttggagcctccgtacagcatccaggcgcacataatcagcaacatccagaggaatcccataaagtaactgtggttcttcagcccgatgcagttgcccacccaggggcagtggtgatcaaacctcgctacacagcgatcacacacggagcagtgctttgagcggatgggccggcgcaccaagcagccagagcagaaggaggcgggctcaaagccgattccaccccgctccgacaactcaatgatggtctatgaggttataaataagaagtatatcgcataagttagtggcgagttaatagaaaacagacacctaccttaaatcgctgctctctggttggtcgaatgataccgggatctcccttccacgacttaaggaagcacacccacaatagcagcgaggagatcaggaagcaaacggtggccgtaaacgaaacggcatcgtcgatgtacattagccaggtgacatagaaccaggccttggtggccaggtaaacactcagcggcagcagggccatcaggtgctcatcgaatagtgctttgccgatcgtatggaatatggaatacaagcagcccaacaggaaaaacttaataatgtacagcgtgttcacggtgaacacgatgccagccagatagaaggcggtgaaggggcaggccaccatggaccaccacctcaggcgtttgtcatgccgcagcttggagagcagcgagcgccgttgctgcgaagtaagtgccgcctctttcacgcggtccattaccttcgctcctatccaaatggctcccgtctgggattctagcatggagagcggtgtctcaccccgcagattgggtacatccaacgaggcctttgacttgagcacgagtgtggaaatggccgtggcattgcgggccaggatagcccaatgcagggccgtgtttccatgcgtataatcaaccatggcggggttcgctccaagggtcagcagcaagcgcactggatccagtgcgcaaaccttaaaagaaagagtttataagtagtgacacacttattgaatattaacttcttatctcacattccactgaacttttttgaatttcaagtacttcccaaaaattggaaaaattctttttgtggataaatgtacaattctatatgtacatatatgatatttgtacccccgtaaaaatcgggctttaaaaccaagcttaccttccatgctgcccacatcagcgccgtcattccgcctcgatcctggagatccgggtccacgcccttggctatgaaataggccactagagcggtgtgggcgaactgggcggcgatgtgtatgcaggagcaaccctccgcatccctgattctcggatctgcaccagcggccattagcagaacaacggcgccgagatgtccctgtcgagtggcccagtgcaggggcgtggcattaagttcgccgcccacggcatccacggtggcgcccttctcgaggaagtaccggatgatgtccctacgattgttaatggccgcccaatgaagcagggtgaccgtttcgctgtccggctgattgacatcccagccggattcaaccagctcccgtactcgggcaatggcaccatactgggtggccttaacgatatcgaagccactgtaatctggctccacgggcgcggtggggggttgttgggcgatcagcgccgactgtcgctcgttgtctggctgctgaccggttcccgggacacaggagcccgtagtggccgcctggcaggcactctggtacatcgctggcttctctcggtcgctgttcccttggggtcgtccaaacgtgattcacactgcgctgaggtgctcgtcgtaacatcaaccgtccatccccctccttccagcgggcgagcgagcgagaggggtgagcggatagagagagagggagagagcaggagagacacccccaccaggaacagtttcgaggaattcacaggtttgtcattttcaccggagtttcacacggcagctgctttctccacagtgctctagcactcgtttctcggcaggatctgctggtgacgacacggctattgcggctatcagtttaatgcgttttacctgccaatttcggaggactagaagcaattttggtggtacaatgcaagctgatagcactgaatgtgtggtgcgacttccaacactatcgcggggaatttcgcaacttgtttggtatttttaagaagaggtgtggtatttttatagcaaatattaaaaaaataaattattttcatttttgcttattaatgtagttactcgctggttttcaatccccattcaaaactttaattttgtgttttcatttttatcttatattcgtattaatataaatgaaaatgttgacgtaaaattttggggaggaaattaattaataatgtttggaattgaaaaattatttccctttatcttcaggtcatagaaataagtgatcttaataaccttcactgatattagtaagttaacattttaaagtctccttttttggttcatagtttttgaaatatttggagcactaaaaaagtttcacaaagtagttacatctagctgcggtcactctaacgtgcctaccaacaaaagcgcgccttattttttggcatcgctcttgtcttatggttttgcaagtaacatttcaccaaggtacccagaatggatggcaagcgcaagtttaatggaacctccaatggacatgccaagaagcccaggtgagtaaccctttgaatggcctaatacgagtcaatataaaattgttcacgcaggaatcctgatgacgatgaggaaatgggctttgaggcggagctggccgccttcgagaactccgaggacatggaccagactctgctaatgggcgatggacccgagaaccaaacgaccagtgagcgttggtcccgtccgccgcccccagaactagatccctccaagcacaacttggagtttcagcagctggacgtggaaaactatttgggacagccgttgccgggaatgccaggtgcccaaataggacccgtgccggtggtccgaatgtttggtgtcaccatggagggtaactctgtgtgctgccatgtgcatggtttctgtccatacttctacatagaggcgcccagtcaattc

SEQ ID NO: 12782 - DNA, 2507 bp, DROSOPHILA
cttgcattgtaccaccaaaattgcttctagtcctccgaaattggcaggtaaaacgcattaaactgatagccgcaatagccgtgtcgtcaccagcagatcctgccgagaaacgagtgctagagcactgtggagaaagcagctgccgtgtgaaactccggtgaaaatgacaaacctgtgaattcctcgaaactgttcctggtgggggtgtctctcctgctctctccctctctctctatccgctcacccctctcgctcgctcgcccgctggaaggagggggatggacggttgatgttacgacgagcacctcagcgcagtgtgaatcacgtttggacgaccccaagggaacagcgaccgagagaagccagcgatgtaccagagtgcctgccaggcggccactacgggctcctgtgtcccgggaaccggtcagcagccagacaacgagcgacagtcggcgctgatcgcccaacaaccccccaccgcgcccgtggagccagattacagtggcttcgatatcgttaaggccacccagtatggtgccattgcccgagtacgggagctggttgaatccggctgggatgtcaatcagccggacagcgaaacggtcaccctgcttcattgggcggccattaacaatcgtagggacatcatccggtacttcctcgagaagggcgccaccgtggatgccgtgggcggcgaacttaatgccacgcccctgcactgggccactcgacagggacatctcggcgccgttgttctgctaatggccgctggtgcagatccgagaatcagggatgcggagggttgctcctgcatacacatcgccgcccagttcgcccacaccgctctagtggcctatttcatagccaagggcgtggacccggatctccaggatcgaggcggaatgacggcgctgatgtgggcagcatggaaggtttgcgcactggatccagtgcgcttgctgctgacccttggagcgaaccccgccatggttgattatacgcatggaaacacggccctgcattgggctatcctggcccgcaatgccacggccatttccacactcgtgctcaagtcaaaggcctcgttggatgtacccaatctgcggggtgagacaccgctctccatgctagaatcccagacgggagccatttggataggagcgaaggtaatggaccgcgtgaaagaggcggcacttacttcgcagcaacggcgctcgctgctctccaagctgcggcatgacaaacgcctgaggtggtggtccatggtggcctgccccttcaccgccttctatctggctggcatcgtgttcaccgtgaacacgctgtacattattaagtttttcctgttgggctgcttgtattccatattccatacgatcggcaaagcactattcgatgagcacctgatggccctgctgccgctgagtgtttacctggccaccaaggcctggttctatgtcacctggctaatgtacatcgacgatgccgtttcgtttacggccaccgtttgcttcctgatctcctcgctgctattgtgggtgtgcttccttaagtcgtggaagggagatcccggtatcattcgaccaaccagagagcagcgatttaagaccatcattgagttgtcggagcggggtggaatcggctttgagcccgcctccttctgctctggctgcttggtgcgccggcccatccgctcaaagcactgctccgtgtgtgatcgctgtgtagcgaggtttgatcaccactgcccctgggtgggcaactgcatcgggctgaagaaccacagttactttatgggattcctctggatgttgctgattatgtgcgcctggatgctgtacggaggctccaagtactacgtgaatcaatgcaatgtgcgattcgatgactttctcggtgccatgcgggccattggcaactgcgatgcctgggtgggctgggtaatgggtaacgccctgctgcacatgtcctgggtcatcctgttgacgatctgccagacatatcaggtgatttgcttgggcatgacaacgaatgagcgcatgaaccggggacggtatcgccacttccaggccaagggcggccacagcccgttcacacgtggtcccatccagaacctcgtggacttcctcgagtgcagctgcttcggattggtgcagcccaagcgagtggactggatgaactactacgactacgatgcgcaaacgcatcagaccatcgaaaaggagccgctgctgagcgtggattgtccagatgggatggctggcgaccaccagtatgtgtaggataagacctatcgggatgcgaagacgcttcagatgcccatcgcgcatgtttaacaaccaacacgaaacgctttagaacgtccgctactgcttttttctccttcccaaaaatccaattcgtttcattttcgcaaccattttaattggtccccgctgatctgctgcaaaaatatatataaactgcgattcgcaaacaagaattcaatacaaccaagacagaagcgt

SEQ ID NO: 12783 - protein, 637 aa, DROSOPHILA
MYQSACQAATTGSCVPGTGQQPDNERQSALIAQQPPTAPVEPDYSGFDIVKATQYGAIARVRELVESGWDVNQPDSETVTLLHWAAINNRRDIIRYFLEKGATVDAVGGELNATPLHWATRQGHLGAVVLLMAAGADPRIRDAEGCSCIHIAAQFAHTALVAYFIAKGVDPDLQDRGGMTALMWAAWKVCALDPVRLLLTLGANPAMVDYTHGNTALHWAILARNATAISTLVLKSKASLDVPNLRGETPLSMLESQTGAIWIGAKVMDRVKEAALTSQQRRSLLSKLRHDKRLRWWSMVACPFTAFYLAGIVFTVNTLYIIKFFLLGCLYSIFHTIGKALFDEHLMALLPLSVYLATKAWFYVTWLMYIDDAVSFTATVCFLISSLLLWVCFLKSWKGDPGIIRPTREQRFKTIIELSERGGIGFEPASFCSGCLVRRPIRSKHCSVCDRCVARFDHHCPWVGNCIGLKNHSYFMGFLWMLLIMCAWMLYGGSKYYVNQCNVRFDDFLGAMRAIGNCDAWVGWVMGNALLHMSWVILLTICQTYQVICLGMTTNERMNRGRYRHFQAKGGHSPFTRGPIQNLVDFLECSCFGLVQPKRVDWMNYYDYDAQTHQTIEKEPLLSVDCPDGMAGDHQYV

SEQ ID NO: 12784 - DNA, 23899 bp, DROSOPHILA
aaaagcgccaaaaatgccgctaaaatttcgctcggctgctcggcggttcgaaaagggcggctaccaaagtccaggccttggacagtactgttcaataactaaataaaacacttgagccgccatacactggaaaaaaagttcacagttgtagtaaattttcagccaatcatgattgataatctaaataaagctaaataatctacaattgggattattagttgtttttagataagtaagttgcttaatgaaatattttttgatcttgatattgtatttgaggagagcaagcctgtcaaatctaagacaaaatgtttcgttttttctgtgcatggaggaaaataagagaacgaaaggcagccacaatcaagcgaaaattcctggcattttctgcttcattaacaacacactcatactcgagaacccggccatttcgttttgttcgagccgagtttaccgctgacgaaatttacgcacgttgtggtacaaaaaaaaaaaacacatgccacctctgcagtatctgtttttgaatccactgcttcgggccttgatcatccgctgagcttagttttgtgtgtttcggccggctctttttggtattttaattagaaaccgaacaacgcaaaatgcattgcaaggctgctcgctggtcgatttcgatttcgatttctttccttctggccttctgatctgtttcgccggcttctccatttgtgtcccgatcctgtcctctgattcgatcctgttgtagttcccaacttgcatttggttttcacattcaattagcgcatatttcaaatgcgatcgccgcaatcccagccgaacatatttctgttcgattcagacgagtccaaatgacaggaaacgatgctgatggaaaaaagagtccgcaagtccagagctgccttatatcaaaagatgattgccaagtcctccaaatattatttggaattataccttatgattaagcacttcaaaaagtaataatgcgccatccgtttgtatgtcttttactatctttattgatattactttattgcgtctagatcaaaattaatataataaataaatattactacacagataggtatataatacagtacaaaatcgtttgaatcttacccggttacacagctacctaactacgagcataaaactatattattgcgtacaattgcaaacaacttttaaagtctaacgcgttgcggctggttcttagtttaatactaccaatctaactatagacaaaatacaataacggtaactgctaatttacagtatttacagcttatacacaatatagagcgcgacgatcctaaatgagaactatatacagcttgtgctagccaaggagttgatttcgtttatatatatatatcattacctttaaatgaatgtaaatgcgcgcctgggttacactaaatatcacactgtgtaggatgttgcttagcgaagagaagagttcggaattacactatctaacttaaatattttgggcttccacatcgacatggcactgcggaaaacgcctgcctagctgaacttttaagcttgatccacaaaaaaaaaaatagtcattcttatagagaactggtttagtattaagataagatcaggtatacaaataaatttgcccaacccgtggccataacatgcttgattaactagctaatttatttgtgtacctcatctttgtctgagagacctggatttttagaactgtacgttttcaacagagccactccgttgtggcctaccttggtatccttaacaatatcctagttttaattacgctactaatgcacttggaaatagcgcccgtgctgtggcaattggaactttgagctggctgtgggcggctggttggtttcttgattggttggttggtgagatcacggctaaaccatcacagtggtggcaaggacatcggagccctcgtcgcccgaagagggtggcatggacttgcagttgatcgaccgcttgccaaagtccttacgcggactgtccagcgagcccacagtgttcttccgcatgtccgagttttgggttttgtgcagcagaatctgtgagctccgcttgtgcgcctgcttcaggcccgtactggagtccagctcacgctcgaaatcgcatggcgggaatagtggctgcgatctgtgcaaggcggaactactcgccgccgaggcggctaattccggagcgggattgaggcttagttccatgccggtggccgctcttagggaactggtgctgcccttcagcggatttgtataccttcgcagattctcctcgttctgcagattattcgacttctcctcctcgtgacgcagtgcatccagcgagggagttaagttcattcccgaactggtgcgataagccagacgctgtttccagtaaagactgatgaacaccgagaatcccaccaggactataaagacaccgcatagcactcctatcagcagactgtgacccgatccatcggccacgcgggccgtttccaacttgacctccacaatggaggtgagggcagccaattttgcatgctgcagctccagttccttgcgccgctggatgccattcaactgcctgaagctcaggagttcacccagcagacccaccgccactggcagctggggatcatttaatttactggacgactgaaagtacacagaataattcaaatgatttgattagatatatacgattatggttgagttaattttgcatatctttaaaatacataaaccatttgaagaactgtacaaataacttaccacagttagttcaacggtatcattggtgcccgttttgagatcgcagagcaccataagcattcccggatcctggccaaaagtactcgccggcttcttgatcaactgggcagccagcagcaccctcaccagggagcagagaccctccaccgaagctcccttgcccactcgctccagggccaaaaggatggtgagtcgggcgcagttctcgttgaccacggcctgattgggccagcagctagatttggctggcagtcggggtggagcaacccgacgcgatggttccagtgcccggcaatctccacgaacattacaaggcgatgacaggcatgtctcactcagtgccggaacgcacacctcgtgctgtttgcaaacaccggacagattcgaggacttggagagcggatccaccttatagcagttgggcaatccacaccagagattcgtgcaccgagaggtgccgttttcgcagacacacgcattgcagttctcatcgtcttctgttcttccggttagagcaatatccagccagttttgacttcggttcagagcagtatacggagagatagtgttgcttgcattctggcaggcggacttgggatcggagagcactaaaaatgacatataatatagtataccttcttattcaacactcaaattatattaaaaatatttataaaagttataaagtagaggccaacttacaaatttcacaccgcaatccatgccttcctggtgggcagatgcagctgtatccaccgattccgtcgatgcaggtggcaccgccctggcaaggctgtggcgagcactcgttcacattgatgcggcagtctggaccagagaatccctgagcgcagacgcagcggaaccagcccgctcccgactcgcatgttccgccattgtggcacggctgcccgcgacactggtcaatagcctcggcgcaaaacagaccagtccaacctggcgcacagcggcaatgcggctgcagagccttgtccggggctccaggcatgcaggtaccaccattctggcactgaccggcataacaacctgtagcgcgctccgagcagcgtttacctacagggggaaaaaatataaaatattgaatttcattttttaacatgaaccccagttcaatgtttcgaatttgtgcaattgattatggttgctcagaaacaaaagacttaggcaacgaacttatttcacatagaccaaatttgttacccaactaaaccaaaaactaattctttatatttgtttagcataaatatacttcccagaaacgaaagacttaagcaacaaactcattgcgagtgtgggagcttaaatccatagaaagaggattgccatgaccgttggcttggcttgaactaatcgaaaagtaaaagtgtgccgacatagatcgatgtggctctgactgtatctgtatctgtaactgtatctaaactgtggccaaatctattttcattttctatatctgtgtctgtgacaaaaaagcgaaacgcgtgaaatatgcaaatcgcaaattaaaaacaaacataaatcatggcaaaggtttggcctagccgcggtgggcccccccaggagtttttggctgccacatgtggcaaatacattcgccggctacaaagagtgcgactaaagcgcaaatagttttttttttttaattttaaaagcttcgcggctcagccgcattcggttcaatttgaggccgtaatgactgccgactttcaatgttcaaataaatgcgaccgacccgatcgtgtgtgtgagagcgtagcgctcttaacttaacgtggccaacactcgtctcgcgcccatttaaagcccccaagcgttgataatgcggcagtcagtcaggcagtcggcatacagcaggtttttatgccctctcggcaggagtagtaaaaactactcggtgaggttgttaattttattcggatggtctaaaaacactacttgtaaattgagcttggcataatcaaacgaaaaaataattgttaagaaaatgtatgttaattaaattaaattaaacatatctcaagttttatatttgaggagttttccccccatgattgtaactctaacttgctttgatatttctctaccactttcactgaccaccactaacaacagcctgtccctagggtattttgccagcggcttagcaccacttttgcagtctgcacttgttgcaacgctttgacgttcactttggcggtatatggccgcttaaagcgcacccgactcaacccggctcagttcgcctcagttcagttcagttcagttgagccgagctcatcgcaacctgcccaactcatcccaaatcatctcattccgttccgactcacctgtccagcccgacatgcactcgcatgtaaaatcgccgtcgccgtcaaggcaaattcccccatttcgacaaggattcggcgagcattcgttgagatctgcggaaagttaatgagtttgccgtctctgtgcatcggtgggttgtgcatcgggattactcactgtgctcgcagaaggtgccggtgtggcccacatggcatttgcagaaggtgcccacgtcgctcatctcgcagctgccgtgtccgctgcagggcaatccgcttggcttggccatcttcctcgtcgttgtcgccgttgtggtggttgtcgtcgtcgttgtcgctgacgtcgctaggctgacattggcgaagcagccctctgttggattgggggacatgattaggcttattaacgcagggttacactcagaaaaatatatgaaaatgtttatgtaatctaaaagtcctctaaagagtatactttcttttaaagaacaatttgagttttcttatgcacacttgtttttcaagtgcatggccgtggcagatctcgtctctcggatgacgacaaaaagctggcaatctgcgattgatgagcttaatgatgtcttcatcggggcgagatcggttcccatggcctcttggcggtctgtgctatttttactcaccgttgcagggcggctgggagcagagcggacgcagttgctcgcagtgctttccggcgcgatccggtggacagtggcagtagtatccttcgggcgtgttgaggcagtgaccctccagacatggcgacggtgtgcagttctccttggcctcctcgcacagagaacccgagtagccaagtgggcaaatgcaattgaatttgcccaccatgtccacacattcgccaccgtttcggcacggggaagtggcgcactcgtctatgtccgtctcgcaatcgcgacccttgaatccagaggcacaggcgcacctatagtcgttgaccagatcaatgcaggtggctccattccggcactgacccacgcagtcatccagattctcggcacaggtcactccgccccagccctccttgcagatgcaggcaaaggagcccggctgattgcgacactccttggcattgatgcagggtccgatggccaaggatgtggatgccactgcactagtcagagcggccagaagagcagtactgctcagattactaccaataatcgcggtggctgtggtggtcagcaatgcgttcgcagcgattccggcggaatgcggcgcctcgcactcgttcacatccacctgacagacatcgccatgccactccggcggacattcacatcgaaagccaccgattagatcgatgcaagtgccaccatgctcgcagggacccccggcgcactcgtcgatatctggaaaggaatgaggggaaattcaagcagattgtttaagtgccatcaagagataaagtgcaagcactgtgggaaaatgcttcccaatatcacaataaattgaatatatatatttgaatggaattaatataatttaataatatgctgattttaaaatatggttgttcttaactcagaaccatttgtttattattttacattttaacactagccctatttttctctccgtgaatgtgttgattttgctgctgagctctcgagcggcagaagcttgagcaggtggctcttagcccgggctcaagtcattgaactgactcgcgaatgggcttgggtatgggtattggcatagtaagcttgaacctgcgtgcctggcttatctgttgcctgaaatcttcaggagaggacgcttccttctcaaacccctttttgttcaattccttcagcagcacgcaactcatttgtttgtattatggagggtctgataagaagggtaccccaaaaataaagttctgaccctttgctggccattaggccgcaaataaggtcagattgcagatcagacaacttttgactcaattaacctgtacaaaatattacatctaaaattctcacgaaatacagaaaatatttacgactgaattagctgactttatatcatggactttaagccactttaagtgacaataatactgcaatcaaaccattaataagtcagtaaataaagtcaagctcttgccaacaattgaaggcccttaattggcatgccaaaatgtccagtacagatgtaaatccttcaacgccgccgactcattcgttttgggaatggcaactcaattagcttacggcttattgcattggccagcaaatagtttctggtgaatgtgtcggtcgtgctccaattggaatgcaaaaccgaagcgaaccaaaaatttgccggaccaccgtggcaacaacaatcataataaacccatacccaaacccaaagccaaagccggcaacaataactgactgtgcgtgctacgtttcatttcatttcatttcatttcacttcattttatttcgctacagtcaaatgcgtgtgtgctcaattgcatgatcgagcgggaacattgccgcacaacagcaacagcaacatgagcggcaacagccactaccaactaacttggccaactggccggacaaagagccccacattcggctgagctgtggctaatcgcgtgctgtggaataaaattaaatcaaaactcacttatttcgcatgtcggtcccgtccatccggctgcgcagtcgcaagtgaagtcgggggccagttgctgctgcagctgcagcgaacctagggacaccaatcccggggagctgctgccattcagcgcctgcccctccggccgcaggtgatccaggctgcgcatcgaactgctgcgtcttaccggccggcccatgttgctcctgccatgtgatgtgcgatacacttgggcttgagttcggttactcgtctgcaaagatagtagatacactcttaaaataggttctataagatagatagagatagattgctggtacacaatacagatgaaactgtgtgtttatcaaatggtatagtacggataggagatgaaaggtaagaacacttttcttcttttaagcaaatactttcttgatttgtatagatagttatagcactagtttcttcgagtgtcttgtagataagtgctgattgtggggcctcatccgtagcgtattaaattagtttatggcactgcaaagaagtgcataaatctgcggcttaccttgagtgtgcatgtgccgccgttgcggcatggcctggtggcacatgggtgctccacgatctcgcactgctcgcccgagaggccctcggcgcatgtgcagcggtatttgtccggagcggtattctcgcaggtgccgccgtgcttgcagggttcatgggtgccgcagaaatttaaatctgttcgatgcgtaaagcgaaactatgaaatatgtatcacggcgtaatggggcatcgatattatcgatgataccccattcccacttcaaggctcgcattcggagtggtaattgccacgttacttaccttgatcgcacaatatgccaccccagttggtgtcgcacacgcatttccaggcgctgccgttgcaggaaccatgcttgcagccgggatagaccatgcactcgttgcacaatggaccacgccagccgggtctgcatctgtggattaaatcgaagttttgatgagtctctgtgtctgctttcgctaattggtaattggagcatagggaaccccagccaatggggttagctcaaagttgaaggattcaacagcttgggaaaagaggtatccccataaatatacgaagctctgatcaccaaatggggcatcgcagaccttggccgaaaggtgatcttcattggatggggcacaaatgagagtgttcggatttgcatcttgggaaaatccaagatgagtcagatttgcaagcgtaactttgatttcaaaatggggtgtggaagaaccccagctaaaaggtgagcttattgcatggaaacatgagatggcatccagattttatctgcagctgggaaacttttttatgtttccccttttgaaacgtagttagtaaaacacctgtcttagttaaagctcttataattattgtatattgcaaaataataatagccatttatatggcaggcctaagccattgggtttcgaaggttatctgcatcttgggaaaacattcacccattattcattcggcaatttgggcttcggtgtttctttacatttcaatttggcctgggaacgcatttgcctctggccaaccaccgaattgggtcactctgaactttggccttgatgcatcaaatgctaaagtggcagtgcagccagtcagtggccactttggccactccggcaactgccatagccgttcctgctccagctcggggcgaaaactgcgattttatcgctgcaacacgccaaagtgcagcgggatcaaagttagccagccggggccatcgactattgagccttagagccatcgaggtatcgagttatcgcccggcgaggtgctaactctacaagctccgggcatcacgtcatgctcggcgatagtcgacatcgccgttcgatgtcggtaatttatgatttcattaaaacggcagcctcttgttatctggctgcgaatcggcggctctggttccaccgtccttcccggccagcaaatcgcgaatcgcaaatgggccagcaacgtgcaaacagcaaaagtaatttttcttctggcttataattgttgcggcgcagcggaaatctgctgacttttgatgttttctaggccacactaattattgctatttaaaaccaggacgggaggaggtgctcggagcggactggatggcataggatgcctgacagagcatcatgatgcagtcgagaaatgcaatcatggccgccggctcacgtattctgtgttacgctgcagcattaacaacggcaacaaccactgtggccgccgcagctgcaacagcaactaatgctgcagcaactattgccgctgcaactgcaacaggaacaaccgtggcacaaacgttttttcgtgctgctgcggtcttgggacttgcaattgcactgcaagaaatttgctgtatgtgcttaacattctatattttaagattaaaagcctgaagcataatacttatcgatcaaaatatatttagatcttagaaagttaagaaccattaaacagttaatttattcattagtttccaaatgatctcatttgtttttcagtacattttctgcctgaggtcttgctgcgccagtcgctccatgctgccaacgtctgagcatgaccgctccaaaggggcggcctgcaaattctaactaagaaagcggagcaggcggagctggaggagaaggaggagttcctggccagatcagcgcttggccatcgtgcgggcgtttgattagcctgctctctggccgcaaatcgcattggtactggcacttgattgcagattatatggctggttacaactttatagcactcgggttatctcccaaatgggcagttaccgagtgcgaacaatttaataaggaatgcggattgattggaaatgaaccgattgcatcagtttcagctcttttcccatttcattttagtggcagtgatgggaacaattcaattcgcgttggtagcgttatttttagagtaaaaccaaaaggattatgcgcataacttaatgaattctcatccaatttcattttcaaaaccatttctgagctccattttacttgtacaattatggcaaattcaaataatacatgaaaacaaaaattaaaattttttgtattttttgaaattttgacaatgttaccccttactaaaaagtgaaaaattaaaaaaaaaaattttttccaatttcctaaaagttaaaatgcaaatcgtttagtattcaaaatagtgttaaaaacatccgtatctttttgatctatcattatttttggaagagatatgagctcaggactcccgtactgtagcgttttttggtcaaatttatagcaaaattcaatcaatttaagttctgaaaccatttctatgctgcttttgacttatagaaactttctacattcaaactttaaacgattaaaaaaaaatatttttttacgattgtttgaaaatttgatgattattataaaaatttcaaaatatgaaaaaaaaaattttgtcccatttcaaaaaagtttgaacacaaatcgtttaggcatcacaatagtgttccaaaaatgtataccatttgcatttagtttttgatttggctgagatatgagcttgggaattttagaattttgcagtttttaatattactcggttaaaagagaaaaggcacttaaatctgcacatagtcgtacaaataactataataaaactccgtgatgtctcccatcattgactcgaccatcgactgattggcattttcctgagagaaacgctgccaactatttcacacatttagcaacgaaaaaaagtggcactgaataaaaaaaaagaaggagtagtaaaaagcgctccatgtgagctaaagaacccatttctctgccaccgatctcgcacaaaaagaaaccactcttggccattatcataactgtggcctgacttggcctggactggctgtcgattttgagccagccgagtggtggcgactcggaggccagggccattaaggcggccccaaagtttagtggccacatgcaaaaagtgtcataatcacatcgttaagtggggtggcagggggtcgtaattacaaaggtctgccatctactctccactgtttgatatgaagtgtggaaagaaaaaaacaggtatgtacatatatggctggttcataagctacttactcgcattcacccggacgatcgcacttgccgtggacggggtcgcagcccgccttgcagatggcctcctcgcagttgacgccctgccagccattcaggcagagcttctgaccctcggagccgcaggcgtagtgaccgaactgatcgtcccgcggacggcagaaggtcgtgcaggtcgtgttgtagtaggtaacggcgcattgcacccggacacggtaggtgatccgcgcgttccgcccgatgtggtccagcgtcttccactccggcgacggcagtatcacgcccgagtatgatgtttcctcaattaacctctccgcatctgcatttcatttcatttcgttcggttgtggagttgagtgtttttcgggtcaggattccgatgggcggcgagcgtggcatgacaattgttgtggtggttgtcattggattccgattgggattcgttgttggtggcatcaacgttggcgttccggtggagcaggggcatggcggtggcgaaatgggatgtgggcaggagaatttgagaatttagtcagttgttggcaccatttcggtcgcttaaggatgcactcagagaaattatagagcaaaacttggcaaacttggtaaagtcaacttagtgagtattaatttaaatttacatgagtttctctgagtgtattctcttgcgttgtcgcttgctaattaagccaaatgcctggctggcgaacaataacgagccgcgtgcaacaagcaacatgcaactagcaacttgcaacttgtaacacggggctgtggtaacgagcacaagtctccaattgccaccgcacttacctggataggatgtgttgtacatatccaacgcctgcagtatcagcgtaaacgacttctgtaattgaacgtgaagagagaaggaaaggtggcatttagtttggagtctcttcaagtttgactctgcgctgacgctaatggacagtttaatctcaggctgcccgccatgcaaatgaagacaacaaaaaacaaaaaaaaacaaaaaaaaaaagcccagaaaacaaacagcaaaccaaacgagcagacgaacaaagcgatcagacaacaaacaaagcgagccaaagcaaaactaaacactttaatttcacgcaggagaagcggactttctaaacagacttcagtttggccatgtccatgtcgctgtccatggcactgcaattggccaaaaccaaatgcgaaaaagcaacgcatacataattctctttgatttctagatttctttgcaattcgtatgaaagcaagtttttgaattttaaagagaataaggattttactaacaaattccttcttcaaaaataagaatctgaatgtggagactagaacaccgtgcaaaaatactttcaaaagatgaagatttgaaaatcctagagcatccaccatttcgacctcaaaaatcaagagttttctctgattttttccaactcctcctatgcatgggcccataaaaattgaagatccgatgtttctttttttttttttttgtaatttgcgagctgtagaagatttctcgttgggcagaaagcaattaaacgtcgacgatgtctggatgccgccgctggatgccaggaaatgctcatttagcagtgggaggcggtcgccagtggagggaagatggacagatctccagatgggcggggcaacgaatggggggattcccatattccgatgtaattgccctggcgacgcgacactaaatcagtccaaagcagacattggctaattgcagacggatcaacatcagcgacaacaacttgacacactttgcaaatccatccatccataaactgaccaccctgctatcaaatttccgagctccattcaatttccacgcgctgccatatcgctgtcacttaagttaagttccgggctcgagctaaaatcatgatccgtctggatatacggatatatgtatggccagcggaagtgtatcaattgaaaatggcgatgcgtttggttttgaatttcacaaaatatgagatacgagccacatatgcacaagccaatgggaggaagttccgaactacatgtaaacaaatgaaggcggattgggtgaataagattgatttgagcaggaaaattagtttctcttttttcgataaacaaagaattcaagtagctttcagctagacaattctgaattggccaccgacatgtttacacaatgtgaagaatcttgtcttttggccaaagcactttcagcattggtagccatgggttaacaaaagtgtttcatctcgagcaaagtgagttttgtgggggacgcgaaatggatcaaaagcccacaatctatttgggcagtcattcattgatcttgagcaaaaagtggaacaggcaccacaaataccactcgagatcgctcaatggccgcgcacgcgcactccagatcttcaggcctttggaacttggaaaatattgtcaagtgaaattcgtttggctctgtttggcagttcgaatgcttcaggtggttggtggttcggttgcttggatagttgcgagagggtcccttggtgaagacggtgtttgacagttacatcgaaggcccgccgatgttatatgttatgatgtgtgctcttgaggccgggctcaagtatttcctaagtcatgtttatgagtcttaacatgccattcactcaatcagcagccggagaagaagtcattcaataaaaagtgggacaaacgcgaccatatcggcagctctttttttctcgatttttgtctttcggtttttgaagattttcatgagtttgtgaaaggcttcttgagggtgcctggcagccagacaaactgactaactgactaactgactgactgcctgcaggcgaatattacgctggaatggtatgcagaattcatcgcgtattcgttcgccttctgggcacccagtcacagtttcgagtcactcacatgtgaatcgggtagccaaggagccgaggagcttggggaattgggggaaagagcactggcgaaggcacaagattaaagcgaaaccaaagcgaagcgtaacgtatcgccatcgccatcggccgagcgacaagcgcgacaaggtaatgttcccacgaaacaggttgtccgcacttcaggccacgactttgccgctctcggggggcagggagggggccgggaattggtggaggcacagaacaggcgagccagacgaaagccccaagttccaagccgcaagtcccagcccaagactaagaccgagccaagacccaaccaagaccaagaccaagacccggctctgacgcatgcctgctcccccgccacaccgcactgcatcccatccacagtggaacctgcctaatgtaaacgacggcgcatgcgcatgccgacgtcgatgtcaacggcgactgcaagttctgctgcactcgaaaaataattaaattaatttgctgttcaattacacaaattcctgcgatttgagctcatatattaagaaaaaatttcgtttaaaagtaggtttaatactgtaatcaaaagtgagtttatgatttgttaagcacgattcgtttatgttcttctatggctcgtacaagaaaaaagccctattaactggactgcaattgtgaactgtcattaaatctaaaaactatatatagtgagaaatatgtaatagaaaccttcaattctttgaatttaatttgaatgaacttaacatttgtgtgcaagtgctctatgccagcgattcgcagtcgtattagtttggacaccgatttggccaaggcgtgtaattgttaaccaagttggttttgaacagcaccaaaacagcagcaaacaaccgtcagaacaacagccgtacataacaacgaaataaaaaagagcaagagcaaaactttaattcaattctgcgactacacccagtcaggttacatttttaccttagccgagttaaaagaactcagctggccacgtttatttcatgttttattttctcggcccaagtgtgtgttcagtatgggtttattttttttaaccattttattccctcccagtttggcagtcataagcccgcattatgctcacttaattaaccgaaagccgcttaggagctgcccggcaaagaagtataacatgaaacatgaaacacaatttttaattgctttttttcggctaccgccggcagaatctccgcagaccgagatgacgatgggctggccaagggtcttaacttcaaagtgagctggtcgagacgcgatgagtaagccgcttttggtgctagccttggaattttcacgccccatgattctggtgcagcccacgctggaatttttggccacaggaagtagcgcagagaatctgctcgctgtggaaaccccacatagactatgcccccctcggttcatttttttttctttttttgcttctcgtttttctgctgcttttcataaatacatattcttatcaatccggcacgagctcggctcattcacatttctgttgccggctagaccttatcgcccatggagcgttcagttcagcttggctgctctccaggcggaaccgagctatcttaagtcgaaaaaaaaacaataacgaaagctgcccacaaagtgagagagctcgtgccgaaagcgtgcgtcttggttgcaaaggggtaacatggatcggaatatacatatatgctataatatagaacgaatacttatgggaacgtgcacttaccgtccaacgaaacgtaaagggcagcacaatggctcccacacccggatcgctgagcacaaagctggagccacccagtatcttggtggtggcgttgccaaacgaacagcccgtggatatgctggcaccctgctccgtggtctggtactccttcaggcacagccggaatgccgtcgtgcatggcgagcagcctgaaattagaattccagcacgggttatcacactcgcaaatatatacatatataaactttatatactatggaaatgcagactttgttgcctcggagattgcataattgcccggcatcgttaaatacaagatagaatatatattatatatattactacagaaccagaaatatgcagagtgcaaattctgctgataggcaaaagagccttgaccgtctatttcggttaagccccagataagaaatatcagagagctcaagaacccagatggaatttgcataatgttttatgttaatatggaagcatgataaatttaataggacaattgaaaagttcgttaccatgtcaaaagatacgtagagtcgaagtaagactgcatttttacgaggtcttaactttctttgacaagcaaaaggcgatgaaaaatcttggatctcacagtcggggctttaataaacttaaagatggacttacctatcgtcttggtggccctaagttccgctggcatgccgcagcaatagccgttgagtagatggctgttggtatttgagatttctaatatttccagctcgaagttaccagctgcggatatctgtggtggagaacataggcaaaattaaccaaaaacgccgagtacaacgaaaacaagcgtcgagatcccaaatcgattcaaatcaatcatgacccaaaacgaagcatcccaaaaaaaaaaaaaaaagagtgaatcccaatcgaatagtaccctcccctctgagccaatcctccctgcccagcttacattccaaatcgaataatatgctcaacactttatggatctgatcccagctcgttcgccggttgtaaaagctaataagccacctagggcgctctgattgggctgcggtagaggttttaattaaaaacaaaaatagatggatcgatacaagagtggaaaatcagaaaaatccgaggagcatacctcgtaaaagtggtaggcaaatgaaaggagcccgataaatctggcagcaaatgaaacacgaaaataatgagaaatattttccccacaaagcggcttaactgttcgccttggctcacttaatcaaacgagatatccagcagtttgtataatttagaatgcctttgtgctccaactggaatctgtgggctcggagtggccacaaatcacgcggccatcgaaaggagcatttgccataaaattaataacacattagatcgccgatcggcgatctctcgcactcgtacgcttctgacaaatggcacataaagtttaactattcttcggccaatcgcttatcataatttagccaggaggtgagcagactcctgcatctggaagccgcatcttgaccatcaactttgtagtttagggttcattaccggccggcggatgggttctgcttcgcggaaaatatgctaatgaaaacttgggactcccgcttttatggtttcatatttcagtgaatttattgtcatggtctttggtagctggcagtgttgataagtttattagaaataaattgcaatttagccgagcctcttggctaacggcatccaccagtttcgagtcacctgcagctgcagatgaagcctcaaaaaaaaaaaagaaaaacagaaaactccagctcaaagccacatgcattgttgatcatgccatagatcaatcaaatgcaatccccctccgaacccctcgtcattcaacgtcttggcttgtgttcggtttctcttggcgttttttcgagatttccttttgtttgggcctcaaactcaaagactccagtgcaactgggtcctcctcaagctgattggattcttggccgtccatgatcgaaagatgccaaatggaaccggttcttgctgcttactatttatttatcacatttcctcgggccgtgctcctcattcatgaagcaggtgcatccgctaatattccggacaaactttgacgtaatcaattcgattagataaaccaccagaaatgcttaaggaattagtgccgaggcgccacatgtaaactggtggaatatgggagcgcttaatgaagccgacacacgatgtttaatgtgaaattaaattttaattaagcctgctttaaacagggaagcaaaacgaatcttggccataaagccaactgcagctcgtcaacgtgggagctcgtttcgccaactcacttctgattttgggctttttatgcatatttcgcagtcagtttaatacgcagcttatgatcaataaatgtcagctcaaatgagagagatcgtctgcggcttttcggattttttagccttttggcatcccaacttggccgagtaactgggttaatttcaactgacatgggaccatgtgaactgaggcgatatgatcgcggattcgcttgaccagttgactggctggatggctgccttccttccctggttttccctggaagttggccataaatcgtcgctacaaaatatttaacttttatttacttcattaacaactaaatagttgcagtgggaccaaggtggatctttgctgccggcgacttttatcgcctcgcttaccctaaatcaatgcaatcccctctaccaagtagataaatgtgtgtaatcaatttgattgccccacggtcggacacatcccggtatgctcttctggggactgggactcgaactcgcatgctcctcggattctaatgtctggctctcgagatctctggcgtattaatcaaattgttgttaagacccctcgccagccccgctccttcaaactacctataactttccggccaacgattaatttttatgtatttctgaaccgttggctgccgttggctctccgactctttgcctttttaattgccgctcggggcatctccgctggcatctcaatacatgtttaggcactttgtgtaacactttatgacggctacaccccgaaaaccacctagctcctccgattctcgactaccgttgccatgtgggaaccatttcgtagagatggttctcgtagatagaactgcccactaatctggcggatcacttttcgaggggtcctcatccatgcgatcgttttaagcccagaattcttagtcagaggctttttctaaaaatcgagaatgactttatttaaatgccagtttaatggttaaaacttggggaatattttgactaagtgcagttatcaaaatgctggtagatttgttgatattttaaaacgtaatggatacattaattgaacagggaaaatatatcctctattttaatctcagcattttcaatcttattaaataacttaagactgtaaatgatttctgtttttttaacgcgttctacgaatcttgtttattgacatatgcttgatttactgctttgagaaaattccagcgtaagagctctcattaaagacagctcttcgggatgcggagttgataaatcactcaaaaaaataaacccaaaaatcatcattatttacgtcccccatcaaaactttgccctcagccattgccaattcgcatgggttgaatcaactttgtctgttttcttttggcctttttgacgagacactacacccgcatgtatttggatctggggctttttgcgattattgctttggggattcgatcgttttttgcatgttggttggtttgcttaccttatggactaacagtattaaaattaaagcaattaagttgcaggcagactttaatgatcgacaatcgcggatcgtcgatggcagggtcgcgattttgggtacccgatgcctcggacgctgcctttttgtcgccgtcttcttggacattcccaggctgtctgctgattctattgttgactccaacgacgacgacgtagctggttttcgccgaaaatgtttcctaaacattttgtacattctgggggcgtttgcgagcgtgatgctggttggcgatctagatggagtttgtttcggattcactctggattggcaccacacaaatgtaaattcgctgggcagccttaattagcccatgtatgcagattttggtgcctttgtttgtttctattttgccacactacacttgctctggatagctgaataactggccgtactctggatgctgtatcattttctccactttgccttcgttttgtttggttttgtttggataatgttgttatcacacacaattattatttattatttatatggaccttagtatgtgcttctctcgtttttgttttgttcacacttgacacttccacttgataggcgctgatgttttgtagatctttagctgtaacaattgtcgaacgaattggaattgaaacgggctgcgcaaaatctatttcactgtgcatcatcaacgctaattgacacgcagatgatgctgctgctgctgcagttgcagttgcagtagcggcaaccgcagcaagccgcaacaagtgccaccagccaccgcagcaacatttacttttgccagaccgcaaaaagcggcaacgtgcagcaaatgcaaatgcaattcaatttatgttaatttaacgctgttactgccgctgctgatgtggctgcttctgcagttgctgctgctgcgactatggagccgtgtctttggccacaaacaatttgcatcttgtgcgcatattaatttacagatattttcactcttgctcacattactcattcttcccaccctgccgctgcttttgccattccggccatcctatcctcccatggcctttagccccccagcccgccccggttcctcctgctcgggtgttaattgtccatttaattaagtaatttgcttggggcctcctcccggctttggcacggaacggaagtcgttgactttgaatcgaaacccagatgctgccgctcttgctcatgctgctgctgctgctgccgctgatgtggatgttgctgctgctgcagggcatgaccggaagtggcttttgcaagtggatgatgcagctacctcccccttaataccccctaataccgctactttcactcttctctcttggcaatttgcaaaacgatgaatgaacttctagcggcctcaaaactttagtataccgtgtatccatttctatttctagtaacttctggatatactctgatttatcaaataattgtgcaaccagatcaccgtcttgaacttaacgatctgaataagctttggaccgtgctagatccgttattcgttgcatatggtaaatcattgagcagtgcatcgagcattttccgcgctctcttgatcaggggctttcccatgctcgtaccacccattcagaaccaaactgatttcacaatctctcttttctcccggtgcacagaagaaaactacactacttcatctatacggaaagttctttaactttctaataaaacatttgttattcaattcaaaattctttaaatttagaaaaaaaaatccgtgttaagcatcgcttttagaaagtcaaatactttcaataggttgtttgggaatcccacttattaagttctagtggaaatttctctatgtgcgcccattattattattatttgtattatctgcgtgcattatgaactagtcggatgttttcattctttctccctttcacttggcatgtttcaattccacttcgtagttgtagcttcgtgtgtttgtgtccctgttttgcgtccctgtgtgcgttatcaatggagcacactgtggccagcgattcccccggaatggggcactcgttttcgcatattcacattgtttgcacttttacttttcgcctttgattaaacacaattttgacggcattgtattttgatatattaatgtattgtatttaattgaaaggtatttccgttttccttagctcacacgatctgggctcagaaattaatcacacactatggaaacacacacatagcaaaatgtcggctgattgtcgatctttcgatttgcttttcttccaccgagcatttgtagttgattgctcttcatcatttgttgtaatcagcaagcaatttaattcgattgcggcacattaaacactttcacaattgttatatggatgatggtcggtggcgttcagtttgggtgcacaataatccaattcgaggaggggttttaccgttgacagaaaaggggctcatcaccgctcgaagcacggcgctcgactaaacgcgttaaccgaatcctgcggcatttccagccctcgagcagcatccattcacggggcggagcaagtcacgcgagagagctgcggttttggtggtggtaaaggtggtgaggtgagctgtcgctgctgctgctggtggtggtggtggtggtggtgatctgcagtcttaagagaactgtggctcggtctgaaccaccgaaaccgctttcaaaataaactggcgacgacttccgctgagtgctgcgtgcgcttcaggcttcgactaacgactgattgcctctgggcacaagttgccgtcgatcccgagagcttaactcgcagcgattctctctgtgcttctctttgaagaaaaccagtttgctcttcgtgcagtgctctttagccagccgctgattggtcgtacgactgtatatagccccggggcccggaatctgaatcagaatcggcagttaatggagttgctgccgcttcggctgctgcacgcatgcgcgcccgaggctctcggctgccgttttttacgattccaacttaattatgccaataagtgcattctggggctgtgtgtgtatgtgtgtgtgtgctccagatctagtagctccaagggactggcaattaacacctaatatgaaggaacgctcccacaatctttaacggctgggaaccaaatcgaaagatactagcatcggccaattattaaccacacagacagagcggcgacttccatccaattatctgctggccaaaagtgtataaatcaaatttaaatgcaactggcctatcagtgcagccaaaacaaaagacttaagcaacaaacttggcaattacatgcggccaacaagacaggcggcagcatctttgttgttgctgctgcctaccttactgttgttgttagcggctcatatttcttgaggcgcatatctaaatatcgaatcatgttgctgattttccattgtctgcccaccacagcaacaacagcagcagcaacaactgctgctgcctcaac

SEQ ID NO: 12785 - DNA, 5552 bp, DROSOPHILA
tttagtcgagcgccgtgcttcgagcggtgatgagccccttttctgtcaacgctaaagatctacaaaacatcagcgcctatcaagtggaagtgtcaagtgtgaacaaaacaaaaacgagagaagcacatactaaggtccatataaataataaataataattgtgtgtgataacaacattatccaaacaaaaccaaacaaaacgaaggcaaagtggagaaaatgatacagcatccagagtacggccagttattcagctatccagagcaagtgtagtgtggcaaaatagaaacaaacaaaggcaccaaaatctgcatacatgggctaattaaggctgcccagcgaatttacatttgtgtggtgccaatccagagtgaatccgaaacaaactccatctagatcgccaaccagcatcacgctcgcaaacgcccccagaatgtacaaaatgtttaggaaacattttcggcgaaaaccagctacgtcgtcgtcgttggagtcaacaatagaatcagcagacagcctgggaatgtccaagaagacggcgacaaaaaggcagcgtccgaggcatcgggtacccaaaatcgcgaccctgccatcgacgatccgcgattgtcgatcattaaagtctgcctgcaacttaattgctttaattttaatactgttagtccataagatatccgcagctggtaacttcgagctggaaatattagaaatctcaaataccaacagccatctactcaacggctattgctgcggcatgccagcggaacttagggccaccaagacgataggctgctcgccatgcacgacggcattccggctgtgcctgaaggagtaccagaccacggagcagggtgccagcatatccacgggctgttcgtttggcaacgccaccaccaagatactgggtggctccagctttgtgctcagcgatccgggtgtgggagccattgtgctgccctttacgtttcgttggacgaagtcgtttacgctgatactgcaggcgttggatatgtacaacacatcctatccagatgcggagaggttaattgaggaaacatcatactcgggcgtgatactgccgtcgccggagtggaagacgctggaccacatcgggcggaacgcgcggatcacctaccgtgtccgggtgcaatgcgccgttacctactacaacacgacctgcacgaccttctgccgtccgcgggacgatcagttcggtcactacgcctgcggctccgagggtcagaagctctgcctgaatggctggcagggcgtcaactgcgaggaggccatctgcaaggcgggctgcgaccccgtccacggcaagtgcgatcgtccgggtgaatgcgaatgcagacccggctggcgtggtccattgtgcaacgagtgcatggtctatcccggctgcaagcatggttcctgcaacggcagcgcctggaaatgcgtgtgcgacaccaactggggtggcatattgtgcgatcaagatttaaatttctgcggcacccatgaaccctgcaagcacggcggcacctgcgagaataccgctccggacaaataccgctgcacatgcgccgagggcctctcgggcgagcagtgcgagatcgtggagcacccatgtgccaccaggccatgccgcaacggcggcacatgcacactcaagacgagtaaccgaactcaagcccaagtgtatcgcacatcacatggcaggagcaacatgggccggccggtaagacgcagcagttcgatgcgcagcctggatcacctgcggccggaggggcaggcgctgaatggcagcagctccccgggattggtgtccctaggttcgctgcagctgcagcagcaactggcccccgacttcacttgcgactgcgcagccggatggacgggaccgacatgcgaaataaatatcgacgagtgcgccgggggtccctgcgagcatggtggcacttgcatcgatctaatcggtggctttcgatgtgaatgtccgccggagtggcatggcgatgtctgtcaggtggatgtgaacgagtgcgaggcgccgcattccgccggaatcgctgcgaacgcattgctgaccaccacagccaccgcgattattggtagtaatctgagcagtactgctcttctggccgctctgactagtgcagtggcatccacatccttggccatcggaccctgcatcaatgccaaggagtgtcgcaatcagccgggctcctttgcctgcatctgcaaggagggctggggcggagtgacctgtgccgagaatctggatgactgcgtgggtcagtgccggaatggagccacctgcattgatctggtcaacgactataggtgcgcctgtgcctctggattcaagggtcgcgattgcgagacggacatagacgagtgcgccacttccccgtgccgaaacggtggcgaatgtgtggacatggtgggcaaattcaattgcatttgcccacttggctactcgggttctctgtgcgaggaggccaaggagaactgcacaccgtcgccatgtctggagggtcactgcctcaacacgcccgaaggatactactgccactgtccaccggatcgcgccggaaagcactgcgagcaactgcgtccgctctgctcccagccgccctgcaacgagggctgcttcgccaatgtcagcctagcgacgtcagcgacaacgacgacgacaaccaccacaacggcgacaacgacgaggaagatggccaagccaagcggattgccctgcagcggacacggcagctgcgagatgagcgacgtgggcaccttctgcaaatgccatgtgggccacaccggcaccttctgcgagcacaatctcaacgaatgctcgccgaatccttgtcgaaatgggggaatttgccttgacggcgacggcgattttacatgcgagtgcatgtcgggctggacaggtaaacgctgctcggagcgcgctacaggttgttatgccggtcagtgccagaatggtggtacctgcatgcctggagccccggacaaggctctgcagccgcattgccgctgtgcgccaggttggactggtctgttttgcgccgaggctattgaccagtgtcgcgggcagccgtgccacaatggcggaacatgcgagtcgggagcgggctggttccgctgcgtctgcgctcagggattctctggtccagactgccgcatcaatgtgaacgagtgctcgccacagccttgccagggcggtgccacctgcatcgacggaatcggtggatacagctgcatctgcccaccaggaaggcatggattgcggtgtgaaattttgctctccgatcccaagtccgcctgccagaatgcaagcaacactatctctccgtatactgctctgaaccgaagtcaaaactggctggatattgctctaaccggaagaacagaagacgatgagaactgcaatgcgtgtgtctgcgaaaacggcacctctcggtgcacgaatctctggtgtggattgcccaactgctataaggtggatccgctctccaagtcctcgaatctgtccggtgtttgcaaacagcacgaggtgtgcgttccggcactgagtgagacatgcctgtcatcgccttgtaatgttcgtggagattgccgggcactggaaccatcgcgtcgggttgctccaccccgactgccagccaaatctagctgctggcccaatcaggccgtggtcaacgagaactgcgcccgactcaccatccttttggccctggagcgagtgggcaagggagcttcggtggagggtctctgctccctggtgagggtgctgctggctgcccagttgatcaagaagccggcgagtacttttggccaggatccgggaatgcttatggtgctctgcgatctcaaaacgggcaccaatgataccgttgaactaactgtgtcgtccagtaaattaaatgatccccagctgccagtggcggtgggtctgctgggtgaactcctgagcttcaggcagttgaatggcatccagcggcgcaaggaactggagctgcagcatgcaaaattggctgccctcacctccattgtggaggtcaagttggaaacggcccgcgtggccgatggatcgggtcacagtctgctgataggagtgctatgcggtgtctttatagtcctggtgggattctcggtgttcatcagtctttactggaaacagcgtctggcttatcgcaccagttcgggaatgaacttaactccctcgctggatgcactgcgtcacgaggaggagaagtcgaataatctgcagaacgaggagaatctgcgaaggtatacaaatccgctgaagggcagcaccagttccctaagagcggccaccggcatggaactaagcctcaatcccgctccggaattagccgcctcggcggcgagtagttccgccttgcacagatcgcagccactattcccgccatgcgatttcgagcgtgagctggactccagtacgggcctgaagcaggcgcacaagcggagctcacagattctgctgcacaaaacccaaaactcggacatgcggaagaacactgtgggctcgctggacagtccgcgtaaggactttggcaagcggtcgatcaactgcaagtccatgccaccctcttcgggcgacgagggctccgatgtccttgccaccactgtgatggtttagccgtgatctcaccaaccaaccaatcaagaaaccaaccagccgcccacagccagctcaaagttccaattgccacagcacgggcgctatttccaagtgcattagtagcgtaattaaaactaggatattgttaaggataccaaggtaggccacaacggagtggctctgttgaaaacgtacagttctaaaaatccaggtctctcagacaaagatgaggtacacaaataaattagctagttaatcaagcatgttatggccacgggttgggcaaatttatttgtatacctgatcttatcttaatactaaaccagttctctataagaatgactatttttttttttgtggatcaagcttaaaagttcagctaggcaggcgttttccgcagtgccatgtcgatgtggaagcccaaaatatttaagttagatagtgtaattccgaactcttctcttcgctaagcaacatcctacacagtgtgatatttagtgtaacccaggcgcgcatttacattcatttaaaggtaatgatatatatatataaacgaaatcaactccttggctagcacaagctgtatatagttctcatttaggatcgtcgcgctctatattgtgtataagctgtaaatactgtaaattagcagttaccgttattgtattttgtctatagttagattggtagtattaaactaagaaccagccgcaacgcgttagactttaaaagttgtttgcaattgtacgcaataatatagttttatgctcgtagttaggtagctgtgtaaccgggtaagattcaaacgattttgtactgtattatatacctatctgtgtagtaatatttatttattatattaattttgatctagacgcaataaagtaatatcaataaagatagtaaaagacat

SEQ ID NO: 12786 - protein, 1404 aa, DROSOPHILA
MFRKHFRRKPATSSSLESTIESADSLGMSKKTATKRQRPRHRVPKIATLPSTIRDCRSLKSACNLIALILILLVHKISAAGNFELEILEISNTNSHLLNGYCCGMPAELRATKTIGCSPCTTAFRLCLKEYQTTEQGASISTGCSFGNATTKILGGSSFVLSDPGVGAIVLPFTFRWTKSFTLILQALDMYNTSYPDAERLIEETSYSGVILPSPEWKTLDHIGRNARITYRVRVQCAVTYYNTTCTTFCRPRDDQFGHYACGSEGQKLCLNGWQGVNCEEAICKAGCDPVHGKCDRPGECECRPGWRGPLCNECMVYPGCKHGSCNGSAWKCVCDTNWGGILCDQDLNFCGTHEPCKHGGTCENTAPDKYRCTCAEGLSGEQCEIVEHPCATRPCRNGGTCTLKTSNRTQAQVYRTSHGRSNMGRPVRRSSSMRSLDHLRPEGQALNGSSSPGLVSLGSLQLQQQLAPDFTCDCAAGWTGPTCEINIDECAGGPCEHGGTCIDLIGGFRCECPPEWHGDVCQVDVNECEAPHSAGIAANALLTTTATAIIGSNLSSTALLAALTSAVASTSLAIGPCINAKECRNQPGSFACICKEGWGGVTCAENLDDCVGQCRNGATCIDLVNDYRCACASGFKGRDCETDIDECATSPCRNGGECVDMVGKFNCICPLGYSGSLCEEAKENCTPSPCLEGHCLNTPEGYYCHCPPDRAGKHCEQLRPLCSQPPCNEGCFANVSLATSATTTTTTTTTATTTRKMAKPSGLPCSGHGSCEMSDVGTFCKCHVGHTGTFCEHNLNECSPNPCRNGGICLDGDGDFTCECMSGWTGKRCSERATGCYAGQCQNGGTCMPGAPDKALQPHCRCAPGWTGLFCAEAIDQCRGQPCHNGGTCESGAGWFRCVCAQGFSGPDCRINVNECSPQPCQGGATCIDGIGGYSCICPPGRHGLRCEILLSDPKSACQNASNTISPYTALNRSQNWLDIALTGRTEDDENCNACVCENGTSRCTNLWCGLPNCYKVDPLSKSSNLSGVCKQHEVCVPALSETCLSSPCNVRGDCRALEPSRRVAPPRLPAKSSCWPNQAVVNENCARLTILLALERVGKGASVEGLCSLVRVLLAAQLIKKPASTFGQDPGMLMVLCDLKTGTNDTVELTVSSSKLNDPQLPVAVGLLGELLSFRQLNGIQRRKELELQHAKLAALTSIVEVKLETARVADGSGHSLLIGVLCGVFIVLVGFSVFISLYWKQRLAYRTSSGMNLTPSLDALRHEEEKSNNLQNEENLRRYTNPLKGSTSSLRAATGMELSLNPAPELAASAASSSALHRSQPLFPPCDFERELDSSTGLKQAHKRSSQILLHKTQNSDMRKNTVGSLDSPRKDFGKRSINCKSMPPSSGDEGSDVLATTVMV

SEQ ID NO: 12787 - DNA, 5569 bp, DROSOPHILA
agcagagtgatagtggagtgggattggatgggcgtggatattaatcaaatatttatatttacatgcacacaccagagccaacacactggaatgcattcgtagaatttccgagaattcgtttcttttgaaaacaaattaatcaaacaacaagggcgacaacaacaaagttaaaagccagcagaatactggaagaatagaatgctgacagcagggaaatgtgagaattctggtggaatagctcggaaaatttaaatgttccaagaggcgcgcagaatccctgcgttggcaacttaagagcaagcgcttagagtttttccgctctcttatgcgaccggtggttggcaacgcggccagctgctgtgggtgggagtgggatgggtagaatgcaccaactgcaagggaatgctggaaattggaagtggaattgacctaggctgtccctctctctctctttctctcttgccaagtgggaaattggtagcttgttgtgcagcgaatgcgacgcttttcagcgtttccaattgggcactcctcctgcgactgtgcaacatgactcatctgctctccttcgccgccttcggctgttcagttattcgtacttcggattcgcattcggctattatgctggtgcgcttctaccttcctttttcctcctttccagcaaacttcgaagcacaaaaatatacaggagagcttcgctaacttaaaagtctcatgttgaacgaattctacagttttttggtaagctatttgagaacttgtgtaaatatattatttaaaattgtttgtcataatttataaatttatcataaaacttatattgctttaaacttatattttgaattatttcggctaaagaacatgtaaaactggatctcagccactagtcttgccttaaagattcatagtcatttttcgacacaccactgtacctgaatatccctccatcggcattcgcaatcgcagtccatattccttactggcagtcctcggcgaacaacagaaacgataacgacagcccacgcaaaagagctcagaactcacaaaaaaccctggtgacaaaacaaagttcagtgtctcggccgccgtttatcctcaaaggtggcaaaaagcaaactggtttggaaaccacataaaaaaaaatttgaaaaaagtgcaaaggatttcgagaagtggatattggcataccctcaatcataaacaagcaactgaaatgaggcatctctggctgctccttcttatcgcctgtggatctgtccagttcccaggtaaaatcggtgcttccctctcatcttttgccgcatacagtgttccattaggaaagacaaattaatttcgattcaatttgtaatctttatgggcagtggatttttcggcaccatttacatatgcgggttccatggaagaattggagggccctccatgggctttacatcattcagccacaaagaaatacttgtgaatttcttgtttgtctgctgctactcgtaacccactcatccgcgctaatttgcataatctagagattataatcctggatagacattttcccagtgcttgtgcttgtgtgtgggttgtgggcgcttaagtaatcgatgaattacactgcacttaccccgtttttccactgacccaatagggaaaaactttaacaaaagtgtgtgcagactgttaaataaaacatatgctacccgcgttattcacaaggcttattgaatggattcattggcagtagaagaactgcaatgattcactgatatgtttgggaatcagttacacggaattagtatatccacaaaagttccccaaatattaattgattcacaaacattactcatagctactcattatgaatattatatatcgacttgatatagggattgcctcatcacacatatcaatatcaattaaatggttagacattcaccggaggttgcattttcgccatccacaaatggagctggctccaaactccataaaacacttgtctgccaaacgaaactatcaaagccgaagtgcttcatagggtcgacactcttatggcaaagttttccttaaacgctggctgggagttaaagaagggggcggtatggtggggataaagtggtagagtggcagagtggcagagggggggaaaagttgcctgaaagaacgtgtgtcattcattgaattgatgacaatttgggaaccacttgtaagcagggcatgtcttcccaacgcgcgatgagtatacacagaaagaaaacctcctttttagcaaaaaaaaattttttttatttgcgatttatctctttggtattagctttaatactttaatacattgaatgcatagtcaaacttttctgcgcctgtatgagcattgttcagtgcttccgaatagagaaattattggaatagtaaatgaaatgggtggccggggtgcgggggtatgggttggaatgagcacattgttaaaaatatcaacatgattaaagtggctcttgaataattaagcaactgggagtgggtccggagtggatctctggtacatggtgctatggatgatgatgagctgtcaaagggatgagaatgtggcgaggtaattgccgtatcatgcgtgcgttccacggctttgtgtccggcttatcgatattaattatacagagaggacaacagaagcgtgggattggataggcttgccacatgagttgacagattcccataaacggatggtcagcaactttctacacttgaccctgaatacacaaatatcttgatgtattatcaaaaatcgtaagaagggtggaagtatggctaaacattcaaaagttggcaaattcccaagtgagaaaattctcatatgtgggaacccgcctagatctcgcattcagaaacatcaatgttttaatagcatacttttgggcaccgaaaattcctaaagacacccaccacccaccgagccgctggcaataaattcaacttgatccatactggctttattatttgggaagaatagaatcatccccattttccgctgacccaaatcgcactttccgggcaaacaagacccgtcccgtcttgtgcggacaactgagccaaggctaagaaaggtgtcccgacttgtctgccaatgtctttcaattttctcctaacgagagtgcaaacaaaactaataactttggcacacaccccctcccgacgaacacataaacccacgaatattatatggcaaattggcaattttcgcagccattaagcactgcgttgaatttgcaaatgacgcaaccagagcgctgtacccacatccttgagccaaatccagatacaaacggatagccgcaaacgtgtggcttgcatatgccgagtattcccgattcggattccattccgtgacctgacctccaactgaagttgtaaccatcatatcactccagaatgggcgttgacacgctccctgggaaatttcgtatggaaaaggggcttggccgcgcggcatgttccgtatttcgttaatggttttatgctgccttccgcgtctttggggcttaggcttggaaactatcgccagacacggaaatctgggctggcagcgtttcgagtgcttttcaatgagtacacagcagaaaaattaactggcttaatcgtatgtatattcagttcagacctgtagaactaatattatagcagcaaaatatattatgcagcagacacaaaaattacccttttagccggaagcacatgcatcgatgtatcgattttgatatttatccgagaaatagataccacacaaacagataccaagctcatttttatccgtgtagcctaatctgcgcgtgtgttcggaagcccggactaattaccatttgttccaggtgtgctgaccttgccggaggcactcccagccaaatcttcatcggccgctggaggcggaaacggaggtggagccgggggagccgtcactgccccgtcagcaggagacaccagcaaggactacgactacgaggaggaccagcagcgggctccgggaaacctggccaagtcgaccgctgatcccaaagttccagagccatacttcgagcacagcgatgtggatatctatgtgccgcagaacgcgaccagcgccaagttggagtgcccagttaaaaattataatggtaagttgataaattatgctttttgtttttgaaaaagttatgattaaatgtctggccacccttaactttgataacaaaacgattgccaaaaagtgcatgccaagtattgattttccacctcttttcaagctgcacaccacgtcgttctctggtacaaggagaaggtacaggtatccagcggaatgaatatattcaaccacatctatgccctggacgagcagttctccctgaccgttcccctggcatccaatgccaccgaggagcgctacgagtgcgaggtactgccgaacaaagtgcgacacacggctaccattcgctttggcccggagccaagcaccccggctccatctctgcttccggcaccggcgggcacatctgcttcctccgtcaacgattcggcggctcacggacgggacattagcctctggctgctgggcctctttctggccccgctccagttggcagtgacctttcggttctgaagcagtttgagttcaagaccgctccataaatctgcaccaccggcattacgtgattacgtttggagatgtgcaccgcaacagatgagcttgacattgggatgtagccctcggataacgtcgatggcctggcaaatttgcgatagttgtttgctttgttactgtattatatgggaaaacgattttccagggaagcgaacttcccagagctataggttatttaaattttacacttccaactcagcttcctctacttccaatatcgatgttttagacctcatttgaagtaaaattgtttgtaagccattacttgaacttagatacgctacctataggatcgaattagcctagtgtgattgctttagtattgcgcttagtcgagagattagtacataattgattttaacttagcggaacaaaatgcgataccaagtggcttaccgaatcattgtgaaggaaactatatatatgtgaacagattatgagtacataaaaacaatgtatgcaattttgtcgaatgtaaaactgaaataaactagagctgctaaagacccagctgaatccattcaacgaaatccacccctatatagctacacacacacatgcagaccggcaggattcggtggcttgctttccgagagtggcaggggataaacacacgcgcgaccaggacaacaacaaagcgctgaggtccttgtaggagctcactgcagctgcaacgcggcgcaagagtgggaggaggaattccgcaacgtgcgcagggcctggcaaccatatggtggcttctaagggtggtacttatggtggtggcacaagcctcaagcgactacttcgccttccggatcagttgtcaactgcatagcggccaggacacacatctagtcagcggagtaaatcagcgtcagtgaaaaaagccaaggtgagtgctcgcctatcagttgtgtcaagaatcaggcc

SEQ ID NO: 12788 - DNA, 858 bp, DROSOPHILA
cagaaacgataacgacagcccacgcaaaagagctcagaactcacaaaaaaccctggtgacaaaacaaagttcagtgtctcggccgccgtttatcctcaaaggtggcaaaaagcaaactggtttggaaaccacataaaaaaaaatttgaaaaaagtgcaaaggatttcgagaagtggatattggcataccctcaatcataaacaagcaactgaaatgaggcatctctggctgctccttcttatcgcctgtggatctgtccagttcccaggtgtgctgaccttgccggaggcactcccagccaaatcttcatcggccgctggaggcggaaacggaggtggagccgggggagccgtcactgccccgtcagcaggagacaccagcaaggactacgactacgaggaggaccagcagcgggctccgggaaacctggccaagtcgaccgctgatcccaaagttccagagccatacttcgagcacagcgatgtggatatctatgtgccgcagaacgcgaccagcgccaagttggagtgcccagttaaaaattataatggctgcacaccacgtcgttctctggtacaaggagaaggtacaggtatccagcggaatgaatatattcaaccacatctatgccctggacgagcagttctccctgaccgttcccctggcatccaatgccaccgaggagcgctacgagtgcgaggtactgccgaacaaagtgcgacacacggctaccattcgctttggcccggagccaagcaccccggctccatctctgcttccggcaccggcgggcacatctgcttcctccgtcaacgattcggcggctcacggacgggacattagcctctggctgctggg

SEQ ID NO: 12789 - protein, 209 aa, DROSOPHILA
MRHLWLLLLIACGSVQFPGVLTLPEALPAKSSSAAGGGNGGGAGGAVTAPSAGDTSKDYDYEEDQQRAPGNLAKSTADPKVPEPYFEHSDVDIYVPQNATSAKLECPVKNYNGCTPRRSLVQGEGTGIQRNEYIQPHLCPGRAVLPDRSPGIQCHRGALRVRGTAEQSATHGYHSLWPGAKHPGSISASGTGGHICFLRQRFGGSRTGH

SEQ ID NO: 12790 - DNA, 3440 bp, DROSOPHILA
cgccattagtttcgtggttccggcctcggttattgtttttgtaattgtaataaccatatttattcgtgttagccatattgtcgttgctgttgctgttgctactaatgttgctgctgcccgcgttgcaattctgtggggcagtaaagagaaggggaaacccatgtgaaattttaatataaatttgtggcataaaaatatttcgttttaatagacgcttaattaaattcttatcccccgttgcaaaagaaaatgtatatatatattttttttgaatagttggcatgcagcgtgttttaattattgttcagcaattactttaccaatgatagcattcctatttgtatttgtactgtaggtatttgtcttaataaaaaagctgcaagttcactattcttcaagtattaatattattgataaatttataaaaagttccttgtaagcattgcattcatttactatcacttgagtttacagacttcaacttagtaaagtggtttctgcttgttgataaggtacaacttaaaccacaaaatgcacttcaaatacttgtaggtacaatcaaaactacagaatgactattaaaaaacgaaaactacatttattaatattcaattttaaagcagaaagaataggaatcagaaagtacggaaaaaacggaacgctttaatattattcctcgactatcctcagccgagtaacgaagaaatttttggtattgagcgtcggatcctctaaaattctaattctgatacacttcctatcacctgtggaacttattaaacgaatcagcgttcccttttaatttacgagtgactggtataatcattgtggctaatgtatagatagatgggaaccgcaaaaaggcaaggactaatttgatacgaaagtaacgataaacacacctataaaaggctgcatatccaaacatcatatcgcaatttagctttctacactcaagcttaagcaatccacaaagaaaattaatcctgttcctcaaatcatgagtgcctgttcagaaccaactactttttcaaaaaccaaggagacggccaagatcgtcataatcggagctggtgcttcgggagtagcagcagctactaaacttttggaacaaggattcaaaaatgtcctgctcttcgaggcggaagaccggattggaggtcgcatcaacacgatcctgtttgccaacagcttaatcgatctgggtgctcaatggtgccacggtgaagaaggaaatgttgtctatgaaaaagttaaggacctggatgtcctcgacaggaccggcgactatgtcgttcactttattcgctctaacaaggaaattctcactgacgttcataacaaggctcttacggaattgacgaacgcatttgaggtgcctggcgaacatgagggttccgtaggtgatgcctttaatgcctattggaaggagaatatccatcagttggttccgaacgataagaccattgccaaggaggcccaagactgcctgaaaaaggtaatttgcagcatggatgcttgcgataatttgtccgagctttcttaccgaaatttccggaactttgctattgccggtggggatcaaaatctcagctggcggcaaaagggctattggaaatttttgagtgtcctgctaaattctagcgataatcagcccggtgaccagggaattcttaaaggacatgtgcatctcaacaaacgaattgctaagatcaattgggaaggagatggtgaattgactctccgctgctggaacggccaatttgtttcagcggatcatgtgatttgtactgtctcattgggggttctcagggaaaagcaccataagctctttgtaccagctctgccagcctccaagatcaggtcgatagagggtctcaaactggggacagtgaacaagttctatttggagtttgaggagcagccagtgccggaaaacattagagaaatggcgttcctttggcttgaggaagatctaaaggagctacgaagtggcaaatacttttggctggagagtgtttgttattttcatcgtgtggattgtcaaccgcgtttgttacagggatggatcattggtgcccactcgcggtacgttgaaaccatcagcgaggagcaggtcctcgagggaattatgtggatgtttaggaagtttcttaagttttccgtaccctacccaaaaaactttttgcgctctcaatggcaatctaatccgaacttccgcggctcttatagttactactccacttacgctgatgaactccgtacgggacgcacggatttggcatcacctttggtggatgtaactggaagaccgaggatacaattcgccggagaggcttcgagccggaaccacttctctacggtccacggagccattgagtcgggatggcgcgaggcagagcgactcaatgaattctacgaaggacgagctgcaaactaaggcaatattcgaagcgcccaaatgggatcattcaattgcaatacattttcctaaacgcaatcatgatgtacgacaatcaagcattgcttgtttgtccaaagaaataatcaaattaaggcatttatattataattttacatcattgttcatttaataattagacgaattactagcaacaacaataaattatttaagagctcagatgtctaagacatcgtatctcaagccaatacgaaaatccacgggcacctagagttgaacaacactgctagttcgcttttcaaatatcattttagcacccaattaacattccaaagcaaataacacaccttaaaacataccgagaatattcaggaatgtaatttccacaagggcgtgccccgtgcttctgcataaaggaatccaaactaaacccatttaatcccggcgcaagtgagttagttgtgcaattaagccgaatgttccactcgcaaccacgtgaagtgaactggctccacctgtcagccactcactatccccatctcgatgaacattcactttccccattcccgtcgccaatgcaatcagcaaacacagagaaatactttgccagtcataacaaccattacctgggccataacacaagtcgggcaaagaacagcaacggaaacaggaacaggacgactgctccgctagctaggcaaatgtgtgtcctttggtcaaacacagacttgtttaacattgtcactccaggagtcacgagcacgtggacgaatatggaggcagtgagcaaaaagaagcctttttcagcatcaaattaaagctaaagtcaaaactcataagctctacgttggattttgcatacaaatgaacaccgttcattgcagtcattccatatgcctctcttatattatattttacctttttgagctaataataaagtttttgtactgtaccctctgttttctcagtgtataggtacaaaaaccacgtatgcggctggctagacactaaaggcaaa

SEQ ID NO: 12791 - DNA, 1440 bp, DROSOPHILA
atgagtgcctgttcagaaccaactactttttcaaaaaccaaggagacggccaagatcgtcataatcggagctggtgcttcgggagtagcagcagctactaaacttttggaacaaggattcaaaaatgtcctgctcttcgaggcggaagaccggattggaggtcgcatcaacacgatcctgtttgccaacagcttaatcgatctgggtgctcaatggtgccacggtgaagaaggaaatgttgtctatgaaaaagttaaggacctggatgtcctcgacaggaccggcgactatgtcgttcactttattcgctctaacaaggaaattctcactgacgttcataacaaggctcttacggaattgacgaacgcatttgaggtgcctggcgaacatgagggttccgtaggtgatgcctttaatgcctattggaaggagaatatccatcagttggttccgaacgataagaccattgccaaggaggcccaagactgcctgaaaaaggtaatttgcagcatggatgcttgcgataatttgtccgagctttcttaccgaaatttccggaactttgctattgccggtggggatcaaaatctcagctggcggcaaaagggctattggaaatttttgagtgtcctgctaaattctagcgataatcagcccggtgaccagggaattcttaaaggacatgtgcatctcaacaaacgaattgctaagatcaattgggaaggagatggtgaattgactctccgctgctggaacggccaatttgtttcagcggatcatgtgatttgtactgtctcattgggggttctcagggaaaagcaccataagctctttgtaccagctctgccagcctccaagatcaggtcgatagagggtctcaaactggggacagtgaacaagttctatttggagtttgaggagcagccagtgccggaaaacattagagaaatggcgttcctttggcttgaggaagatctaaaggagctacgaagtggcaaatacttttggctggagagtgtttgttattttcatcgtgtggattgtcaaccgcgtttgttacagggatggatcattggtgcccactcgcggtacgttgaaaccatcagcgaggagcaggtcctcgagggaattatgtggatgtttaggaagtttcttaagttttccgtaccctacccaaaaaactttttgcgctctcaatggcaatctaatccgaacttccgcggctcttatagttactactccacttacgctgatgaactccgtacgggacgcacggatttggcatcacctttggtggatgtaactggaagaccgaggatacaattcgccggagaggcttcgagccggaaccacttctctacggtccacggagccattgagtcgggatggcgcgaggcagagcgactcaatgaattctacgaaggacgagctgcaaactaa

SEQ ID NO: 12792 - protein, 479 aa, DROSOPHILA
MSACSEPTTFSKTKETAKIVIIGAGASGVAAATKLLEQGFKNVLLFEAEDRIGGRINTILFANSLIDLGAQWCHGEEGNVVYEKVKDLDVLDRTGDYVVHFIRSNKEILTDVHNKALTELTNAFEVPGEHEGSVGDAFNAYWKENIHQLVPNDKTIAKEAQDCLKKVICSMDACDNLSELSYRNFRNFAIAGGDQNLSWRQKGYWKFLSVLLNSSDNQPGDQGILKGHVHLNKRIAKINWEGDGELTLRCWNGQFVSADHVICTVSLGVLREKHHKLFVPALPASKIRSIEGLKLGTVNKFYLEFEEQPVPENIREMAFLWLEEDLKELRSGKYFWLESVCYFHRVDCQPRLLQGWIIGAHSRYVETISEEQVLEGIMWMFRKFLKFSVPYPKNFLRSQWQSNPNFRGSYSYYSTYADELRTGRTDLASPLVDVTGRPRIQFAGEASSRNHFSTVHGAIESGWREAERLNEFYEGRAAN

SEQ ID NO: 12793 - DNA, 3463 bp, DROSOPHILA
tcttctacagaatcttcacaagatagtacgacccaagaaagtagctctagcactgaaggtcctttgtctactgaatcgtctacagaagctactaatgagtcttcttctacagaatcttcacaagatagtacgacccaagaaagtagctctagcactgaaggtcctttgtctactgaatcgtctacagaagctactaatgagtcttcttctacagaatcttcacaagatagtacgacccaagaaagtagctctagctctgaaggtcctttgtctactgaatcgtctacagaagctactaatgaatcttcttcgacggaatcttcacaagatagtacgacccaagaaagtagctcaagcacggaaagccctttgtctactgagccatctaccgaagctaatgagtcttcttctacagaatcttcacaagatagtacgacccaagaaagtagctctagcactgaagatcctttgtctactgaatcgtctacagaagctactaatgagtcttcttcgacggaatcttcacaagatagtacgacccaagagagtagctctagcactgaaggtcctttgtctactgaatcgtctacagaaggttctaatgagtcttcttctacagaatcttctcaagatagtacgacccaagaaagtagctcaagcacggaaagccctttgtctactgagccatctaccgaagctaatgagtcttcttctacagaatcttcacaagatagtacgacccaagaaagtagctctagcactgaaggtcccttgtctactgaatcatccacagaagctaatgagtcttcttctacagaatcttcacaagatagtacgacccaagagagtagctctagcactgaaggtcctttgtctactgaatcgtctacagaaggttctaatgagtcttcttctacagaatcttctcaagatagtacgacccaagaaagtagctcaagcacggaaagccctttgtctactgagccatctacagaagctaatgagtcttcttctacagaatcttcacaagatagtacgacccaagagagtagctctagcactgaaggtcctttgtctactgaatcgtctacagaagcttctaatgagtcttcttctacagaatcttcacaagatagtacgacccaagaaagtagctctagcactgaaggtcctttgtctaccgaatcatctacagaagtgacacaggagccatcgccaacagagtctttaccaaatagttcaacgcaaggaactccatgtaccaccgataatccgtcaagtttagaaccttcgcctagtaccccaggaaatgatgacgactccggaaacagtgggtctgagaatggaaactcctccacaagtggatctccatgtaccaccgataatccctctgacccagaatcttcgtcaagtaccccaggaaatgatgacgactccggaaacagtgggtctgagaatggaaactcctccacaagtggatctccatgtaccaccgataatccctctgacccagaatcttcgtcaagtaccccaggaaatgatgacgactccggaaacagtgggtctgaaagcggaatcacttccactactggagctccgtatacgaccgataatcccgcaagccaagagccctcgccaagtgccccggaaaatcctggcgattccggaaacagttcatcagaatctcctcctgaaggcgcgacaccatgtacgcccaatgcaccaaaaaagagtaccacaagttcttataccgcccatccgactccaaaatatacaaccgagggaaataaagctgaaacctcaactttaaaatcaccaactggaacgacacctggtcatcaagaagatcgaactgactgcagcaacatgccgaatggaatctttcttcgggacttccagtcgtgcaataaatattatgtgtgtctaaatggcaaagcaattgccggccactgtcccagaaatctgcacttcgacattaagaggaaggtctgtaattttcccagtctagtggattgcccactcgatgaggccccagaaaatgtaacgaaaaaaccctcggacaccgaatcgactcctgactgtaagtccttgcgaaatggtgcctatgttagagatccaaagtcgtgcagcaggttttatgtttgtgccaatggacgggctatacctcgacagtgtccccagggcctacattttgacataaaatccaacttttgtaactacccaatcttggtacagtgctccttggaggaatctcaggctgatgcacacggagcattactggcggagggagtacccgattgcaccaaagtgaaagaggatacacgatttggagacgtcaagcagcataacaagtattatgtttgcttgaagggaaaagcggttttgcattactgcagtccgggaaattggttcgaccttcgcagccagaaatgcattgaccagcggctggctaaggtgacctaagcactcgttacatattagaggcattatccataatctaggcttagaaatgtggtgaaagggttttgaatataagtatgtatacaatgggttgatgggtagaattactagcattatactattttagagtggttactgacacaaaagttacaagcagactctaatacgacctagccagttgaagtgttcaataaataactctatctgtctgggatatacaaaacgaataaagtacatgtaaactatttgcaaaagcctctttccttatttaatcttaaataactcgcgtcattgtttttcagttgtaagaaaagattatagtgcttggttattacttggtattacccgatgaaatgcgattatcaactaagccgtctgtccattataattcaagctggctatctggtgtgtttttgcgtggcaaaggccagacagtcgctaatttctttgtgctacggaagtgactcccggccacaaagttatcccatttaaatttaattacgagataaaacgcgtgcttctgctgcctctgatgtttctgatgtttctgacgtaggcgcttaggctcgactgcgttggaaagtagggaacgttccacctccgattaccttaaagccgactccgtctgcgctccgtcttcgggtataattaaattgtccaggaatcagggtgggaggaaccttctgtgggtggccgtggcagactgacaggcactttgcgtcactgtcgtgcggcgacaaattacaggacacggctccttttgcgcgccaactcatcgatagtagaattgggggtggtgcggcctcgaaatcgatttgattccaaggcaagtccagacagcagacgcaccagtctcatgttacacttgccatctgataagagctcacaacaccaccgtaccatttttcagtggctttttagccagagttggaattgtggaatcttacatccagtgtagtcaatctgagtaagatgatccatttagggtaaaaactatgccaac

SEQ ID NO: 12794 - DNA, 1380 bp, DROSOPHILA
atgagtcttcttctacagaatcttcacaagatagtacgacccaagagagtagctctagcactgaaggtcctttgtctactgaatcgtctacagaagcttctaatgagtcttcttctacagaatcttcacaagatagtacgacccaagaaagtagctctagcactgaaggtcctttgtctaccgaatcatctacagaatttagaaccttcgcctagtaccccaggaaatgatgacgactccggaaacagtgggtctgagaatggaaactcctccacaagtggatctccatgtaccaccgataatccctctgacccagaatcttcgtcaagtaccccaggaaatgatgacgactccggaaacagtgggtctgagaatggaaactcctccacaagtggatctccatgtaccaccgataatccctctgacccagaatcttcgtcaagtaccccaggaaatgatgacgactccggaaacagtgggtctgaaagcggaatcacttccactactggagctccgtatacgaccgataatcccgcaagccaagagccctcgccaagtgccccggaaaatcctggcgattccggaaacagttcatcagaatctcctcctgaaggcgcgacaccatgtacgcccaatgcaccaaaaaagagtaccacaagttcttataccgcccatccgactccaaaatatacaaccgagggaaataaagctgaaacctcaactttaaaatcaccaactggaacgacacctggtcatcaagaagatcgaactgactgcagcaacatgccgaatggaatctttcttcgggacttccagtcgtgcaataaatattatgtgtgtctaaatggcaaagcaattgccggccactgtcccagaaatctgcacttcgacattaagaggaaggtctgtaattttcccagtctagtggattgcccactcgatgaggccccagaaaatgtaacgaaaaaaccctcggacaccgaatcgactcctgactgtaagtccttgcgaaatggtgcctatgttagagatccaaagtcgtgcagcaggttttatgtttgtgccaatggacgggctatacctcgacagtgtccccagggcctacattttgacataaaatccaacttttgtaactacccaatcttggtacagtgctccttggaggaatctcaggctgatgcacacggagcattactggcggagggagtacccgattgcaccaaagtgaaagaggatacacgatttggagacgtcaagcagcataacaagtattatgtttgcttgaagggaaaagcggttttgcattactgcagtccgggaaattggttcgaccttcgcagccagaaatgcattgaccagcggctggctaaggtgacctaa

SEQ ID NO: 12795 - protein, 459 aa, DROSOPHILA
MSLLLQNLHKIVRPKRVALALKVLCLLNRLQKLLMSLLLQNLHKIVRPKKVALALKVLCLPNHLQNLEPSPSTPGNDDDSGNSGSENGNSSTSGSPCTTDNPSDPESSSSTPGNDDDSGNSGSENGNSSTSGSPCTTDNPSDPESSSSTPGNDDDSGNSGSESGITSTTGAPYTTDNPASQEPSPSAPENPGDSGNSSSESPPEGATPCTPNAPKKSTTSSYTAHPTPKYTTEGNKAETSTLKSPTGTTPGHQEDRTDCSNMPNGIFLRDFQSCNKYYVCLNGKAIAGHCPRNLHFDIKRKVCNFPSLVDCPLDEAPENVTKKPSDTESTPDCKSLRNGAYVRDPKSCSRFYVCANGRAIPRQCPQGLHFDIKSNFCNYPILVQCSLEESQADAHGALLAEGVPDCTKVKEDTRFGDVKQHNKYYVCLKGKAVLHYCSPGNWFDLRSQKCIDQRLAKVT

SEQ ID NO: 12796 - DNA, 9688 bp, DROSOPHILA
cagcgacgacgagccgctaagggtcaccgaaggcgccctattggccatgcaggagtcgtgcgagatgtacttgacgcagcggctcgccgactcctacatgctaaccaagcatcgcaatcgcgtcacactggaggtgcgcgacatggcattgatggcctacatctgcgaccggggtcggcaattttagtccaaaagagaagtttaggcttagtttagttatttgtttgaatagttgtgtatatccattgtagtgtttacgtaatgaaaagttcaaagagtttgttacatccccctttttgtaccaattagaattagctttaaataaatatttttgctcgacaagattgttaatttcactcaaatggttcaaagtaatcaattcactcaaataactcgtgatttttataagaatcgggatgaacttcaccaaataaataacatgtcattgagatacgtatagcatttcgttttatttctagttcttgctgcttgcttcgtctccattttcatgtacaacataaaacataatccataatagtttaactataaagttgccggccagcgccgtgcgagctacaaacatagggtttcagctaggattaggatgcataagatgtagtcacgcgaaacgcacttaaattatgggcctagtccaaggtaggtagtgcgctttttgaaatgagtcaccatttagaatgtcgcggcccatcggacgacctcgatgtatagagaactaagcacttaaacgagtaacatgaatagatagatagtttagatactggcctcaactgaatgtggcaactgcgctcgcacttgatctgctgtctttcgtgggatggatcgattgccaatgggtggttacaggacttaaacgtaagttgagctttcgtcaagctattttctggctggcggctctgctttctttttggcatttgcacatgtgttaattgggcgcagtaaaagtactgctgtctagatatattacaacttacacaatcatacaaaatataggtatttattttctttaaatatttagccatataattgatatccggagactgcaacagttctgtctcccagcagccttagccactttgccttctttgctacaacgacgcgttgtaaactatatcctaaaatgtaggagccacatcttgcttcgccctttcgctaacttcactatctgctttattgtttagtttcatttcgtttggttgtttctcagtggttttggttatgtttatttagccaaaacatcgacggtgaattttgttgggtttggtttgtattaattgcgctcccacttcgcctgcttctacgagtatccctcggttctaacgacgtaaatttgtaaaattactaattaatgtagcgcataaccggagcctagtgcggtttgctcttcgactttcgatgcgcgctgccaccgttcttgtccgcactgctgccaaagttgctctggctgctcaccgatgcggtggctggatgcggggtcgcgcctttgggcgtgtacggtatccggaagagatcgatgcgcaggtgctggcaaatctcgaggcacacctgggcgcagtagcgcagcagatcctgggtgccccagatgagcgtgaaccacagtagccagatctctggcacgatgcagttgaagtactggttgaggaacagcagcgaggggccgagcagcgaccagtccagatactccatctccgccttggtcatgtgagcgatctgcgtgagaatacatagtgattaatgcaacgaaaaacgaatacgaaaaggttgaagcactcaccaccagcttattggtgaccttggcggccaccatgccgaacgccatgatgtacaccgatgcgtgctcggtgaagaggttctgcggcgacttctgggcaatcatcagggcgggcagcaccaccagcgtgagcggaatgctgggcgagaggacactggtgccctgcgggagcatggaagtgactcagttagttaccatcgatctttgggcacgttgcacgcttgcaaagtgtcaccgctgtgcgcgtgggacgacatcaaacgactgatgggttggttgattgtgatctatggcacattttgcaagggtcacaacgaatccgggattgtgcacacaaacaatagtgaacaaaaattgttttggcttttggtgttcggggtgcagcaatttcccctccagacatgaaaccttcacactcgaggggaaattgcgcttacagatttatttattacatgttttatttacaaggtctagcgctattgggcgggtgtgtgggtgggtgggtggttcggttggttgttgtgggttttaaaatgcaaaatgtcagtatacgaagcccagtcaccaaacgcaagcacaaggcccaaattataacaaactacatgccatgccaaactgtcacccaaataagaaatacgagctaaacaaataaataaacaaggacgtgcatttggaccgaaaacagtagcattaatctacatacttagagtcaagacattcgggctatcagatctgtactgtgtactgtatattgtgtatctactgtaactactgatgccgatttacagtgcgtttaagccacataagacataggataccacatgaagtacatatgtaacatatgtatgtatgtttctgttcccaaacgcactgcacaccaggacatggacgaggctatcacgatgggttttgtcctgcggatacaacttaaacgttagtttcttacagcaaccgatgatccgttcttgccgcaaccttcggtcaaaatgcatttcgtgtagcgcagtgctagaatcaaatcaacgccgcaggccacataaattggcagaaatcgcgattcgcagttgaagtgcggcagctgccaatgtcaataattgcggatggtaatggggttttgggttcgttttggatcgatttgattcattgattgattgattgcgtgcggaagaaaagaacgacgcgcattaaaatttcatttgtcattacgaaacacttgcggttttttcagaatgctttcgttagcaaaagtgtggcttaaaaacttaaaggataacgtgttacaagctccagatctagataatatgcttaggctaataaatcataactttgataacaaacaccaataagtgtcattcgattagtaactcaattatagtatagtaccacttaaataactagataaacccaagcagcagcatgctttcaatgtcattcaatggttatgaagttttagtcgatttgaggtgggagggattaggatattatatcgtgtgctaggggccaaaccaaattccagagccctccaccgaacgagccgaaactgcaaaccatttccaaatcgaaattcaaagttcaaaggaaaatgcaaaaaggatattagtagagaacccaaaaagcagaaccaaagattagttaattatgttatttatggctggggctacggattgattaatgacccgctttcaagttagtctgtttaggtttttcttttctttttatactggtttcataatcgcctcgtttgttgcgatattttgggtgcaatgcttacagcaactgaggagccgtttttgccactgccgccttgagtaaacatttttaggaaattgattatattcaaggtataaccgaatgtgataaatactaatattgtgtaattccatgaaaggcccacgattggtatctagtaaagatgaaagattgcaagaaaacaattaaatttagaatcttcgactacattcaggggatggagttaaagaggattggtaataagttgctaaaatgtttgaattgctaaaggagtttgtggagtgttaagagtcgcatcaaactgtgaacaccccccatcactctaacttacaaactatgcttacgaatataaatacgaaatagagtagattttaatattacttttgggttaaatagttatgtatgtagttccagaaccgatagacaataaagacataaatagtattatagaaggaccaaaaatgtcaactggacaattggacagggcaaatacatagatcgatattaggctttactaaaaattaacttaagtttcgcattcagcagcctcagaaatagttattgtgtatgagtttttttttttttttttttcaggcatgctctcgttttgcttccgaatagatcatgtttaagtggtgtcaatagcaacaaagcgggagtaaattatgtttgcaacagccgggcctttcgaaccaaaagacacatgaacacgaatcaacaacggcacagattaaataggcaagcaactgggggttaaaagagtgggataaagaggggttaagggtttatcctcacgccacgcaccttcctcgaaactcagctgagctggtcagcaagtagaaagctagttgaaaactgaaagttctttcaatttcgattcatcttttctttttgagcagccaaaatattttttgttttgtgtgcgtactggtattagtgttttgtcttattgtgtgtgtgtgtgtgcttagtgtgtgtgtgtgggggggggggggggggggttgtgtgttagggacttacagcaactgtcgagccgttcttgccaacaccaccggctttaatgacggaaaacacataagttagggagagcagaccgcacacaattgtcgtcactgccggcccataccaaagctgtatactgccaatgccgatctgagtgttatatgtgcgtgtgttggtattgttttgttgtttgttaagtggttttaccgcgacagacattggatttcggcaggtttgtttagagaggcgagcgcacagtacgcaatatgtacatagaagtagaaggtattagacatttgaaattactggtcgtggttaaagttcaactagaatctatatgacaactatgcatagatatttcagagagctgtgtgtttcgttcggggacctcaataacctaacatctttcgtggtttcctatccatgctaaatgaaagaagaaaaaaaaaaataaacatgggaactcaacgattgggtagctgaattcaaaaactaagctagcacgctaattcgcattgaacaaaacttaagctagccgagccgagcttaatcctaagcagcctaaacgaaactcgaactctaaactctagtataaacgtaacgaaatagaactcttaagaatatgcttacataactacagaaataattaaaggatatgcaaagaagttccggtaacaatgatcttcgctggtcgccctcagaacctcgcctaccttggtgagccagatctcaggacccagtgcagccgaaaccaaatgaatggctataattgagaactgagcctctgtcacatcaattctgccgaaccgcatcgttccagacacatacgtctgccagtgggcgcagtagaagagcgcaatagcacagaagcactgcaagagaagaccagaatttatcgcgctctaaataatcatccgtgcgttatccactcacctggaagaacagccagttgggatagtggcccagttggcaggagatgcacgccgagagggccacaaacaccgtcgatatggagtcacagccatggtcgaaaagttcgcccaacggcgatgaggtattcgtgcgtcgcgcctgcttcccgtcgatggagtccagactctggtagatgaacaaacccagcgcgcagagcaagcaggtccaacgcggcggagcctcaacgccatttgggctataactaaaaaaaaggatttacaaaaaataaatagttaaaacgagtcaatagtaggaaagctttcattagaatagtttctcttgaattattgattaggctaccccgtttttattgatcacacgttctgtgttagctgactcatttcaatttatgaaagaaactgcagtttgaattgaaaatacccaatctaaatattattgtaatccgactacgcgcactcgcgtttatttatgttgacaatcccatattacatttctgttaagtgtcataatttcttgtaatttattaatgaacacaggcaccgagaattagaactgtgcggtctgtcaagcgtagaatttcaaaccgttgcgtgcgtttccatgtcaattagccccccaaaagcctgacgtcagcgagcatacacgatcgcctgatgagcaaagttcccaagcagagctccttaattatcactcaggttaagtaaagaaaaaagaaatcactactttgcggcagccactcgaaacatatgtccgataagcggactgctatctcctacaaaatgtcgccaaatcagctgactttgcggttccggctcgcaatttaagcacactaccagcgcctcattccagctgaatcatcagcatgcacagatcgacactactttatcgagtcccactgacctagacaaggttcagctaaatccccgagccggctggctggcaaccaaaaagaaaagttgaaattattaaaacaaatacgaatgtgccaacaaatgtggaataataataactataataatgggtaaagtgcaaatagaaccggtctactcttttggcgaggttttgtgaatgagtatatagattctatagcatgtattttcatctataaataacatggaccgccgacacgtgagcagcttttaagctgattcatctgccggggaccaaagtaagatacttttcggcctctttgattgacatgccagcgctcagaagcaatcaaccataatggggcgaaagtgggcacacgtgggcttgaccaggtgatttattaatattccatttctcaaacagtcatagcaatattttcaataattaaattcacatgacatttgcccctctacttaagtttagctcacattctggtgctaaaaacaacaagttctcagtgttttactattttcataccactatttcacttactcactaagtttgaaagattagggaatatggaaatacgctgctttctgggccatatgattagaaaggcaaggttttctccacagccccagtgaaagtctctttctaaatttagttcttgttacggcggccacttttgtgtttctcagttttggagtagcgaaacatgctcaagtgctgtacttggttgggcaggcccataaaaatcaattagaaatgcaaattatcattctaattcaatcaaaggtatcccaattgaatggcaaacaattggaaaatgcaaaatttacccccggggttaactcaagtgaactttgccttatcgggcggaggctttgtgaaatgctttacttctgtctggcacctgttggttttcaatgcagtactttagcagtcttgagatgcaaaagcgatgattagccgcctttgtttctttttacttatcattaaatgttggctttttttgcaacgcgctcaggctaaaaaaaaattgcgtcataaacggcgacaaacgacaatgattgcgattacttataattcgcgctgttcgtgtgtggatgggtaaagtggcgagacgccctcgctatcttatcgctggcatagtttgtgtccaagttcgggtgttccaccgaatccagcgcctccccaccacccactggtggtggtgtagtcagttggctagttagcatggttatggaatgatacgctatcgccacgcattacgaaacgcaaacgagtggtggcctgattttcttgtttagctagccagcagcaattatatgctgttttcatattatatgaaactgagtaattgggatttcaaatgaaaaacctacgaatattgagagtttgcaactattgtaattggcgaaaatattgctcagtttgtgattgattaaaaacatattgcaaaagtggttacaaatcaaaatgaatcaaagatgttaagcatcaagagcactaggaaaaactttctaaatcagcaaagaattttgctttctggccaacaaatgctgcaaactgcgaacgacaagtgacggctgatagatggaccaaagcagctgatgtggatacccgatccccgcaaaatgtgatgaaatttgcttgctaaaacggtcccaagaagttgatttgttggggtaaccggcaaatggcgaccagggtctgtggggctcaccagattaatatcagggtggtgaccacattgaggatcagtcccacgatggtaatgagattgggggccagccaaaggggcgtctgggcgaccagccagttccaccacggctgcagcagcggatcgagcaggctgacactgaagcaggagtacttgtgttcgctgagcttcctcagctgctgggcactcaggatgtgcttgtcccggtaggcgagcagcgccattttcccccacctggttacgtcgtccgattcctgcgtcgtcgcgctctcctcacgcttttcacttttcactttcctctgacctagcgcttttccctcgcgcgcatttgtgtacgtgtacttgacgtatgcgcgcgtgtgcgtgtgtgtccgtttgtgtgttcgcttttcctggctattttcacacgtggagcgcgatgctggcgcaactacgaagcgcgtctatgatttgcgtttatcaactgcggcgtggtcagttttacgatcgcttggatgcgcacggagtatctgcacttgtatgtttacttagaaaaattaacttaattgaacgaccgtgccgtggagtttttttttcttattgcctatgaccagtgtgaccgcgattgtgactgcaaaataaaccatctgcgcttgcaatgaaataccagaaaagaacgatgtccatttgcgataacacatagcccagactcaacccaatttaacagcagtcttggtgttctctgttagttgcattttgcgcacagctatttaatatcttagcgatattgtttgtgcaacttaaaaaaaataaattttcaatattgaagcaactcaattaatgacaattttgtatagactaacaatgacacgatcatttgctctgttaatgtaacatcaacatttgcaatttcctgttaatagcccgttataagtcttttactatcggtcgtctatcgatatcggccttttagccgcccattcaaattcaaatgtatatatcatagtttattagataaatcagtttgttgcttaaactacgtcctcaacttaacataccgtatgcaatgtttcatttgtgtattcgcttgttagttaatatctaaaccttgtcaattgcctgctttattgttacgattagaatttatgtttaaatatgcggctactactggttctgggccgggaaatgctcgccaacgcctgcaaatatgctcaaaaagtacaaaactgtcgtgcgtccagctgctggccaatataaattgcggcttatgtaaactatggcctatcaaaagttatttttgatgtgttgtttccatgaggcatcgtcgtcgtgtttcttagtttggtggatattaggaaaatgtataaatgtatttgcttcgatatataatatttatatatagataaaaaaataggcttaaaatgtttcgttttagcattttgttgttgtttaaattactttatattggcaactctcattacatttgttaatgcatatagttatgtagttgaaaaacgctcgaacgtgcaactatttcgctttgctgatgacaaaaatggttacacacagcacactcaaccaattatataaatagtagtagtaataatttatagcacaatatgatatagcagcagtttgaaact

SEQ ID NO: 12797 - DNA, 2038 bp, DROSOPHILA
tttattttgcagtcacaatcgcggtcacactggtcataggcaataagaaaaaaaaactccacggcacggtcgttcaattaagttaatttttctaagtaaacatacaagtgcagatactccgtgcgcatccaagcgatcgtaaaactgaccacgccgcagttgataaacgcaaatcatagacgcgcttcgtagttgcgccagcatcgcgctccacgtgtgaaaatagccaggaaaagcgaacacacaaacggacacacacgcacacgcgcgcatacgtcaagtacacgtacacaaatgcgcgcgagggaaaagcgctaggtcagaggaaagtgaaaagtgaaaagcgtgaggagagcgcgacgacgcaggaatcggacgacgtaaccaggtgggggaaaatggcgctgctcgcctaccgggacaagcacatcctgagtgcccagcagctgaggaagctcagcgaacacaagtactcctgcttcagtgtcagcctgctcgatccgctgctgcagccgtggtggaactggctggtcgcccagacgcccctttggctggcccccaatctcattaccatcgtgggactgatcctcaatgtggtcaccaccctgatattaatctgttatagcccaaatggcgttgaggctccgccgcgttggacctgcttgctctgcgcgctgggtttgttcatctaccagagtctggactccatcgacgggaagcaggcgcgacgcacgaatacctcatcgccgttgggcgaacttttcgaccatggctgtgactccatatcgacggtgtttgtggccctctcggcgtgcatctcctgccaactgggccactatcccaactggctgttcttccagtgcttctgtgctattgcgctcttctactgcgcccactggcagacgtatgtgtctggaacgatgcggttcggcagaattgatgtgacagaggctcagttctcaattatagccattcatttggtttcggctgcactgggtcctgagatctggctcaccaagataccaatcgtgggcctttcatggaattacacaatattagtatttatcacattcggttataccttgaatataatcaatttcctaaaaatgtttactcaaggcggcagtggcaaaaacggctcctcagttgctggcaccagtgtcctctcgcccagcattccgctcacgctggtggtgctgcccgccctgatgattgcccagaagtcgccgcagaacctcttcaccgagcacgcatcggtgtacatcatggcgttcggcatggtggccgccaaggtcaccaataagctggtgatcgctcacatgaccaaggcggagatggagtatctggactggtcgctgctcggcccctcgctgctgttcctcaaccagtacttcaactgcatcgtgccagagatctggctactgtggttcacgctcatctggggcacccaggatctgctgcgctactgcgcccaggtgtgcctcgagatttgccagcacctgcgcatcgatctcttccggataccgtacacgcccaaaggcgcgaccccgcatccagccaccgcatcggtgagcagccagagcaactttggcagcagtgcggacaagaacggtggcagcgcgcatcgaaagtcgaagagcaaaccgcactaggctccggttatgcgctacattaattagtaattttacaaatttacgtcgttagaaccgagggatactcgtagaagcaggcgaagtgggagcgcaattaatacaaaccaaacccaacaaaattcaccgtcgatgttttggctaaataaacataaccaaaaccactgagaaacaaccaaacgaaatgaaactaaacaataaagcagatagtgaagttagcgaaagggcgaagcaagatgtggctcctacattttaggatatagtttacaacgcgtcgttgtagcaaagaaggcaaagtggctaaggctgctgggagacagaactgttgcagtctccggatatcaattatatggctaaatatttaaagaaaataaatacctatattttgt

SEQ ID NO: 12798 - protein, 417 aa, DROSOPHILA
MALLAYRDKHILSAQQLRKLSEHKYSCFSVSLLDPLLQPWWNWLVAQTPLWLAPNLITIVGLILNVVTTLILICYSPNGVEAPPRWTCLLCALGLFIYQSLDSIDGKQARRTNTSSPLGELFDHGCDSISTVFVALSACISCQLGHYPNWLFFQCFCAIALFYCAHWQTYVSGTMRFGRIDVTEAQFSIIAIHLVSAALGPEIWLTKIPIVGLSWNYTILVFITFGYTLNIINFLKMFTQGGSGKNGSSVAGTSVLSPSIPLTLVVLPALMIAQKSPQNLFTEHASVYIMAFGMVAAKVTNKLVIAHMTKAEMEYLDWSLLGPSLLFLNQYFNCIVPEIWLLWFTLIWGTQDLLRYCAQVCLEICQHLRIDLFRIPYTPKGATPHPATASVSSQSNFGSSADKNGGSAHRKSKSKPH

SEQ ID NO: 12799 - DNA, 6131 bp, DROSOPHILA
cgtatccgagggcatcaattgctgtgacgagtaggtcgtaggcagtccgagcggcgatagattggccacatcctcacgactcccgccctcctcagaggagctgctcccactgctaccgctgctctggatcatcgccggattgtccatggcggccgccgttgggagcggttggtaggattgcttctggtgtttcagcgacattcacccgatcactcgatcctctcttctcttctcgcgctctcgctgtcctctttcggttggaaattcgcagcaggcggacaacgcggcaaaaagttatttgcacacgctctttgctcacgcacacagagaaacgggaactcgcgatgaaagcggttcaaaagcgaatgcaaaagaatttgctcttgggctgttggcacaccaccgcgcttctcttttataacacttttgccaatttgtatggctaattcgactgtgtactgagacacttcctctaatcgcggttgttctttaaatgcagccaatgcatttgcagtgcttctcgctgtttttctttcttgtttcttccgcgacgcgaacactgttgcctttccaactggagtaagtgcaataagtgtgaccgtccggcgaccgcgaatatataccagaatccaattggcgatgacaatttcgatagtactatcgataaactaagaccagctgcatatctatcgactaatatcggtatagctatgcctatcgataaaaaacatttaaagcaatttttaataaatatttttacatttaatacaaaaacatgaacaagaatctatattaacaagctaagttgcgctctgttaattaaagaatttttattttgccataatattctgagcattacagatagtgtaccacttatctctagaaaactgttgacaaccgaatttgaattcaaatttaagcgatgattttttggttatgattgtgatgattaaaatctaagtgcgttacgaaggtatatgcgaatgaaaaagaacgatttctattcaatatccatatcatctacgcgcccgcgaacgcgattcttgcgcttgtgttttttagtgggcggtggcaggaaactctcaagaaactcaatggtattcaaaatcgtttccgaactgacgtttccaatgtagttcttgtcgaagtagacgaccggtacaggtggctccgttgagagcaacaatttgtcacaattacaacgctgtccctgaatttttgcatcgagcgtttccacttcaacatctgtgttatttgatttgtctggaaagaggtgcctaaataggtcaatctatgtctgaactccataaagagttgccacccaccgaataagggacgaaagcactccttcacctgaatccacttggtgcaaaactgtttgatgaaactgtcgttctgattgaagaaactgcgagctgcattgtcaacccggtatttcatgaatccaggcacatatggccatttgcccttcgcggcataaaagcatatgatgtctgaaatgtaaaaatttaagcgatttgtaattctgctagccttaataaaagtattcatatgcttgaggagataaaaatttaaatattttagttgctaaagaagtttattcattgtttccttgcgacatatgataaattgtgaaaaagtatagcatacttttaggcttagccgtattcgtctcttaaaatgatttcaatgcgttgtggatgtcttttaaactgaaaagaactattgtaaattgggaagatatcacacagaaacctatgttctaatccttgttcaaaatacagagatcttgatctagaacattctagttaaatgtggaaaaactatggcccattcttgtatataacactttcgattgcgaaatagattgcttaacttacagggcacatggaagagatgaagaaaagtgcgctgatgctccagactggagatgagatgaataccgctggaccgccgattggccagggcctttcttccggcaaagggaatctcatccacgcggacactcttcagatatgcctcgcccatggtgaatagaaatatggctaaaaataggggcagaatatgcagagcgattttccgacgcagctccattgtcgaactttccactagccagcaataaatgtgactgacgaatgtcctgcaggaattgtcagacacctgaatgatttcactgcgctctctattgattttaattgtgctcgaggttgacataaatccaggcaatagggatacattgcatgtgctaacccaatttgccagccacaaaaagttcattgcactcaaagttacatttgtggaatatacatgacaacaaacatcatacatacaacaaaaattaagtcacaggaaatgcagtatgcaaatcatgagtcattagctaatatttatattactcaatatagacgagataataatcagcagtcacctgtcagaacaattcactccgatctatgaataatcaattgatttacaattgcaatccatctgagcgaggaagaactactgaactattacgaacacatttctcattgccgccacgcggcgtatacttaatttgctaaacctgcttttatggcacgctttttcccactcaaaacatttttcgaatgccgtaatatagatataacccacgtgttgcaaatttattttatggcttatcaagtttggcacacttagaaataggaaagcgaggcgaatttccagacaactattaaaggtagaggtatttctaagaattatgtaaccaaaaacgttagatccaaaatagcaagcaaaacaaataactaactgaaataatgcttgttcttaagtattgatagtagtttattttcttacaatagctgcattctatcttactttctacgacttttttcagtaccaaccgttcatatatgtacattagtttatcggttgagcagagtttagaactattttacttttcgttgagtatatgcgaccatagattcaccctatccgtttggaattcgctggccacgtgaacctcgaagccttggtaggcatctggtgcatttgcgaattcgtgatagtcgcatattccgtcgggacgtgactggagcacctcaatggagcagggggtcagtgactcggaattcctgggttttctgcgaaaaatatatgttgattcattatagtacccaaacaatccatactatcaaacttagtctcacccaaacttggcgaagtgcacgaagtaatcaacaaaggaatgtatcaccttcgcctccgtggagttccgctgaaagtcgggaaagagcagtggactacggaacagatagagcagatcatcgcagtgcactactccatattttccggtcacattcgcggatgtataggcagaggcatagctaagaggtccttgatagttgaaactatataagtagacgggattcggcgtgtggcaaacatttttgtgaatggtattgtataggggttgcttgaaacccctatcagatattaactggaaatcaagaagtggtttataaataaactacatataaaaatagataaaaactagttatagaataaagctatgattaatgaatgctcgatacattttcataaattaaaatgcatttagcttgatcatattaacttagttaactgattaacatcagccccatcgacttacattcataaacccttggacggtcagctcgttgacttcatgctggccctggaaatacacttccaccagcagatccatcatcttttcgcgcctatcctggctaaagctggccgggaattccagcagttcctgcagcagctcgtcgaatcgcaagttaaaactctggcgtagcgtctcattgcccagaatgttcaccaccctgactgcaccctcacctggaacagtgccgagaagcaggggaatggatgtgggcattccttgggccagcatatccatgggatgcgcgttgagaaaggcatcgacttccaatccctcctcgaccactggacggaaattggtcatgtgatccacatcccagtacttgagaccatcgccggcattcagtagcttggtggcatttattcgacgcagtgccttggttagctttactgtactcagattcctggcatctggcacgtctgcaaactccgccaggaggcgagcctgctccagtggctgctccgcaatggcgaagggcacattggccgtgccgctcatgctgatcactcgatggaacaggccatgggatctgggactcagcaggtgcatgtgggcagccacgccgccggcactttggccgaaaatggtcacccgctgaggatcgccgccaaagaaacgaatgttgcgctgcacccaacgcagtgccaagttctgatcctttaggccaaagttaccagacatcacagcatcctgcgtcgataggaatcctttgtgtggaacgagaaactcaaaaattacacttcttacactttgttagttatcttcggcctcaccaaagggtcctagcctataggccatggtcaccagaatcacttcaccggagtccataaagtattcgggtccagttacccctggtcctgcagagccgccaaagaagccgccgccatggatatagaccattacaggtagtgcggattttcgaatctaaataaggcaatcatttaagctggacaggatttcgcaaagccggatcatccctactgaccctgtactttcttagatcctcctaagaaattcgattttatctcacctctggcctgtagacattcaagtagaggcaatcctcatcgccgtagacaactggcgttggcagcagatagttcttctggatgcagtccatcttgggcgcactggcatcgtacatccccagcaacttgggcattaccttgggattctgacgaagaagtagctggtacataaatggaatctctgagcaaagatgcccaattaacatacactgaatctcagatctccaatgggaggcagggcatagggaatgcccatgaaggcctcgaatctttcggactgatagccctggagattggtgcccttcaggcagcccacgctcggtgggcacacggtgagctggtccacagtggccaaggccgcgcagaagggtccagggccagccaagagctgtccaagaagcagcagttgtagcatccgttgttgaatcatcgccggcggtccacgaaatcactgaaaatagagctaatggatcgttaattatgcaaaacgattggttatttatgatcaattttttttttgttggggcttcctatgctgcccgttaactcgctcaagatgatgtcaactttaatttggtctttaaatggatttgctgaccataagccatcagccatcaggcccactatcctggtggaaaagctcaattactcactcaatcttagacttagacagtcgctgggtgaaaatcgctggaagaacctatcgcgaccgaggcccaaatcgatctgacgatttgttcagttgaatcgtgaagaaaacttttgctccgtaccaagtggctctctgcccacaatcttgacaaaatgtgcggtggaaaatttatacagatcagcgcgatttagccagctgtttgggatcgttttggatcgtttgtagaacggtacacacggcgtatgcttgattgctgcgaataggaattgatctggaaatgcaactagcatcttaccagcgacctcaaccgaatctggttagggtaatttgaaacacgcgccagaacgagtagaaagtggcagtggattatacttatgcccccgatccgtcagagtcgacgacttgcgatcaactgcgatcgcatcgtatcgaaatgtttgcttttatcctgtctcggctcacgattttgctatcggatgcattcacacggaaataaatcatggtgcagatgtcattggcaaaaaaaaaagtaagttactaactattgttgctaccacagatcaatagcttgtactaactagttgaagcaactaataatagtacagcttatacaacttgaatgtattcaaagatgatgcacgcatacttttactttcgagcttaacatctgaaacctggatattattcactcactttcgcttttatcaccaccacccccatagaacgttacggttttcactctcatggatcgtgctccacctta

SEQ ID NO: 12800 - DNA, 2412 bp, DROSOPHILA
atgctacaactgctgcttcttggacagctcttggctggccctggacccttctgcgcggccttggccactgtggaccagctcaccgtgtgcccaccgagcgtgggctgcctgaagggcaccaatctccagggctatcagtccgaaagattcgaggccttcatgggcattccctatgccctgcctcccattggagatctgagattcagtaatcccaaggtaatgcccaagttgctggggatgtacgatgccagtgcgcccaagatggactgcatccagaagaactatctgctgccaacgccagttgtctacggcgatgaggattgcctctacttgaatgtctacaggccagagattcgaaaatccgcactacctgtaatggtctatatccatggcggcggcttctttggcggctctgcaggaccaggggtaactggacccgaatactttatggactccggtgaagtgattctggtgaccatggcctataggctaggaccctttggattcctatcgacgcaggatgctgtgatgtctggtaactttggcctaaaggatcagaacttggcactgcgttgggtgcagcgcaacattcgtttctttggcggcgatcctcagcgggtgaccattttcggccaaagtgccggcggcgtggctgcccacatgcacctgctgagtcccagatcccatggcctgttccatcgagtgatcagcatgagcggcacggccaatgtgcccttcgccattgcggagcagccactggagcaggctcgcctcctggcggagtttgcagacgtgccagatgccaggaatctgagtacagtaaagctaaccaaggcactgcgtcgaataaatgccaccaagctactgaatgccggcgatggtctcaagtactgggatgtggatcacatgaccaatttccgtccagtggtcgaggagggattggaagtcgatgcctttctcaacgcgcatcccatggatatgctggcccaaggaatgcccacatccattcccctgcttctcggcactgttccaggtgagggtgcagtcagggtggtgaacattctgggcaatgagacgctacgccagagttttaacttgcgattcgacgagctgctgcaggaactgctggaattcccggccagctttagccaggataggcgcgaaaagatgatggatctgctggtggaagtgtatttccagggccagcatgaagtcaacgagctgaccgtccaagggtttatgaatttaatatctgataggggtttcaagcaacccctatacaataccattcacaaaaatgtttgccacacgccgaatcccgtctacttatatagtttcaactatcaaggacctcttagctatgcctctgcctatacatccgcgaatgtgaccggaaaatatggagtagtgcactgcgatgatctgctctatctgttccgtagtccactgctctttcccgactttcagcggaactccacggaggcgaaggtgatacattcctttgttgattacttcgtgcacttcgccaagtttggaaaacccaggaattccgagtcactgaccccctgctccattgaggtgctccagtcacgtcccgacggaatatgcgactatcacgaattcgcaaatgcaccagatgcctaccaaggcttcgaggttcacgtggccagcgaattccaaacggatagggtgaatctatggtcgcatatactcaacgaaaagacattcgtcagtcacatttattgctggctagtggaaagttcgacaatggagctgcgtcggaaaatcgctctgcatattctgcccctatttttagccatatttctattcaccatgggcgaggcatatctgaagagtgtccgcgtggatgagattccctttgccggaagaaaggccctggccaatcggcggtccagcggtattcatctcatctccagtctggagcatcagcgcacttttcttcatctcttccatgtgccctacatcatatgcttttatgccgcgaagggcaaatggccatatgtgcctggattcatgaaataccgggttgacaatgcagctcgcagtttcttcaatcagaacgacagtttcatcaaacagttttgcaccaagtggattcaggtgaaggagtgctttcgtcccttattcgacaaatcaaataacacagatgttgaagtggaaacgctcgatgcaaaaattcagggacagcgttgtaattgtgacaaattgttgctctcaacggagccacctgtaccggtcgtctacttcgacaagaactacattggaaacgtcagttcggaaacgattttgaataccattgagtttcttgagagtttcctgccaccgcccactaaaaaacacaagcgcaagaatcgcgttcgcgggcgcgtagatgatatggatattgaatag

SEQ ID NO: 12801 - protein, 803 aa, DROSOPHILA
MLQLLLLGQLLAGPGPFCAALATVDQLTVCPPSVGCLKGTNLQGYQSERFEAFMGIPYALPPIGDLRFSNPKVMPKLLGMYDASAPKMDCIQKNYLLPTPVVYGDEDCLYLNVYRPEIRKSALPVMVYIHGGGFFGGSAGPGVTGPEYFMDSGEVILVTMAYRLGPFGFLSTQDAVMSGNFGLKDQNLALRWVQRNIRFFGGDPQRVTIFGQSAGGVAAHMHLLSPRSHGLFHRVISMSGTANVPFAIAEQPLEQARLLAEFADVPDARNLSTVKLTKALRRINATKLLNAGDGLKYWDVDHMTNFRPVVEEGLEVDAFLNAHPMDMLAQGMPTSIPLLLGTVPGEGAVRVVNILGNETLRQSFNLRFDELLQELLEFPASFSQDRREKMMDLLVEVYFQGQHEVNELTVQGFMNLISDRGFKQPLYNTIHKNVCHTPNPVYLYSFNYQGPLSYASAYTSANVTGKYGVVHCDDLLYLFRSPLLFPDFQRNSTEAKVIHSFVDYFVHFAKFGKPRNSESLTPCSIEVLQSRPDGICDYHEFANAPDAYQGFEVHVASEFQTDRVNLWSHILNEKTFVSHIYCWLVESSTMELRRKIALHILPLFLAIFLFTMGEAYLKSVRVDEIPFAGRKALANRRSSGIHLISSLEHQRTFLHLFHVPYIICFYAAKGKWPYVPGFMKYRVDNAARSFFNQNDSFIKQFCTKWIQVKECFRPLFDKSNNTDVEVETLDAKIQGQRCNCDKLLLSTEPPVPVVYFDKNYIGNVSSETILNTIEFLESFLPPPTKKHKRKNRVRGRVDDMDIE

SEQ ID NO: 12802 - DNA, 5248 bp, DROSOPHILA
atttgtcatcgccggagaaccgaagacctccgtccgggtgtgacgaactgcagccttagtttgaagtgccaccgctggattttccacgcgaccaatctttgggtttaccacaccgatttatgagccccttgaaaaacggtagttccccagtggatttcctgaaaagtttgcccaaaactaattaaatgcgatctgtgtatcttgtcaagatctttggagtctttctggctaatacaaatttacataaattgtttttttttttttttttaaacacaactttacctttatgtattcaattattcatatatatagcaattatttatttatatatttattatattttttctttaacgtggttcaacgatcttgtatatcagacaataactccccccaatcatttgtcatccaaatttcctaataattctcaaatcagtccccatatatcttcgatcttaattgcgaaatgagggtccagtgtgcttttttaattaagatataacatgaactcaaggcgtcatgtgcaaacaatattgactattcaagccaacttcgggtaacttgttaaataaacaatttaaggcaactcaaaaactacaaaacgtaccaatcgaatgttactcattcatgaatttgggtcattatcaattaacatttatttatcttgttccaataaattctatttgcatgaccataaaaaccatataaaaacataaactatcggaaaatggggattggctcaatttattggctacatttgccgtgtatattattgatggtatttgaaaaaggcaaatagcacatacaatacattctagctataattacaatagattccaatgtacgctgtatagcctgaacctgaacccatcctctgatgtcatcaatgtcgtcgatcaccgtcaactattggacaatctacaagtggttgcctcctcgccaagattagataaatcagttgtaggacagagaagagcaagcgatttattgtgctgtccaatcgtcaaagacgtaggctcatggcaagcgccagaacaccaatgcccaagcaactagaagataccgatctgcggctagccagatttagcggcggtatttgccggtactcggagtagtccagcgaagcgttagcccttcggatccatttgagaaagtgcgatacattggtatagacacccggatagccgggatccgcacagcccacgccccatgatattatcccggccagacgtccatcgcagatcagcggtccgcccgagtcaccctggcaggcatcgatgccgccctgcaaaaatccggcgcacatctgggaggcgggcagcttgtagatcacctggcagagctccttgttgaggatcggtactggcgcttgctgcagcgaagccgatttctccttctgaattgaaagttgaacggacaatgacatgattggaatgttcccaatcactcaccatggtgaccttgccccatccgtggataaggcaggtggtgccctcttcgggtgcttttatggccagcggtattgcccgcacacccggcgattcccacggtatgaatccgttgagaaagagcagtgcgatatcgttctccagcgtgctgccattgtagtccttgtggccaacgatgcgctgcaccaggtactcctgggtgaagcggtccgtccgatcgatggcactgctgcctgccactaccacatataactcgggatcacgatagaccagtggtactgaggtatttctaaaaagcagatcgttgttacacttatcttatggattcgattcacatatttcacccacatggcgtagcaatgtgccgccgaacagacgacccgctgagagatgaccgctccgccgcacacgtgacccaatccgtagtgccgctcgtggatcgaacgccggcgcacggacacctgaaagggcacttggtcaatggtcaccgtgtagccaccaacgatcttcggcaggatcacgaagggcgaggctgtagctgtcggttggccaatctgagactgagtgattcccgagtgggtcgccacaatcagcaagcacatccataggtggtccatggggtgccgtgaggttccacacaagcgtctatactttctaatctcacaaaaacgaacgcaataagaaaaaccacaaaaaaaagttcgaaatttaaaaaaaaaactgacagcccattaaatgtttgctatgtatttgtaatgatacaaaatgctttggtgtcaaaaatagaattgtaagttaatttaataaattaattgcagtttaaattaggttataatctagtctttgactatttggcggacctatgcgatgactagattcagagttccaagaggaaggccacaaggagtggaagaatgcccaggtaggaccaactcgatccctgccgcactcctccattatgatagatggtatagttgagggagctattcttttgaacaatccaatcgtaatagtacgacacatttgtgtagacacccggataaccaggtgctgcgcatccagcgccgtacgaaacgattccggccaacattccgttgcagctcatgggtccgccggagtcgccctggcaggcgtccactccgccactcaaatagccggcgcacacctgggaaaccggaatcgaattgtatgaaatgcgacaggttgtatacgacactatgggcaccgtcgcggcctgcagagtattactactaaatgttccgttctgaaagtttatagagattttatcagatatataagtttatcagtaaatacttgtggtatagaattccatctgacagtggaaaacatttgtagactcacctgctggagcagaccccatccggagatcaggcaatcggtgtttgtggccacaagttggctgttcaacgccagggccgttacagttggccaattccagggtatatatccattgatgaacatcagggcaatgtcgttggtcaacgcgtccggattataattctcgtgcgtaattagctgctgcaggtagtacatcaaagtgcgatcggtggagctcgtcaggtaggtgctgcccatgaccaggacaaattcgccagcagttcggtacttcttcttgtcggtgctggaaatcggaatctattagcatatgaaaattgtgatgaaagaggtactaggatcagtacgcacatgtaacagcagtgggcggcggtggccaccaaacgttgggaaatgaccaccccaccgcataggtgaccagatccatagctcttcttgtcgttggcggtgaggcgaatggacacctggtacgatacctgttctatggacgcatcatagccgcccacgatcttcggctctatctttccagccgtttcgcttgaaagacctgaaatagatatagccaaataggtatttaatgtacgattaaatatcggtctgatggccatgataaacatcaattgacattgattaaccttactgactcgtcaactacctataataaatatgtttatcttgggcgatgagatagcctagcattgttgtcttaacaaaaaagtactttaaaagtttatggtgagcggttcataacgcttcggcggtatggaaaaacaagacaatctaatcgaacgtaaagtgattgccactccttttgaaattggataattccgaaaattagtcagtgtcatagaaaaaaatgttcttttgttctacaataatggcgatggaaatatccagtaaatcgaaaaaggtaattaccataaccatataccaatttggcatatttataatgctgttttgaacattttgaaacttaatttttttttaaatccgaaagcagttgaatttgaccacttattgattgtttcttttacacattggaatatgatatgtttcttttatcttgggtaataaccaaacacttttgcaaaccatttatcacaacaaaaagcaaaacaaaaatgtgagcaaattgataacttctgtgtgtgaagtgttggggtttacccaacttgaatagttttaggcttcgattttcacataacttttaacgaaacgaccataattcgtttactggttcgttctgttgaggtaaatacaatctatactttcgtatcactattcggctgtaatttggattgattgcgatcaaactgtgactcactttcgccggaggccagtgctcctagaaatagcgctatggccagtatggcccagactttagccatctctcttgagtaacttggcagtatgggatttcgaaatgatacaggtgactgactatcgaccgaatttcttgaatagagccaccgcaatgagccatcccgacacatggccagttgatattatttgtggtttgcctttagcttatcttatcgccaaatgtgcgtaaattgaatgttgccaaagccccaaagctccacattgacaacagctcgatggctcgaatcggctgccataaaagtaaacaaatggcaaatcaaagcaaaattcgtttttgatttcaatggcaccaaagggaatggatttggtaacgccagaacaccacagtaactggttgattggctgggattagacaaactttaaaggttatttattctaattgtaaatggggtgtcttgttttgttttattcaattttattagtaattacgccaaaaaaatatttaacaaaaaacatttagcataaaatgcattgatcaggaggctataaccgttggaaagccgtgactaatcggacgcattttaatatcagtcgatatgttccatagagataggagttagttgctgcttgtatgcagtagaattcaacttgtttgtgtactgagggtgttttggtaagatgtcgttttaaaatctacaacactatacattgttttgtttcatttgattgctgttcgatggacttaggtacgaatacctaatcaacaaatggaatcatgtcttttatccttgtatcactgaggatttgtttttatctcaaaaaaaaaaaaaaaaaaaaacgtatgtactaaggctaaggttttgcttgtagcaccatttagactgagatcgtttccaaattattttttctctagattattgatcgcttctgcgacgcgaccagttgagtaaatcagtgcggctttgatctcttccagctcaatttgatgaattacatccaaattcccctcggatattccgacttcgggttcttgagtgaatgccggggggtaatcgtaaaaatcattaatagaatccaaagcgttcgatgcctccctagtgacctcctcatcatcagaagaagaa

SEQ ID NO: 12803 - DNA, 1799 bp, DROSOPHILA
tcgatagtcagtcacctgtatcatttcgaaatcccatactgccaagttactcaagagagatggctaaagtctgggccatactggccatagcgctatttctaggagcactggcctccggcgaaagtctttcaagcgaaacggctggaaagatagagccgaagatcgtgggcggctatgatgcgtccatagaacaggtatcgtaccaggtgtccattcgcctcaccgccaacgacaagaagagctatggatctggtcacctatgcggtggggtggtcatttcccaacgtttggtggccaccgccgcccactgctgttacatcaccgacaagaagaagtaccgaactgctggcgaatttgtcctggtcatgggcagcacctacctgacgagctccaccgatcgcactttgatgtactacctgcagcagctaattacgcacgagaattataatccggacgcgttgaccaacgacattgccctgatgttcatcaatggatatataccctggaattggccaactgtaacggccctggcgttgaacagccaacttgtggccacaaacaccgattgcctgatctccggatggggtctgctccagcagaacggaacatttagtagtaatactctgcaggccgcgacggtgcccatagtgtcgtatacaacctgtcgcatttcatacaattcgattccggtttcccaggtgtgcgccggctatttgagtggcggagtggacgcctgccagggcgactccggcggacccatgagctgcaacggaatgttggccggaatcgtttcgtacggcgctggatgcgcagcacctggttatccgggtgtctacacaaatgtgtcgtactattacgattggattgttcaaaagaatagctccctcaactataccatctatcataatggaggagtgcggcagggatcgactacagcctcgcccttcgtgatcctgccgaagatcgttggtggctacacggtgaccattgaccaagtgccctttcaggtgtccgtgcgccggcgttcgatccacgagcggcactacggattgggtcacgtgtgcggcggagcggtcatctctcagcgggtcgtctgttcggcggcacattgctacgccataaatacctcagtaccactggtctatcgtgatcccgagttatatgtggtagtggcaggcagcagtgccatcgatcggacggaccgcttcacccaggagtacctggtgcagcgcatcgttggccacaaggactacaatggcagcacgctggagaacgatatcgcactgctctttctcaacggattcataccgtgggaatcgccgggtgtgcgggcaataccgctggccataaaagcacccgaagagggcaccacctgccttatccacggatggggcaaggtcaccatgaaggagaaatcggcttcgctgcagcaagcgccagtaccgatcctcaacaaggagctctgccaggtgatctacaagctgcccgcctcccagatgtgcgccggatttttgcagggcggcatcgatgcctgccagggtgactcgggcggaccgctgatctgcgatggacgtctggccgggataatatcatggggcgtgggctgtgcggatcccggctatccgggtgtctataccaatgtatcgcactttctcaaatggatccgaagggctaacgcttcgctggactactccgagtaccggcaaataccgccgctaaatctggctagccgcagatcggtatcttctagttgcttgggcattggtgttctggcgcttgccatgagcctacgtctttga

SEQ ID NO: 12804 - protein, 579 aa, DROSOPHILA
MAKVWAILAIALFLGALASGESLSSETAGKIEPKIVGGYDASIEQVSYQVSIRLTANDKKSYGSGHLCGGVVISQRLVATAAHCCYITDKKKYRTAGEFVLVMGSTYLTSSTDRTLMYYLQQLITHENYNPDALTNDIALMFINGYIPWNWPTVTALALNSQLVATNTDCLISGWGLLQQNGTFSSNTLQAATVPIVSYTTCRISYNSIPVSQVCAGYLSGGVDACQGDSGGPMSCNGMLAGIVSYGAGCAAPGYPGVYTNVSYYYDWIVQKNSSLNYTIYHNGGVRQGSTTASPFVILPKIVGGYTVTIDQVPFQVSVRRRSIHERHYGLGHVCGGAVISQRVVCSAAHCYAINTSVPLVYRDPELYVVVAGSSAIDRTDRFTQEYLVQRIVGHKDYNGSTLENDIALLFLNGFIPWESPGVRAIPLAIKAPEEGTTCLIHGWGKVTMKEKSASLQQAPVPILNKELCQVIYKLPASQMCAGFLQGGIDACQGDSGGPLICDGRLAGIISWGVGCADPGYPGVYTNVSHFLKWIRRANASLDYSEYRQIPPLNLASRRSVSSSCLGIGVLALAMSLRL

SEQ ID NO: 12805 - DNA, 3347 bp, DROSOPHILA
gcaaataataaaaactaattatataaaatatataagaaggaaaaaaaaggatgacgaaattaacagccgacacactcgaccaaagacacaagcactcacgttacgtatcgtgtctttgactctacgagacacccaagtatttttggaaacacccagttgtttaacgggaaacccatgttttgcctattatttagacacatgtctttttctgattgtttgtcttctctatcctccgttatgagtggcgagtatgatcggtatgagtgccgtattgattcgggtgcgcgcacaaccgggtgcttgcctgcacatgcaggttttttactgggtgtttgtaactacccgcgatgtgagtggtgagtggcaaccgcactcaaaattgttgagtgtgagtcgagtggcaaaaaattccactctttcagttctctactatttacattcgcgactcttataattagttcttacattctaatattgcaatggggcttatactacatatactacatatatacaatacaattactactacaattattaggtatattattatattattgtattactacaattactactactacaacaaaattttgttttattaaaaatcatatgtgaatagaatagtaataagtacataagtacatcgaaatctatatgttttttgttcccatagtacaactgtataaatttaaataaaagtctaattttgcaacacagtgtaatataaactgcaaactttctagcgaagcttcaaaccagttgtcggctcaaaaaacccgccaaaaggtgtgctatattttgttgtctaagtatatgtttaatttttaattttatttatttgtttataatgggatttgaagcaaatacaaaattgaaagcaaattaagggcaaaaatgcccttaaccaacgtaaaaataacatttcatttattaacaatatttaatttaggttttttggcttgtgatttgtatttttattgtttttaaaatgttatttcagctatatattgtcggatattttgttgaacaatttacaggcgacataggttcgcactcgccaggtgaaggcggtggccacagcgttttggacatggtgccacaggtaaccaggagtctcgtccacttcgtcccgcagctgattaaccgcactcttggcataagccgacgccgatgggattaggagaccacccttcatgatctgcctggagtacgagttgattttggtaaccacaaagttcggggacaacatctgcacatggatgccataaggcttcgcctcgtggtacaaggccagggttaaactacgggtgtacgccttggaggcggcatagtaggctccattgggaagtggctgcagttccgtgccggaaccaacattcacaatggctcccttcaatttagacgccttcatgcgctggaagaagatgcgagacagctgggaaacggccaccacgttggtgtcgatgatgttttgcgtttcttcctggttatatttcagcaaggatttcggcgtggcgattccaacgttgtttactgcgataaggtgaaattgtttatgcaagtgaaataaataccacttacataagtaaatgctacttaccaagtatggaaatgggtatattggcagtttccttttctatgtgctcatagacctgcgagcccttggtaaaatcagctatcactattttggtctgaacaccggcaccgcaatccgctaaaaacaaacaaaatgaatcgaaaaaaatgtatgttaccaaaattagatgtcaatcggcatatacttccgaataaaaatccattgcatggctttcaatcataatttcgacaagtgctttgcgtgttctttaaaaatgtcagtctgttgtaacggaaacaatccaaactacagtctttaaatgcagttaaccaaaatttaaagctattgaacttgtttgtttaattactggtatttactggtatggtaagattacataacgattaacaactgtattatcttttaacgattatacaaaataactgttgataagtcgtatttggcatttttaatctctccacaccttgacttaccgatttccttggcaaccgcctggagtttctcctcggttctagcgattaggaccacattgatgttctggcgggccagctccttggcatattccttgccaattccatcgctggcacccgtgacagcggcccaatctccgaaacgctccttcagagttggcctagtcccactgaaatacctgattttgattaatttgtacggcgttcttaactgctcgtagagataagaggacagggcatagacaccaacgaatgtgaggaatgctgatagggcacagaacattttgtcgatttatttagtaattttaatcgactgcgctacagcggaaagtacgtgtgtgttatacggtcgacacacttgaacggactgtaaaaaaattgtaagcaaaattgcacagtattcgccgggcagggcgctgaatttaaatggcttgaattaatagaactcggtgctattaaaaggtgttcgacttgccgttaaaaatagcccgaaaaattgtattcataatacaactttgcctattcaattatggtttgcctaatggtttgacttgctgttggcctggaaatggtcaaattaaataggcacatccattaacaaatatgattgcattacactggaaatgtgtgagaaaagtcgtgttggcgagggatttgtgcaattaatgcatgggggtaaaagagcaggcaaccttattagaacaagtgaaagtggctaatggattaagctattatataaactgcctatttcatgcacactgacagctttttgtcaacggttaaaaatatttggcttttgtttaaatttttagcagtcattgaagtcattggaaagtatgctccttcaagcttaggacaaattgaaaaataatttagatgtgtgtatttcaccatcaggcatccttggagtcagtcaccttctaatccgcaactgcatccccagatgacatcattgtccgttggccgttgtcctttgttcgccgaaagtgcacttcacacacacagcaccacactcgcacatcacaattaccgccttgaagcggcattcataaattagggagggcccagaaaatggcattttacaaaatgctaagtacacacacgcctcccaaccagccgggaatccccttgatatcctcctccgaacatcctcgctgacttcggggtaaggaaatcaggaaacgctgtgaatcgaactgcggaacaagagcacgacatgggttatatatcaaccatgtgtgtcgacacccggacgcaagggaatgggccttttggctgccagc

SEQ ID NO: 12806 - DNA, 927 bp, DROSOPHILA
atgttctgtgccctatcagcattcctcacattcgttggtgtctatgccctgtcctcttatctctacgagcagttaagaacgccgtacaaattaatcaaaatcaggtatttcagtgggactaggccaactctgaaggagcgtttcggagattgggccgctgtcacgggtgccagcgatggaattggcaaggaatatgccaaggagctggcccgccagaacatcaatgtggtcctaatcgctagaaccgaggagaaactccaggcggttgccaaggaaatcgcggattgcggtgccggtgttcagaccaaaatagtgatagctgattttaccaagggctcgcaggtctatgagcacatagaaaaggaaactgccaatatacccatttccatacttgtaaacaacgttggaatcgccacgccgaaatccttgctgaaatataaccaggaagaaacgcaaaacatcatcgacaccaacgtggtggccgtttcccagctgtctcgcatcttcttccagcgcatgaaggcgtctaaattgaagggagccattgtgaatgttggttccggcacggaactgcagccacttcccaatggagcctactatgccgcctccaaggcgtacacccgtagtttaaccctggccttgtaccacgaggcgaagccttatggcatccatgtgcagatgttgtccccgaactttgtggttaccaaaatcaactcgtactccaggcagatcatgaagggtggtctcctaatcccatcggcgtcggcttatgccaagagtgcggttaatcagctgcgggacgaagtggacgagactcctggttacctgtggcaccatgtccaaaacgctgtggccaccgccttcacctggcgagtgcgaacctatgtcgcctgtaaattgttcaacaaaatatccgacaatatatag

SEQ ID NO: 12807 - protein, 308 aa, DROSOPHILA
MFCALSAFLTFVGVYALSSYLYEQLRTPYKLIKIRYFSGTRPTLKERFGDWAAVTGASDGIGKEYAKELARQNINVVLIARTEEKLQAVAKEIADCGAGVQTKIVIADFTKGSQVYEHIEKETANIPISILVNNVGIATPKSLLKYNQEETQNIIDTNVVAVSQLSRIFFQRMKASKLKGAIVNVGSGTELQPLPNGAYYAASKAYTRSLTLALYHEAKPYGIHVQMLSPNFVVTKINSYSRQIMKGGLLIPSASAYAKSAVNQLRDEVDETPGYLWHHVQNAVATAFTWRVRTYVACKLFNKISDNI

SEQ ID NO: 12808 - DNA, 6773 bp, DROSOPHILA
ccgcgaaggacttcatggcatccagaatgggtcgatagccggtgcagcgacagaggtttccaccgaaagcgtcctccacctgcgacatgctcacctgcccgcgatgttgctccagcaatccgtacatgttcatcacgaatcctggcgagcagtagccacattgggtgccattcatctgagccacgcgcttttgaatgggatggtagccactcagttggttgcccagtccctcgtccgtcatgatctccgcatcgtcacaggtgttcagaagcgtcaggcactgtggaatgggcagaaataacccatagtttaattatattttaattctagtaattacaaatttaactttttattgctcgctgtattcaggtgtggagaaagccactccccgaaaagtgacttcttaccgagttggctgccctggactgaacctcctgggtgaccgggtggcgcctgcggatgacgcagacgcacgagccacagccgccctccaggcacatgtacttggtggccgtcaggtgcaggtgctcccgcaggaaggtgttgagggtggtgtccggtggatagtcagccgcctgcacctcgtacggaaagccattcacattgaacttgatgctcatcgctgcacagtcgtcggtcgaatggagctcttttggtcattcgtttctatttcaaagcgctgctgaaacctgatttcccgttaattaggctaaacgggttggagcagattaaagtgccatctaaagcatacactgagcgaaaccgtgcactctgcgaaacttactaagtttttgctgatgctttgcacttaattgacagatttataatagaaattccgctaaacactattttatggtttttaaagtgataacttccagaattatcgttttgtcataaaacacaatatgaatgagtcaaaaatttgaaagagctgttaatgtcacgtacgaatgataatcccaccaagatatttaacttgattataacaatgcaaccaaatgcatttcaatataaaaactttaataatatttcaaatatatgtataaagaaagaaccatatgtatatgtaaatgggacagaagccgatcaaaaccacatatttacttaagcctaaaactggctgcttcatgtcctgcattgaccaccagagtttccggagttgtgggtgcacccagacgcacccactcccgcggtagtcctgcatcatggcgggctgaatccagggcctgtcgcagggcgaaaaccacactcacagccaaacaacagggtggttctccagtggccttcgaccgcatgaagcccgccccagagggattgggtttctgaatcagctcaatgcgaaaatcaatgggaatgtccttggcacccggcggcttgtagttccaggtgcggttggtgaggaggcgacctgtttcccggtcgtacaccagctgctcactcatccagtagcccaggcacatgacaaaggcaccctcaatctgaccgatgtctatccagggactcaggctctctccggcatcctccagtatatccacgcgcttgatctgactgtttccagttagcacatccaactctacttcggttagggccagaccgtagatatgatagttttgcatatcgcccttcttgtagtgatcagaggcaatcaggttgatcgatttgccataggcagcttcaactgtctcaatccaactggcatccttcttcttcaccggctccaagcgactgttcaaggtctcacaggccttccgaactgcatagcagagactttcgctgcccacagctcctccggtgaccatcgaattggctccattgatggtgtcggaggactccaccttgatgaagctcaaatcgatgccaagggtgtaggcagccacttgagccaccttagtgttcatacctataggaaaatcaatatgttatcaatgaaatagtatcttaagtgggctgtttacttaccctgtcccatttcaatgcctccatgggtaaccacaacagtgccatccacatgatagatggcaactgtagccgggtactggccaaaatagaaaatggggtagtccattaccgccaatccgagacctcgtttcgtccaacgattcttggcattatgggactcaatttcttttttcctctgggcatattccctagactcaaggaactggggaagcaactcggatatcttattacccgccgcaatgtttgcaagacgaacttcagccggatctttctgaacttcgaaggcaacgtgctcgatgatgttctcaatcatggcaataccctccaccgatcccggagcacgacaccaagtggaactgggcgcatctgttagcaccgcatttccgttgtttttaaagttatctccgttcaaatcataacaattgacggccgtgaaggtcgaatgaccctcaatgggactttcattcggactccagccagcgtcctcataaaaatcattcgtcaagcccacaatcttgccattatccttaatgtgacacttgtagtcggagcgacaagcccaccgcttgccattgcaatccatcatggactccagggattggacaaagcgaacgggacgatttagcttgtaagcaaccaatgaagctgcacaggccacctggttacctcgggtgatctttgatccatagccacctcccaatctacgaacctgaatataatagatttggaattagattcaggagatgataattcagatattacacatacctgtagttgaacatccttggccttcacctgcagcatatgggcaattacagactgggtttgatccatccactgagtggccgaaaagatcttgagaccatcctcaaagggaatggccacagttgtctggggctccatggtaaagtgatactgcagacccatctggaagatgcccctcacttccttgtccggctgttccgagaacttgatcttcttggatgtcgatttcgatgctggcactatgcgagaggaatccggagttggagatgcgaatacatctcctaagctcggctgcagcttgaagtcggaactgggattgctgtagctgatcctgaccagcttcgcggctctgtgtgcctggtcagcagttaaagcaacgattacaccagctggctgctctgagtggcgcaccaatcccgagcagaagatctcctccacctcgaaaccaaaactgggctcacagaaagtgttagtgccgggaatgtctttggcactgtaaaaggcgatcactccaggttgcttgagggcttcggaggcgtcgatagaatcaatggtggagcccactttggtggcgcccacgaaggcgcagtgcagcgtattagaagtggtcaagacatcgttcatgtaggtggcctctccagagcactgtatcatgccctcgactttttccaccgcttgggtgacgggatagttcttcttctgggtctgaaaaacttgcaatccagaggagagaggccgctgcaggatctgccctccgcttcggaatttttcgccaacctcagctacgggtgcgtgcttcagaaggaacttgtagaatagtccgcatgccaacttggaacggtaagcgggactggcatccggcagcacttcatcaggcttaatcagatcttccagttttgtgaatgtctgctccaccagacttgattcgtagggattctgtcccaccagcagtttctcaatagctgaggcatggataaaatctggacggattccaccgaagcaaattcgagcagatttcaccttgttgtcggcttccaattctaggagaaaagcggcgttgacataagcatgggcattttgggcacgaggcatgatctgcggaggtttaagtataagaaaatatattccaaagttagcttaagttgtataccttataggactcataaatgtatttgtccttcgggtaggcaggaagaacaaaagttttgagcaccagctttttatcatttgtgcccagatattctgcaagggacatttccttttcatcagcagcgtttttcaaagctaccactttaacattcagggcctcaaaggatatgaaaatatccgaaggaaactcgggattttgttttttgatcgaaatattgccagccaaagttccagactgtaacgatacgaaaataaatgtataactcaaactaatcaaaacaaatctacttacgtttcgcactggaacattggcaatcaaatcaatgtggttccacagaacgtccaagtactcaaatcctggctgctttgaagtagtacgaatgatttccatggtctgggtgagactgagattagctcctagcttcaattgctgtccctcagagctgtgctgatgcagttcctccactccctggacgtcgatgaagtgcttgatatccgtcgaccttcggtagaccccatgagccgtgttgccagccaccaacatgaactcctccgagtccttcaccttgtctagggcgtcgaacagttcgcttagactcttgggccagtgccactgaacaccatcttcgtagaccaaagtggacggaaggcagctaccactgcaggcttgtccggtctttgggcagttccggggttttagatcctcaatgtccccgcactcggcgggaatcgcaatgttactgtccaccgcaaaggacttcatggcatccagaattggacgatatccagtgcaacggcagatattcccaccaaaggagttctccacctccgccatggtgaccttgccttcgttctgctccatcaacccatacatgttcatcacgaatcccggcgagcaaaagccgcactgggtgccattcattttggccagacgcttctggatgggattgtagccggtgcgctgattgcccaatccctcggcggtcacgatctccagctgggcgcaggtattcagcagagtgaggcactaaagagaggtaattcattagagatcgatcgggttagttgcacggaatatgctccaaccgaattgacagcccagctgcgctttccatcgcgcaccacgcagatgcaggcgccacatcctccctcctggcacatgaatttggtggccgtgagttgggcatgctcgcggataaaggtgttcagagtgatatccggcggaaggttagttagattcactgaggagtacaacgagtgatggagcggagatgaagcgcatatagtagtatgggtataattaattacaaaaacctgaatgtgagcttgtgaaaaaacatcgaacaatgggcctcaaatttgcacactaatttgtttaccagctgcgtgttcatatgtgtatacatatgtaatttcaattaatgttattcgagttccacagccacttgattttgagatctggcgaatttaatgatacacctgctttaaagctagaggcgttgcaacgttcagaagtaaacactctcattagagaaaattctagtatttagggtatctacaatgtgtacatatatgtaactttatagctaactgataagttacgagaaccaagcacttgatggtgaagtattgccgtgaactgattttctggcccatagtcgataatcaccatgatacatacatatgtagctacatatgtatgtataactcacctgcatagggcagcccattgattgagaatttcgtagtcattctgatagttttccagcaaaaaacggcgtagcaaaaactaaaatgtcagctgctgaagtgttttctataaataattcaattagttgcgacttggccagtggctttccattattttccatttgctgctcactttttgctccggtcgctgcgagtgttgctgttcgactgactgatcaaaacattggggctcgagtagaggttcctccgtttttagattgcgattttctcgaatgccgtaaacaaaaaaaaaaaagttagtttcgacacactccgtgagagccaacaacgatttgagcagcctgtcgagctcgacgatcgacgttaattgcaaattgtggactggttgctcctcgcctcgactcgaagtctctatgcgcaaaaaatcaaaaaaaaaactggtgccgccgaattttgcttgttgctttgccacccaattcgtcggcaaattttcgatgtttgtaaaaatagctgtgcaaagggggcatagaatcggcagatgtacactttagatacccttccgcgctatgaaacttccaaatgtaatagttaaaaagtattaatatattgtatctcaccaattaaatgcaattgatagggtatgcagtagctgccaatgaaatgaacagaaatattgctgagtcacataattactctatcaacagagaaagcctctgtttaactaagattgcattttaattttatatgcctatgatttgattagatacatatgaattaaatattttcaaggtattgtatgtataataatgactattccaaatgggcagactcgcaaatatgcttttaattcgtgacgagcgtgatacgaactataaaaaaaccggcaaagcgaatcacgtgtacactaaaaataaaagagagtgccgcgataaatgtaaagagaacgatttagccggccggcgaaaaaacatacagtttttctctctgttcggaatttggagctttcaaaacaaataaatcattttgaaagctccggatgaaaaaaaaactagaatatcaagctttggatgacataatacattgagaaaaacgattagttaagcaaaatgaataaatatgaataaaaaatggaatgcaagttatgttaaaattaattaattgcatatgtagatagatttttaattggcgta

SEQ ID NO: 12809 - DNA, 3947 bp, DROSOPHILA
cagcgaccggagcaaaaaaaaacacttcagcagctgacattttagtttttgctacgccgttttttgctggaaaactatcagaatgactacgaaattctcaatcaatgggctgccctatgcagtgaatctaactaaccttccgccggatatcactctgaacacctttatccgcgagcatgcccaactcacggccaccaaattcatgtgccaggagggaggatgtggcgcctgcatctgcgtggtgcgcgatggaaagcgcagctgggctgtcaattcgtgcctcactctgctgaatacctgcgcccagctggagatcgtgaccgccgagggattgggcaatcagcgcaccggctacaatcccatccagaagcgtctggccaaaatgaatggcacccagtgcggcttttgctcgccgggattcgtgatgaacatgtatgggttgatggagcagaacgaaggcaaggtcaccatggcggaggtggagaactcctttggtgggaatatctgccgttgcactggatatcgtccaattctggatgccatgaagtcctttgcggtggacagtaacattgcgattcccgccgagtgcggggacattgaggatctaaaaccccggaactgcccaaagaccggacaagcctgcagtggtagctgccttccgtccactttggtctacgaagatggtgttcagtggcactggcccaagagtctaagcgaactgttcgacgccctagacaaggtgaaggactcggaggagttcatgttggtggctggcaacacggctcatggggtctaccgaaggtcgacggatatcaagcacttcatcgacgtccagggagtggaggaactgcatcagcacagctctgagggacagcaattgaagctaggagctaatctcagtctcacccagaccatggaaatcattcgtactacttcaaagcagccaggatttgagtacttggacgttctgtggaaccacattgatttgattgccaatgttccagtgcgaaactctggaactttggctggcaatatttcgatcaaaaaacaaaatcccgagtttccttcggatattttcatatcctttgaggccctgaatgttaaagtggtagctttgaaaaacgctgctgatgaaaaggaaatgtcccttgcagaatatctgggcacaaatgataaaaagctggtgctcaaaacttttgttcttcctgcctacccgaaggacaaatacatttatgagtcctataagatcatgcctcgtgcccaaaatgcccatgcttatgtcaacgccgcttttctcctagaattggaagccgacaacaaggtgaaatctgctcgaatttgcttcggtggaatccgtccagattttatccatgcctcagctattgagaaactgctggtgggacagaatccctacgaatcaagtctggtggagcagacattcacaaaactggaagatctgattaagcctgatgaagtgctgccggatgccagtcccgcttaccgttccaagttggcatgcggactattctacaagttccttctgaagcacgcacccgtagctgaggttggcgaaaaattccgaagcggagggcagatcctgcagcggcctctctcctctggattgcaagtttttcagacccagaagaagaactatcccgtcacccaagcggtggaaaaagtcgagggcatgatacagtgctctggagaggccacctacatgaacgatgtcttgaccacttctaatacgctgcactgcgccttcgtgggcgccaccaaagtgggctccaccattgattctatcgacgcctccgaagccctcaagcaacctggagtgatcgccttttacagtgccaaagacattcccggcactaacactttctgtgagcccagttttggtttcgaggtggaggagatcttctgctcgggattggtgcgccactcagagcagccagctggtgtaatcgttgctttaactgctgaccaggcacacagagccgcgaagctggtcaggatcagctacagcaatcccagttccgacttcaagctgcagccgagcttaggagatgtattcgcatctccaactccggattcctctcgcatagtgccagcatcgaaatcgacatccaagaagatcaagttctcggaacagccggacaaggaagtgaggggcatcttccagatgggtctgcagtatcactttaccatggagccccagacaactgtggccattccctttgaggatggtctcaagatcttttcggccactcagtggatggatcaaacccagtctgtaattgcccatatgctgcaggtgaaggccaaggatgttcaactacaggttcgtagattgggaggtggctatggatcaaagatcacccgaggtaaccaggtggcctgtgcagcttcattggttgcttacaagctaaatcgtcccgttcgctttgtccaatccctggagtccatgatggattgcaatggcaagcggtgggcttgtcgctccgactacaagtgtcacattaaggataatggcaagattgtgggcttgacgaatgatttttatgaggacgctggctggagtccgaatgaaagtcccattgagggtcattcgaccttcacggccgtcaattgttatgatttgaacggagataactttaaaaacaacggaaatgcggtgctaacagatgcgcccagttccacttggtgtcgtgctccgggatcggtggagggtattgccatgattgagaacatcatcgagcacgttgccttcgaagttcagaaagatccggctgaagttcgtcttgcaaacattgcggcgggtaataagatatccgagttgcttccccagttccttgagtctagggaatatgcccagaggaaaaaagaaattgagtcccataatgccaagaatcgttggacgaaacgaggtctcggattggcggtaatggactaccccattttctattttggccagtacccggctacagttgccatctatcatgtggatggcactgttgtggttacccatggaggcattgaaatgggacagggtatgaacactaaggtggctcaagtggctgcctacacccttggcatcgatttgagcttcatcaaggtggagtcctccgacaccatcaatggagccaattcgatggtcaccggaggagctgtgggcagcgaaagtctctgctatgcagttcggaaggcctgtgagaccttgaacagtcgcttggagccggtgaagaagaaggatgccagttggattgagacagttgaagctgcctatggcaaatcgatcaacctgattgcctctgatcactacaagaagggcgatatgcaaaactatcatatctacggtctggccctaaccgaagtagagttggatgtgctaactggaaacagtcagatcaagcgcgtggatatactggaggatgccggagagagcctgagtccctggatagacatcggtcagattgagggtgcctttgtcatgtgcctgggctactggatgagtgagcagctggtgtacgaccgggaaacaggtcgcctcctcaccaaccgcacctggaactacaagccgccgggtgccaaggacattcccattgattttcgcattgagctgattcagaaacccaatccctctggggcgggcttcatgcggtcgaaggccactggagaaccaccctgttgtttggctgtgagtgtggttttcgccctgcgacaggccctggattcagcccgccatgatgcaggactaccgcgggagtgggtgcgtctgggtgcacccacaactccggaaactctggtggtcaatgcaggacatgaagcagccagttttaggcttaagtaaatatgtggttttgatcggcttctgtcccatttacatatacatatggttctttctttatacatatatttgaaatattattaaagtttttatattgaaatgc

SEQ ID NO: 12810 - protein, 1254 aa, DROSOPHILA
MTTKFSINGLPYAVNLTNLPPDITLNTFIREHAQLTATKFMCQEGGCGACICVVRDGKRSWAVNSCLTLLNTCAQLEIVTAEGLGNQRTGYNPIQKRLAKMNGTQCGFCSPGFVMNMYGLMEQNEGKVTMAEVENSFGGNICRCTGYRPILDAMKSFAVDSNIAIPAECGDIEDLKPRNCPKTGQACSGSCLPSTLVYEDGVQWHWPKSLSELFDALDKVKDSEEFMLVAGNTAHGVYRRSTDIKHFIDVQGVEELHQHSSEGQQLKLGANLSLTQTMEIIRTTSKQPGFEYLDVLWNHIDLIANVPVRNSGTLAGNISIKKQNPEFPSDIFISFEALNVKVVALKNAADEKEMSLAEYLGTNDKKLVLKTFVLPAYPKDKYIYESYKIMPRAQNAHAYVNAAFLLELEADNKVKSARICFGGIRPDFIHASAIEKLLVGQNPYESSLVEQTFTKLEDLIKPDEVLPDASPAYRSKLACGLFYKFLLKHAPVAEVGEKFRSGGQILQRPLSSGLQVFQTQKKNYPVTQAVEKVEGMIQCSGEATYMNDVLTTSNTLHCAFVGATKVGSTIDSIDASEALKQPGVIAFYSAKDIPGTNTFCEPSFGFEVEEIFCSGLVRHSEQPAGVIVALTADQAHRAAKLVRISYSNPSSDFKLQPSLGDVFASPTPDSSRIVPASKSTSKKIKFSEQPDKEVRGIFQMGLQYHFTMEPQTTVAIPFEDGLKIFSATQWMDQTQSVIAHMLQVKAKDVQLQVRRLGGGYGSKITRGNQVACAASLVAYKLNRPVRFVQSLESMMDCNGKRWACRSDYKCHIKDNGKIVGLTNDFYEDAGWSPNESPIEGHSTFTAVNCYDLNGDNFKNNGNAVLTDAPSSTWCRAPGSVEGIAMIENIIEHVAFEVQKDPAEVRLANIAAGNKISELLPQFLESREYAQRKKEIESHNAKNRWTKRGLGLAVMDYPIFYFGQYPATVAIYHVDGTVVVTHGGIEMGQGMNTKVAQVAAYTLGIDLSFIKVESSDTINGANSMVTGGAVGSESLCYAVRKACETLNSRLEPVKKKDASWIETVEAAYGKSINLIASDHYKKGDMQNYHIYGLALTEVELDVLTGNSQIKRVDILEDAGESLSPWIDIGQIEGAFVMCLGYWMSEQLVYDRETGRLLTNRTWNYKPPGAKDIPIDFRIELIQKPNPSGAGFMRSKATGEPPCCLAVSVVFALRQALDSARHDAGLPREWVRLGAPTTPETLVVNAGHEAASFRLK

SEQ ID NO: 12811 - DNA, 4051 bp, DROSOPHILA
cgacattatctgctccaccctcttgcgcagatcattgcgaccacaatcgcccagggcgcgacacagacgaagcagaaagtgcttgggatcgtggcaatcatcctcttcgatgagctgcagcagtcgcagaatctgggacttcaagtcgtgcgggtagcgctcctcgattgtgtccatttggccctcgccaatgcccgccgatcggcccagtcgtcgccaatagcgacccagttcctcggatattttcttaaagaccatcgttcgtttgtgatccgtaaaagcagctggggtggcatagttttggattgctgttggaggcacagcggcagctaattccgaaactgatggctgagcattctgggaagctggagcaatacggagctgctgacgaagttcctcggccaatcggagttcctggtacagattaaccggatgtccaagaatgttttccggctttgtgtaggcgctcagagcctcgatgagctgtggcatattgcctgatatccggcgcagtggctccacattgtactccgatagttcgtccgctcgttccaggcagtcaattaaatcctcgatggttcgtatgcaatccgatctgcgtcgcgaaccaatctcttcgacaaaaattagtttcaactgctccacgttctcggtgcatccatcaatggcgatttgtttgaggctgtcgtagctccagtgcctgcctgcagtcattgtgactaatttacagagacggtattttcagcggtcttaagttcccaaaatgtatcaacgcaacttcactccctgatgtagtatgaccgtatggccaaacatttccttacctgttatcgatcagcactgaataggtgtttgagcaaaatgagcaaaaaaatatcaaatactatttccatacaacttaaaaaatttaaaataagctttaaacttgcaccaccttgcatgtttgggatctattagtgagaccgttacatagccattcgataacatcgataacagatggcacgcaccatccctagttttgatagatatatatttatgtttttgttacttttactgaagcaactaatgataaacgcaaacgtgtagacgaatggaaatatccattaacgttttcgtattcctcctctacactctggtcttgatttaccttcagcatttcgttaacaagtacacagagttcgtccgcagcctctaaatgttgggccttcagtcatacgccagttcctcggatgaagaatcggaccatgcggacgccgccacagccaccacgaattcagagccctccgctcccattccggatcacctgctgcccgtggacaagacacactcgctatccaagtccattgctgtttgtgcggcgccaacggtggttccccttggagcatcggccgtgccccgaactctggatcccacgctcaaggaggtaacctacaatccgcgctatgaggagatgtatgctccggtaaaaggtccggagcatccggacctcaccatgcagcagcgcgctccgcggaacaccctagccggctacgtagagaaggcccacatcaatgccttcgaatttgagaaccagcgacgcacctttcacacctacggctacgcattggaccccagcgtagacgatcaggcggacggccagtcttttgtgggtgacctgcagtctgcgtacgatgacaatggcaagacggtatttgagccgcccaaggcaaagaaactgcgcaagcaggagaaaaatgataatcccgaggacattgagggctttctgggtccctggggcaagttcgaaaacgaggtgtcggtggcaaagccaaatgaacaggagcgcgccgaactggacgagctgctgtctaagcgacataagcgcggacgcattcccgaggataagccgctcgaggagaagtcgacgctgcacagtgagtttaatccaatagccaccgaatatatatcgttaataatcttttccttttttgctccacagtcaaggatgcgtacgactatcagggccgctcttatttgcatgctcctcatgatctgggcgtgaatctacgatcgaatgcaccaccgaccaaatgctttctgcccaaggcgcacatacacacctggtcgggccacaacaagggcatctcctccatccgctggttccccaagaccgctcatcttctgctctccggatcgatggactgtcgcgtcaaactgtgggaggtttacggcgagcgacgctgcatacgcaccttctccggtcaccggcaggccatcaaggatattgcgtggaacaacaggggtaccaacttcctgtctgcctcgtatgatcgctacataaagttgtgggatgccgaaacgggcgatgtagtgtcccgattcacaacgcgtaaaatgcctttctgtgtgaaattccatccggataatagcaagcaacatttgttcgttgccggcacctccgacaagaagatcatttgtgtaagtaaaatttacaaaagtagatgctcatgttacaattgttttcctatcaattcgcagtgggacactcgcagcggtgatattgtacaggaatacgaccggcacttgggatctgtgagcaccatcacctttgtggacgacaaccgacggtttgtgaccacctcggacgacaaatcgatgcgcatatgggagtgggacattcctgtggacatgaagtacattgccgaccccactatgcattccatgccggcggtcacattggcgcccaatggcaaatggatggcctgccagtcgttagacaacaagatcgtcatcttctccgccctcaatcgcttcaagatgaaccgcaaaaagaccttcaccggtcacatggtctctggctacgcctgccagctggacttttcgccggacatgagctatctggtgtcgggcgatggcgatggcaaatgttatatttgggactggaagacgacgaagatgtacaagaagtggcaggcgcacgacggcgtctgcatcagtgccctctggcatccgcatgaggccagcaaagtggtcaccgctggctgggatggccagataaaatactgggactaatggtccgcacaaaataacatagatagatgtaagccaaactgatgtgtaaattgattgattatattgcttacccattatgttccaattgagctcatttaattcatgtgtatcaagcccaattcctaagttatttatccatccggttgcttgatattccctcccccctttgcgagattggcttttatttaccttcagttgtgataagagtacgcatgcgcagtgcatgtgaaatggcaaacaactcgacggatggtcggcccaccacccaatggcccagccacccccactggcaagtcaaaacatatgcgagtagtgctggccaaaatcgatattttccacgaaagtcgcacaaacgtcggacggattgtggaagacttgtcaataatctgtaaaaaaaacgcgaaaaaaaaagagttctacggcgtagaggagatgcagtaaaaggcgacggctaggtggacaccgagcatcagctagacacccgtaattcctgccagcggccatggccaagccccactcggatgcggatgcctctggcctgggctacgcctaccagctgccgtccggcggcctcctgctgcgcctcaaatcttccctctcacagttcagcgatttgttcagcgacttcagcaggtacatctcgcccgcctatcatcacgatcgctgcgagcgatccgtccatatgcgactctactcgatgcacaagcgcgagtttgtcatggtcttcctgggattcttcacctgcttcggtctgggcatagtcatcgggctgacgggaccgcccataaccagcacatcatcgctgaccgcccagcagattctggcgaacacctcgctggcgcatagcccaacggtcctggggaagggacccttcgccatgaagtcgccgctgaccaccacatattcgcagcaaatgtggctgatagccaagctggtgacggacaacaatgatggtgggtcttgtgattgcgactattttacttttcttacatttacatat

SEQ ID NO: 12812 - DNA, 1926 bp, DROSOPHILA
cacgcaccatccctagttttgatagatatatatttatgtttttgttacttttactgaagcaactaatgataaacgcaaacgtgtagacgaatggaaatatccattaacgttttcgtattcctcctctacactctggtcttgatttaccttcagcatttcgttaacaagtacacagagttcgtccgcagcctctaaatgttgggccttcagtcatacgccagttcctcggatgaagaatcggaccatgcggacgccgccacagccaccacgaattcagagccctccgctcccattccggatcacctgctgcccgtggacaagacacactcgctatccaagtccattgctgtttgtgcggcgccaacggtggttccccttggagcatcggccgtgccccgaactctggatcccacgctcaaggaggtaacctacaatccgcgctatgaggagatgtatgctccggtaaaaggtccggagcatccggacctcaccatgcagcagcgcgctccgcggaacaccctagccggctacgtagagaaggcccacatcaatgccttcgaatttgagaaccagcgacgcacctttcacacctacggctacgcattggaccccagcgtagacgatcaggcggacggccagtcttttgtgggtgacctgcagtctgcgtacgatgacaatggcaagacggtatttgagccgcccaaggcaaagaaactgcgcaagcaggagaaaaatgataatcccgaggacattgagggctttctgggtccctggggcaagttcgaaaacgaggtgtcggtggcaaagccaaatgaacaggagcgcgccgaactggacgagctgctgtctaagcgacataagcgcggacgcattcccgaggataagccgctcgaggagaagtcgacgctgcacatcaaggatgcgtacgactatcagggccgctcttatttgcatgctcctcatgatctgggcgtgaatctacgatcgaatgcaccaccgaccaaatgctttctgcccaaggcgcacatacacacctggtcgggccacaacaagggcatctcctccatccgctggttccccaagaccgctcatcttctgctctccggatcgatggactgtcgcgtcaaactgtgggaggtttacggcgagcgacgctgcatacgcaccttctccggtcaccggcaggccatcaaggatattgcgtggaacaacaggggtaccaacttcctgtctgcctcgtatgatcgctacataaagttgtgggatgccgaaacgggcgatgtagtgtcccgattcacaacgcgtaaaatgcctttctgtgtgaaattccatccggataatagcaagcaacatttgttcgttgccggcacctccgacaagaagatcatttgttgggacactcgcagcggtgatattgtacaggaatacgaccggcacttgggatctgtgagcaccatcacctttgtggacgacaaccgacggtttgtgaccacctcggacgacaaatcgatgcgcatatgggagtgggacattcctgtggacatgaagtacattgccgaccccactatgcattccatgccggcggtcacattggcgcccaatggcaaatggatggcctgccagtcgttagacaacaagatcgtcatcttctccgccctcaatcgcttcaagatgaaccgcaaaaagaccttcaccggtcacatggtctctggctacgcctgccagctggacttttcgccggacatgagctatctggtgtcgggcgatggcgatggcaaatgttatatttgggactggaagacgacgaagatgtacaagaagtggcaggcgcacgacggcgtctgcatcagtgccctctggcatccgcatgaggccagcaaagtggtcaccgctggctgggatggccagataaaatactgggactaa

SEQ ID NO: 12813 - protein, 576 aa, DROSOPHILA
MLGLQSYASSSDEESDHADAATATTNSEPSAPIPDHLLPVDKTHSLSKSIAVCAAPTVVPLGASAVPRTLDPTLKEVTYNPRYEEMYAPVKGPEHPDLTMQQRAPRNTLAGYVEKAHINAFEFENQRRTFHTYGYALDPSVDDQADGQSFVGDLQSAYDDNGKTVFEPPKAKKLRKQEKNDNPEDIEGFLGPWGKFENEVSVAKPNEQERAELDELLSKRHKRGRIPEDKPLEEKSTLHIKDAYDYQGRSYLHAPHDLGVNLRSNAPPTKCFLPKAHIHTWSGHNKGISSIRWFPKTAHLLLSGSMDCRVKLWEVYGERRCIRTFSGHRQAIKDIAWNNRGTNFLSASYDRYIKLWDAETGDVVSRFTTRKMPFCVKFHPDNSKQHLFVAGTSDKKIICWDTRSGDIVQEYDRHLGSVSTITFVDDNRRFVTTSDDKSMRIWEWDIPVDMKYIADPTMHSMPAVTLAPNGKWMACQSLDNKIVIFSALNRFKMNRKKTFTGHMVSGYACQLDFSPDMSYLVSGDGDGKCYIWDWKTTKMYKKWQAHDGVCISALWHPHEASKVVTAGWDGQIKYWD

SEQ ID NO: 12814 - DNA, 8682 bp, DROSOPHILA
ataaagttccctggctaaggaatctttgccatggcaagttaaagacaaatgtaaatccatgtccatgacgattcggcatgccttatgtaaggctgccacatcgagggtgtatcggtggaaggtgggcgtcatttggtggctagtgggtaatggctgtgagctgcagaagcctaccagtcaaggttgccctcatgtcaagcgtgaaattcgaaagctgcatacgttggccccaatggcggaaggggcggtggaagtcagaaggtatgcggatgtaaagcgggcaacaaaggtaccgccacaactgctactgcccgatcagctacacagcttccattgtcatcgcattgttgccatgggggtgacatgcaatagattatgcacagggggcggcatccgcctaattacccatagtgtgcataccaaaaaggtatttcgaagcattcgtgctgccgataagttggtttactggttgttggtctttggtccttggctttctgtccataattgtttgtttttttttcttcatatttgcaaggcctattgaataactgttttggtaaccgtagcttattcacgagccacgcacttgatagtcgagttacaaaccatgctagtagcgcaggcacacaccctgtcacagtcgcgtcccgtgcgagttggtacactctggtgctatttggtttgaagcgtacagatagatagggaaatctgtacgatgtaaaacaataaatatatcatttgcatggagcatgacccttggtatgccctaagtaactgcggaatgcgctagaacttaagttcaattagaaccacgtgatgcatgggaactttaaaaacaatggaatctgagcgtagagcgaactttttgggatgcaatgcacttgcgtttacattagtcaaataaaccgcagtttctctgctgcgaccaccgttgctttcttgaatagctcctccagctatcgattctgtacgatttggctcagtttactttcatcattcgacctcgccggttctgttgcgtccgtttattctctgtttctttttttttaaattaaccccttacctgtgcgttgcgtagctcaaaagtgtatagatatccaaggcaagttcggggatttttcgtgaatttcttgcggcccgtaattaacgtgggtttacctggccgcccgcggcaaaagcattaatagcgtgacgcccgtcatcacagctgtccgccgtcaaaaaggtgagtaaacaatgcgaatgggaaccgcttcgaagatcgcagacggtcactgtacacgggtgttagacgagcagagagagccgcaaacatcggagcgaaagagagaggatcgcgcttgtgggggcattctagcttaatttagccaaccgaacgtgattcggattgcagcttgattgctttctttgcatgcgatatgtgcgaaaattgcggcgtttccctataattgtttatgtacattaacgtggggaaacaaggctactttatggcgaaaaatatagtttattgataaatatatttaaatagtgagcgaataaaatgaatcagagctgaaaagaaatttataccggtttctagatcatcaaaatggaaaagaacgtaaaatagaaattctcaagggtttttaaaattataaagacaaagtagaacgttgtactaagttatccgtaagatgttaatagtttaaaacggtttgacaatgaagaatagtttgaaaaataaagattttaaatggtaaatgttaatttttctgtatcttttttttaatatgccaaaatattgttaatactttggaaagctaactttccacacttcaaataatattttgaaaagccaaagttcttaaggccaatgaaagatgaacgctatccggaatgccccttagttcagtggcttgttgccatgtcaatacgagcgaagataccacaaataaatcaagccaacaaaagaatgccggagaaaaggaaagggacagaggcagttatgtgaaatggcagcattttgtggctaaattcttcaacacctttcagctgattgagtggtgccagtttttgggacgcgactgttagtaaagacgctaaaaagcaggccgcggaaaattttccatttttcgaaagctttgggatgaaagctttctattcaaacgctgcctactttcagggtcaactgacccgttgagggaaaatcaaagcttgcatttttccctcttcactgtgctcgacctcgctgaggtgcaaaagagctgtgcttgccaactgcatcgtaccgatgtggttatacgggatccagatttggggaagtgcagccaaatctaattatgacttcaaaatcgcgcactacgacaataaccaactgtccctggtatttaagtaattccacactccataaggacctcaatccttacacagttgaggcacaaatgggaagacacacaagtcgatgcagcggcagattactgagttatagcagtcttcttgcaagacgtcttatagccgcttgacctctgaggcgacttaaacggcaaggctatgcaaagacaattgtacaacagtaaaaacttttcacttatgtttctacttcatttatagaatatttaagaataatattgatgttaagttacaatatcatgttgtacgaattcttcacttaataaatatagtatatatgtacataaaaaaaaagtgctcgaccttgaactaatgatatccctatttgtttatttttgcagttaatcaccgcactgaaataaaacacgtcgcgtgacaaaactgaggtgagttctaagttaagttggcagttaaacttaaggtccaacgcggcgtatacttattatgacgtatacttaatatggcgtggtaaacaagctaacaggaacctggctcagggaaccccagtgcgtcacagctcgcacctcgatgacttgtggaagatggccagtgccaaaaataggcacttctctcacctgtccgagccccttgttttcgtaccgcatttgcctttgcctttgatgggcggtaagactctgcccaagtgcttcccacagcgctccattcataatataatgcgctgggcaaataagtgagtgtgtgcgcccctctctcggttggtaacttggtcggaaactcggtcgttcagccggtctgtgcccatgtctccaaagatacgtgatccgagagatagtcgacactgcgatccggcctgaatgggaggtgacgcggcaagccggagagctggggtgctggcacgggaaagagagccgggtcggggcagcttctaaacacaaacgcaaatacggagcaacgtcgctcggtgatttacccatccagctatagacatatgtatgatatcaagccggccagagtgtctgtggtcagttcggcccactcccagatgacaggtgacggccatcgaattggggtatttcctcatggcgattctagattctacattcacgtcaccgaccgttttattcggtcaagggtagtcgatggcaactggcatttggtgccattgaggacttagttttaaacgccctgattcacttcgatcttaactaaggtgcggtctttccaccactgtatttccatacaccaattatgtggaagttggcacagtgggaattctatttgaatggagtaaattccattccaagcgataaaacattaagtatttaagtcgatgcgtacagaacgagaaagatcagtaacggctacttctagagtataataaaaccaatgcaaatcgaatggtaatctcccaataatcgaatgattaaccttggcatatcgcacacatcaaccacattgagtgtgccaaattagaacagtataaggaagattgcagaaataatcctttcttgactctcagatgatgcaaatttaaattgaaatttaagctattatttatatatgatttcccggtagtttatgtactttatatataatataaaataatcagttataatgccatacaatctgaaattgtcttctgtgtggcaaattagatctagaaactgattgatatattgttcatatccgagttgcattaaacactgtatctgtttaatgttaacaaatgtaactttatgaaaaatgtaactttgaaggaaacactatcttctgtcgcgtgtgcatttggctaacgagaacttacacaatgaacttacacgtgcatcttggtggtatatttgctaaatttaaatattatatgcctggctgaggcgataagtctgagcgatatttccgtcgctgtaagtgtgggatgtttgcagctttttactacgctgagtactaagtactgtcgtacgtcactctggaagagctcatcaatggaatggtcatttctaaaaagggaatggcaaacaggaacgagcgatagatagcggatctccctcaaaccggatgacgttgcaagtttagcgagttcaggccgagattagtgcgtggccaaagttagcacctcctcgagtgcgataattaacagtcaacaatgcctggatgggcgcaaaaaaaaaaaaaaataaattataataataataaagaggaggaaatcaatacatatcgaatcaaaaggagaaggcacccatctagcgctgaacaaatgcaattctggactgacagcgggcaaactgcattggaaaacccttggacatggcctccagctcgaattccggaaaagttggcaattatggatctgcccagagcaattgggtaaaaacaaagctcgaaaaatttgcccaactgatgaaatactacgcagaaaactcgacaagggaatacgactcccatgagctttgtgtcccatgagtgggttgaactacgtgcgtctttatgagtaattgctatgtcaaagtgtgagtgccatgttgggctaggttatgtgcttgctcgatgcactgtgcactactgtgcactggccatagaagagacagacactctgtctgccggttgccggtgtctcttatacccagtgctcgatcaattggccaagtccagcgaccagcggccagcggccagcggccaagtggctattgccagtcagttgcatgcaaaacgcgcacgtgccaagcgatcgatcggaaatgcctacggaacgacgcgtcatttgccaggcaagtggcacccgcatcataaatcgccacttagttaaagtaaatacagtaaatcgagtaactgaagaatccgaagtgacgccgccgccacagcagctaagagacacgagatattcgcaaattaatcaaagtaaacgcgattccactttggctaattcagcctgatgggcattgagaccaatgttgaatttacatatagccattacaatttccggaaagctcagtattcaggcatcaggcttatcaaatttcgtacaagaacagtgaaattccccataaaaaatgtgtttgttgtcaaaatgttgcctcgagctttttgctttgggtgttactctgttagcttgaacactgagtttggaatatgtataccaaacaaattccaagaatctatcaaacatgtattaatcagctaacaaacagagcaattggcatgtgtcgttaaacagtgactaaaagccactcatagacagagctaaactaaaatgtttgcagtcgtcgtcctccaggcaggcaatttaaataaggattcaatgttgcgattgtaaggtcagcctaatgccagttggcaaccaagatgcccgattacttggtgtagggtgcaagaatgcaatgcgacatccgttttgggccatgaagcgtgtgtgcataaattacaacggttggcaactcatttgccgcaagacaggaagaaaacaaaacgtcatgtgcagcgctgcaacagcggcatgaactactgaccagggagtagctaatccccggctgagtcaggaagcccatccaagccaagccaagccaacccacccactcacccactcacccccacctccgataattgagaaaacccaaattcgaactccctttgcgggccgttgtttttttgattcattatcgtcatcgaccatcggccgctgatgctgccgttgctgctgctgtggttgctgctattgctgctcttgctgcttgctgttgttgttgttcacttgtcgctacaacgagcacaacaagtgtgagtacccgccgcccgcgcgcgtgtatgtgtgtgtgtgcgtaaaaaaagtaagctcggccacgcgctgcgccgctcgtgcggcttcggctactgatatcgccggatggcggtccggtttgtatttaaatcgccggcgtgtgccccaactcctcattaaccgtaagatctcgcagagcccgcacgccagccccagctctccagctatccagctatccagctctttagcgcgctttcaatctgaatcttggccaaatatcgaaaaccaataagacatactctccgaaccgtgtgtgcctaacatcacaaatcaaatcaaaatatgaccgccaacagcagtgccagtgaatccttcgagctccaattcttggagcgactacagcagcagcagcagcagcaggagcaggagcagagtgctccggcggcgacaaaagcgtcctgccagcagcaatccaacatcatcggtcgcatttgtaagtgtgcattaagatctagcgcctctgaatcatgtcgctctatctgtatctttgtatctataactgtgtcatcgctgggcaaacaggaaagtgctcatcaaatgatagggatcttgggcattgaagttttcaatcatcattatcttattggccaagcctgggcatccatcaggattagggagatcttttgaacatctttgtatgaatcctatttactgaccttccatcttcttgcattgcagctacctccaagtgctggctcctgggcatcctgctgctactcacagtcgccactagttggccaacggggacaattgccgcaccgcgtcgcgctcgaggattgagcctgattctgccgcaccgcaatcacgcacgactacaccatcaccaccagcacaccaggtcaataagcaccaagatcgtgcccctgttaaccaatcagactgaaggcagggagcagtgcacggaccttaaaatgactcccaatatcgaacacctgcaagtggcgctcgaggtggccaagaatacgcgggaggcggtcctctgtctgaccaaagaatgggtaagttagctagaacgatggacttgcggcagcagaggcactaagtttcccatttcccattttttttcattgcgaaacagctgaggaatcaaaaccacaccctgccccaagatcttcactcctactctctgcattccctggcattgaagcatccgctccagtcggaggtcaaggaagttaagttccagaaccagctgggtgactttgtgtacagtggcaaggtgacaacgctgcaggaggagatgccggccattatcgagtccctgctggtcctggagcatctatacgagatcattgtgttcgatcaccagtcctggaactgctacttcaataacttcgtgcatttcttccatcacaacatgcacgaggctctcaaggtcgccggtctcaacgatgcctgcaatccgaggaacgccgagtacaatgccgatcacatatggccgatgtttggcgccgccgtggagaccatcaaggtgctgaccatcatcgagcacaagtacgagcagctgatcaagctgtatcagtaatccgctggacagagttggacgctccagaggagcagtaaaagccataccaaaaataatcgcctccgatgacccactgcaatctcaagctaataggctatgcccacgagtatccagatccgtattcgtctactagacaccctcatctgccttagaccctattatttattataacttattaaatccccattgccctcatacgtatttatatcgcctttgcatcctatttatatacatacgcgtaccaccatactcactgaacacattcaccgcatcgcaggctcgataacttatgaaaactattacttaagtgtattttttttatatatatttacaatattacaatgactattaataaattataccgataggcgcatacgtgaagtgcttttcttttctggttgaccaatttcatcattcagatgaaattaagttacaacgaattgggggcttagtcaacggtgggaattctgccaacctttcgaaggtctacaacatcgattaaagcatgggtggtcataagatgtttccatgaattgaaacaagtggaaatggaacaaatcaaaggtagagttcaaagtataattctcaattgcatagctagctaagtaaatcgcttaatacttagggttttttgatttttcactgttttttttttggggactcgcgggtttatgacctccaatgcttgaagttggcaacccaattaccactcccccaaatcggaaatactggggaagtatgcgcgagattccgtttttggcccgactcgtcacctgccctgacccaccccattgtcgtttatagctcgtgcccggggcacgttccgatagatagatagatacatagatagatgtatgtacatacatatatatcggttcgaggttttccacagcgcggctgttaagaaaaccccaagtaccgtacagccgtctggctgtgactcatggaccattaggcaaaatgtcgggcaatcgtcgtgtgatctctgcatgtgacaaag

SEQ ID NO: 12815 - DNA, 1037 bp, DROSOPHILA
acctcgccggttctgttgcgtccgtttattctctgtttctttttttttaaattaaccccttacctgtgcgttgcgtagctcaaaagtgtatagatatccaaggcaagttcggggatttttcgtgaatttcttgcggcccgtaattaacgtgggtttacctggccgcccgcggcaaaagcattaatagcgtgacgcccgtcatcacagctgtccgccgtcaaaaagttaatcaccgcactgaaataaaacacgtcgcgtgacaaaactgagctacctccaagtgctggctcctgggcatcctgctgctactcacagtcgccactagttggccaacggggacaattgccgcaccgcgtcgcgctcgaggattgagcctgattctgccgcaccgcaatcacgcacgactacaccatcaccaccagcacaccaggtcaataagcaccaagatcgtgcccctgttaaccaatcagactgaaggcagggagcagtgcacggaccttaaaatgactcccaatatcgaacacctgcaagtggcgctcgaggtggccaagaatacgcgggaggcggtcctctgtctgaccaaagaatggctgaggaatcaaaaccacaccctgccccaagatcttcactcctactctctgcattccctggcattgaagcatccgctccagtcggaggtcaaggaagttaagttccagaaccagctgggtgactttgtgtacagtggcaaggtgacaacgctgcaggaggagatgccggccattatcgagtccctgctggtcctggagcatctatacgagatcattgtgttcgatcaccagtcctggaactgctacttcaataacttcgtgcatttcttccatcacaacatgcacgaggctctcaaggtcgccggtctcaacgatgcctgcaatccgaggaacgccgagtacaatgccgatcacatatggccgatgtttggcgccgccgtggagaccatcaaggtgctgaccatcatcgagcacaagtacgagcagctgatcaagctgtatcagtaa

SEQ ID NO: 12816 - protein, 177 aa, DROSOPHILA
MTPNIEHLQVALEVAKNTREAVLCLTKEWLRNQNHTLPQDLHSYSLHSLALKHPLQSEVKEVKFQNQLGDFVYSGKVTTLQEEMPAIIESLLVLEHLYEIIVFDHQSWNCYFNNFVHFFHHNMHEALKVAGLNDACNPRNAEYNADHIWPMFGAAVETIKVLTIIEHKYEQLIKLYQ

SEQ ID NO: 12817 - DNA, 2739 bp, DROSOPHILA
tctgctgtgggcggtggcctgcatttacaagatattcgagaacgacgattcgctctacgtggatgtgattaaatcgcgccgctactcggacaaccaggccactgaattggccgtgctcggcggcatcagcatgtgcctaactttgtccaacgttctgtgcgtctatctcatgggcatcctggtgctgaaggtaaaggagattgccccggtgattgggcgcaaaaaccgacagttctggaagcacgacataaagctggcgcgtaatggcaaagtggaaacggagtcggagatactcaacgagctaatagccaatctggccaccgaagacaagcacgcactgggctccatcaatcgtcagttcctgcgccatctggacgaatcaaactaccagcacacttggtcgccgctcagcaaccgacatagtttctcaatgccacaaccgcctggcgccggcatctccaccatccatcgcctggaacaattgtatgcgtcgagaatagggtttaatccaccagcagtagaacgacgccaacgccacagcgtagtaagcagaccatcgcaacggagccacgaggtctccgttcagctgagtcctccacagccagtaagtagcacacaaagctgtcttgtctatcccgagtgctcatttcgtgtattccagcgtccacgattcgcgagcatgccatcgcaagtgggaaaggacgagccagctagggatgcggccatccaagtcgcgagctccaagagatttacggtaacaccagctcgagtggacgagcagacctagaatgttgtcaagtccatttgggtttccactctcacagatctttgtataatatttaaataatgtaagtgtcaattttgtaaagttaattagttgttatactccagcagggggtatgtccgtacagaatctgtgatagtgctaacctgcaatggcgtccatagcatagttaagcgtatatgtgtaatgtgcatctttgtataacaatttccaataaaaaactacaagtctaatccgctcggtccctgccgatccgctttgacttgggcgcgaccacgtttcagttgtagacgttcgcggaccgctcgctcctggcgcctgcgcagcttctccagtgtctcctcgctgggtggcgcaggtgccacagcctcctgggagcgtatgatggtgcgcagcttctccagcgcatcggccaggttcatttgctgggagcgcgtaagatcactcttgatgtaaaagtagccgtctttggtaatccggtttgccagcaccttgagcagcttctggcgcgtctgctcgggtatccagtccgcttgtgccaccttgaagcgtacatccaccttggtattcaccgtgttcacgtgctgaccaccgggtccggagctcctgctgtaggtgatctccagtcggtccatgggaatgaagccgctgaacttgtcgctgccactgggctgggtgggggatgtatacatatatcaatagatgggatccctgaaggcactgcatccacttaccggcgggggcggcgtgtagatttgcagtcgggcgccgggatagatcttgtccagggataaatcgctcttgtaggagagctgacgacccagaaggttgcctgtgccgcctgaggagctgctctggcgcagaactcttatgaaggcactcgtaattttattcattttatgccaaaatttcaatgagttaagctaaattaaatgttacgagaacgacgtttgtgttcaccacagaacagctgttcgaggtgagttgcgtgcagtgtgaccgaacttagctaagcgcgacaattcaaaactcccaaatcgaaagcttgttttatcttttatgtaaccgtgttttctttattgttaatcctaaaaaacaatctttaatcttaaaacaagggaaaacgatactttgtacgccatactctgtaacttttccactgtcacaagcataaggcagtgtggaaagtgcattaggtaagtcctctggttgaagtgcgcactagccaagttccaagccattagtggagtgccaatttaggcaattttcagcttcgtatggcgaacattttcgtattcgaaatgtctgaccacagtccctctgcaactttcattgaatgcggtcgagtgcggttgtgcgacggccgattgttgttattaatccgccgcaaacgaaactgaatccaggtgggcactcacaccgatcttccggactatattgcaccgaccttaaatatatacacgtatatcaaagactggagaacccaaaaactaaatgtttacaacgtgcggcaaacgcgaaatttgcggttttcattaaacagtgaggtagatagtggttgcgatcgagttctcgttatatttatatttctgctttcgatcttgttcttgttttttttttctcctgctcgattccaattggaagcgttcgatcggtccagaaatccagaattattctttattgatcgctgtgactgcgtgttcgccgagaattattcgtcgtcatcaacagaagcggcccgaattggctcataaaacataaaaatcgcttggcagcagccacacggaatatatatatatatacatatgtataaatttatttatatttgtacgcatatatagttaaaattcgagacgagacgcgaaaggcgaggcaaacaaaacaagcaaataaaaacgtaacaaaacaaaaacgaagtgaacagcgtgtttttcgggatactcctttcgttctta

SEQ ID NO: 12818 - DNA, 676 bp, DROSOPHILA
cacaaacgtcgttctcgtaacatttaatttagcttaactcattgaaattttggcataaaatgaataaaattacgagtgccttcataagagttctgcgccagagcagctcctcaggcggcacaggcaaccttctgggtcgtcagctctcctacaagagcgatttatccctggacaagatctatcccggcgcccgactgcaaatctacacgccgcccccgccgcccagtggcagcgacaagttcagcggcttcattcccatggaccgactggagatcacctacagcaggagctccggacccggtggtcagcacgtgaacacggtgaataccaaggtggatgtacgcttcaaggtggcacaagcggactggatacccgagcagacgcgccagaagctgctcaaggtgctggcaaaccggattaccaaagacggctacttttacatcaagagtgatcttacgcgctcccagcaaatgaacctggccgatgcgctggagaagctgcgcaccatcatacgctcccaggaggctgtggcacctgcgccacccagcgaggagacactggagaagctgcgcaggcgccaggagcgagcggtccgcgaacgtctacaactgaaacgtggtcgcgcccaagtcaaagcggatcggcagggaccgagcggattagacttgtagttttt

SEQ ID NO: 12819 - protein, 203 aa, DROSOPHILA
MNKITSAFIRVLRQSSSSGGTGNLLGRQLSYKSDLSLDKIYPGARLQIYTPPPPPSGSDKFSGFIPMDRLEITYSRSSGPGGQHVNTVNTKVDVRFKVAQADWIPEQTRQKLLKVLANRITKDGYFYIKSDLTRSQQMNLADALEKLRTIIRSQEAVAPAPPSEETLEKLRRRQERAVRERLQLKRGRAQVKADRQGPSGLDL

SEQ ID NO: 12820 - DNA, 3323 bp, DROSOPHILA
ccgcgatgggtccctccacacagatcaccttggagttctcgtcaaaacgcttggaggtcttgtcgaaaatagcattgaacacgctgtacttcttcgtcttgtacggatagggggcggccttgggcacccgtggtccacctcgcatcgtcttgccggagatgctgcatcgctgctggaaggcagcaggcagggcattcgtctgcgcctggagtagattgggcgactgtgtggcgcggctgacgagccgcaccagtcctacgcggaacacggcggtcattctgaagggaaaacaagggtcagtacaaaaacgaaacaagataataacaattatatctcgtccagtggcaatttgtcgtgtggttacatcacaggagctacgcaggtagtgcggtaatctctgccctagaactgcagatatgcggatcttttcgttgcattctgctggccagcattgcggcgctccatagatttacccaaattgtcggttttaatgctctatccggtggtatttactcacttttcaatctaaatatcggaagtctacccaaaaacaaatttcgggctatggttggtgttggaaaactccccgaatagggctgtcaaggtatccgttcaaatatcaaaaatgtaaaatcaaaatgtttgtctatgctttaactgcgacttttctcagaatcagaaagaatttcatatgaaatgaaatttaacccagtattttaaaaactttatataacacttacaaaataacattttaatgtataaatgtatttgttttactttttaaaaatatcgcaaagcgactgctcaacactacacagcacagctggggtgtttaactacaagttaatttacttgaaataaattcaacaatgcttttcatttgtagacagacacacaccataaactcacattgccgtgcggtgcgagttgattttttaaatttttaacttaacatattgtcacggtgcagaaacaactggtccactttccgttggtctggcagccctgaccacaacctcgctgcattttgggctcaaaagttctaacgatgaactaacgaaaatataaatcaaaatttaaggcgaaaggctccaggagaagatcgacaaatatcgagagttgtgaccattaggatcgagtaagtcctggcgttggggcccagcactgggagtgtaacccactccttacagttacgcaactgagaactaatgcgattttcctcgtgacacagattttgttattaaccaatccccagcagaaatgggcaatacagccatcacccgagtgcaaatggaggccacgaagagtgtgccggtggaccacgccaagtacatgagcggcagtggtgccccgccaccagaatgccccatgcatcagaagcatggagatgcaaaatcggcctccgccgtacccccacatcccaagatgcaggccgcttccgaatgtccggtgcagcacgacaacagcgacgttaatccgctgaatatgatgccaccggcaaaccaacagccggcggcagatcagccctttccactgcccaccgaccgccagacgtcgaccattcccaaagtcaccgaggatggcagcgttcaattctggcagtatcccagccaacagatgttctggaacgccatgctacgcaagggctggcgctggaagaccgaggacgtatcgcaaaaggacatgggcgacatcatacgcatccacaatgccaacaacgagcaggcctggcaggaggtacttaagtgggaggcgcttcacgccaaggaatgcggcaatccgcgcctcaagagtttcggtggcaaggccaaggacttcagtccgcgcgctcgattccgcagctggctggggtgagtatactccagacggaagatctcacctgaattaatgttcgaattgtcttacagatacgagctgccattcgataggcatgactggatagtcgatcgctgcggcaaggatgtgcgctacgtcatcgactactacgacggtggactggtggacaaagactaccgctttgccctgctggatgtgcgcccagccatggactccgtggacaacgtttgggacagaatgcgcgtagcttacatgcgctggaagtacgagctgtttgagaagtttggcagcgcggatggcggcaaagtgaccgctggtagcgactagatggaatgcatatttagatgatcgctataggtacaaaatcggcttaagttatcgaatggatggaagagggagtttggttaaatgcgtttaagacgctgcgaagcgaaacgatgttgagccctctctttaaataaatgttgaatcttgacttctgaacaccaaaattcgaatgtggttttgctttttattttattctttacttaaatccttttaaggatttcgaattatccagtaacgagttgatagcattgtggaggaatatattaattaaagtttttttttattgatatacttatgtatatgcagaattctcatctgttcaaaatgcctgtaaaaattttttttcttaatctttagttttatattttatttatatgctctttaaaatgattgcgaaattataaaaatacgtttactacttttttatcattactacaaatttaaaaaatgtatagtaaatagaatataactttagacgtttcttaacttttttaacatacattttctgataaaaagttgatatgcaacccataacattatatgtatgtttatatgtatgatgcttttctaacacctgcggcttcagggggttaatgtctggcagtgttgaaaagcgcgtgtaaattctttaactgattgctggtgccctcattacgtgagattcgagtttggccactggagcgttaattggatagccgcgatagattcgttcgacgtaaatcagtcataaatgcaagctgccagaatgaggttcgttcaatacctgcgaaaaggtgacttggccaagcgacttggtctactgtccgaggatcaaaagtcgctggtggaatttgccggcttggagggtgtgcccagcgatctaaagatcctgattgcccaggatcccaatctggaggaactggcgaagaaggccgaaaagcagccgcgactcgaggtgaatgatgatgtcactttgctgccgcctcttaccgatcccggcaagatcatctgcattggtaaagaatgaattaacatacatatgtataaacatatgtagttggaccctgaccttcaaaatgacgtattctcgatctgcttgcaggtctgaactaccaggaccactgcgatgagcagaacaagccgacccccaaggaaccattgttctttagcaagtttaacaa

SEQ ID NO: 12821 - DNA, 1173 bp, DROSOPHILA
cagccctgaccacaacctcgctgcattttgggctcaaaagttctaacgatgaactaacgaaaatataaatcaaaatttaaggcgaaaggctccaggagaagatcgacaaatatcgagagttgtgaccattaggatcgaattttgttattaaccaatccccagcagaaatgggcaatacagccatcacccgagtgcaaatggaggccacgaagagtgtgccggtggaccacgccaagtacatgagcggcagtggtgccccgccaccagaatgccccatgcatcagaagcatggagatgcaaaatcggcctccgccgtacccccacatcccaagatgcaggccgcttccgaatgtccggtgcagcacgacaacagcgacgttaatccgctgaatatgatgccaccggcaaaccaacagccggcggcagatcagccctttccactgcccaccgaccgccagacgtcgaccattcccaaagtcaccgaggatggcagcgttcaattctggcagtatcccagccaacagatgttctggaacgccatgctacgcaagggctggcgctggaagaccgaggacgtatcgcaaaaggacatgggcgacatcatacgcatccacaatgccaacaacgagcaggcctggcaggaggtacttaagtgggaggcgcttcacgccaaggaatgcggcaatccgcgcctcaagagtttcggtggcaaggccaaggacttcagtccgcgcgctcgattccgcagctggctgggatacgagctgccattcgataggcatgactggatagtcgatcgctgcggcaaggatgtgcgctacgtcatcgactactacgacggtggactggtggacaaagactaccgctttgccctgctggatgtgcgcccagccatggactccgtggacaacgtttgggacagaatgcgcgtagcttacatgcgctggaagtacgagctgtttgagaagtttggcagcgcggatggcggcaaagtgaccgctggtagcgactagatggaatgcatatttagatgatcgctataggtacaaaatcggcttaagttatcgaatggatggaagagggagtttggttaaatgcgtttaagacgctgcgaagcgaaacgatgttgagccctctctttaaataaatgttgaatcttgacttctgaacacc

SEQ ID NO: 12822 - protein, 281 aa, DROSOPHILA
MGNTAITRVQMEATKSVPVDHAKYMSGSGAPPPECPMHQKHGDAKSASAVPPHPKMQAASECPVQHDNSDVNPLNMMPPANQQPAADQPFPLPTDRQTSTIPKVTEDGSVQFWQYPSQQMFWNAMLRKGWRWKTEDVSQKDMGDIIRIHNANNEQAWQEVLKWEALHAKECGNPRLKSFGGKAKDFSPRARFRSWLGYELPFDRHDWIVDRCGKDVRYVIDYYDGGLVDKDYRFALLDVRPAMDSVDNVWDRMRVAYMRWKYELFEKFGSADGGKVTAGSD

SEQ ID NO: 12823 - DNA, 2908 bp, DROSOPHILA
ggtggccaacctgatgaactcctgcctgcagaaactactcatcgaaagggatcccgatggtgcagttgcctatgtgaaacaggtgatagccgatctcctctgcaatcgcatcgacatctcgcacttggtcataaccaaggagttggccaaaacggattacgcagccaaacaggcacacgttgagctggccgccaagatgaagaaaagagatcccggtacggcgcccaaactgggggatcgagttccctatgtgatctgtgcggcagccaaaaacacacccgcttaccagaaggccgaggatccgctgtatgtgctggaaaacagcgtgcccatcgatgccacttactacctggaacagcagctgtctaagccgctgctaaggatctttgaacctattttgggcgacaatgccgagtcaattttgttaaaaggagaacacacgcgcacacgaactgtggtaacatccaaagtgggtggacttgctggatttatgaccaagaaaacgtcgtgtttgggctgtaaatccctgatgcccaagggctacgaacaggcctgtctgtgtccacactgcgagccacgaatgagtgagctgtatcagaaggaggtgggtgcgaagagggaactggaggagaccttctctcgcctatggaccgagtgccagcgatgccaggaatccttgcacgaggaggtcatctgctccaacagagattgtcccatcttctacatgcgacagaaggttcgcatggatctggacaatcaggagaagcgggtgttgcgattcggcctggccgagtggtaaccattgcatgagtttaatgaattgtttaatcctataatttaataattatattactagaagttattacaaagtttctttcggttcgtggattttttgcgcaatctgcaatttgaaaaaagctgttgacgttccctagctggcgatgctttggacacacattttttacacagggatctgggggtctgaggactggctaagtatctacttgcgactctgcagggtgttggacagccagtccatggcctggtcgagtccctcgcccttggtggccgacgttttgaatatttgaaatgtgcggttctttaggttctccagtcctaacgcatgatggacctcggcgacggtcatgcatccgtccatgtcctgcttgttcgccaggacgaccagtatcgcgccggccagctcctcctcacgcagcatgtacagcagctcgtccttggagatgccaatgcggtcccggtccgccgagtccaccacatagatgattgcgtccgtgttgctgtagtagcaacgccaataaggtctataatggaaatagcacgaattgagattaggattaccattcttaaaggccaaatagatatatgtacgtagcctgcctaaagaaagaactattagctattttaagttaagttgtggatgcagatgtttcctatcttatcagctacaattataatggctttttggaaacccaaaaggcttactaaactacaaccgaaaatatgtcttctagatattaaataagacttgggtaatgccatcacaatactgctctcgtgtaaccaactcacctaatacttgtctgtccgcccaaatcccagacctggaacttgaggttcttgtaggtgacctgctccacgttgaagccgatggtgggtatcgtggtgaccacctcgcccacctgcagtctgtagaggatcgtggtcttgccggcgccgtccaggcccaggatcaagatgcgcatctcccgggagccgagcagtccgcgaaagtagctgagcaccccacctggaagaagaacgtatgatttttatgaccagacttcgtcaccgggtgtcgccggaacggggaggttccccacgtccatgctccgtgctgtacaaacccatgattacggctgaactttgtctagtgctggcgctgcctctaaatgcttaagtttagtaaacctagttaattgtatgtggtgctacaattaatacaaaatcgcagaagtcttgttttcacttttttttgggctggagaatggtttcgtttttgccattcgcaggtcacgcgaacatgacgtgtcacagcgtgcgttcagcacgaatatatttttgtaaaaaataacattttaataactttaaaaaaacgtttaatatcattaattaaatttaaataaataccattttaaggagtgcatacagattaattataaaaatattcacagtgacttgtgctgaacgcgcccacctttattgccggttcacagagttgccacccttgcgtgacttttgttatagagacggccgccattagagttttgccgtcgcgtcgcgttgtgaaaagagaagaaaaccttctgaaaacagtgctaataggtaatactttcggtgccaaatggagcaatccgattgcgttcttcgcgtgcgattagcgtgcagttgatttcggccgatttggcgtatctttagccgttattttgggtttgcaccgggctgcgcgaaaaagtgtgccaaaagaggcacacaaaacggtagctacgattacatatcgtggctatagcttctttaatgttggtaaatacagtgcattgacgtgtgttccatctgcagattaggctgcaccagttgctggatatcgctattggataaagtcaagaaaggagctgcaatatggcctcgccctctccggcgaacagtcccatgccaccgccacaggcgcccagtccgatggccccgccctcgcagagtcccgccccctcgccgcacagcccgtatccgcaccagcagccgggtccactgcaaggacctccgccacccggacatcccggtgcctacggacatcccatgcagcacggaccacccggccagggtccacccgggcatcatatgccaccgcaccacc

SEQ ID NO: 12824 - DNA, 568 bp, DROSOPHILA
atgggtttgtacagcacggagcatggacggtggggtgctcagctactttcgcggactgctcggctcccgggagatgcgcatcttgatcctgggcctggacggcgccggcaagaccacgatcctctacagactgcaggtgggcgaggtggtcaccacgatacccaccatcggcttcaacgtggagcaggtcacctacaagaacctcaagttccaggtctgggatttgggcggacagacaagtattagaccttattggcgttgctactacagcaacacggacgcaatcatctatgtggtggactcggcggaccgggaccgcattggcatctccaaggacgagctgctgtacatgctgcgtgaggaggagctggccggcgcgatactggtcgtcctggcgaacaagcaggacatggacggatgcatgaccgtcgccgaggtccatcatgcgttaggactggagaacctaaagaaccgcacatttcaaatattcaaaacgtcggccaccaagggcgagggactcgaccaggccatggactggctgtccaacaccctgcagagtcgcaagtag

SEQ ID NO: 12825 - protein, 181 aa, DROSOPHILA
MDGGVLSYFRGLLGSREMRILILGLDGAGKTTILYRLQVGEVVTTIPTIGFNVEQVTYKNLKFQVWDLGGQTSIRPYWRCYYSNTDAIIYVVDSADRDRIGISKDELLYMLREEELAGAILVVLANKQDMDGCMTVAEVHHALGLENLKNRTFQIFKTSATKGEGLDQAMDWLSNTLQSRK

SEQ ID NO: 12826 - DNA, 24935 bp, DROSOPHILA
tgtcccagtgttgcattttctttcttttttttttgcagtctgcctctgatttctcattattatttcgctttatgtggagcagctggcgacgatttctaagtgtgataaacttgcaagcgaatccccatggcgttttgccgttttccattccccagcggataaggaacaaagtggagcagctgggcagtactggggaatcaacgccagctccttattacattttaacaccagcccatacgtcttttattttttttcttttgcatgtgggtggcatctgcatgggtcgacaatgtattcatggcctgcgctgccatgataaacccatccacgctgcgtatgcgtaatatttcactttacatgcactttttagtgcaggccactgcttctgcactcccagtggcaaaatttatgcattgaatgcctcgatttatgagatgtcttaacgcttccaaatattgacccaatccagtgggcactgcgatgggggattaagatgaaagagggaatgtaaatataatcagattataagatctcttacttcaaaatcattgtttatgctcaagaaaagaatatagtttggatatatacatatttaaggcagcatgtttttctttggcttccttaaatgaaagtatcaaagcagtggaaaattaatttccacgaccattatccaatatcattcgttggccgcaagctgttgccaattgctttggcaattttgttagacaccaaatacacacacatttttttcttaccaaatgcactttttgtttgcagagtgaaattggaacactggccgaaacccgttaatctccgatgaggcgacacattcgggtgaaggaaaattcataaatgaaagcttctaattgccggagaatgacaaacgcgacaagaaatcatcgcgagcgaacaaaagcgaagccaactttttaggcaccccgacggcagcagtagcgaaagccacgaaaattgagccaccgaagcttcggcgatgctgttgatgcccacatcctgtgggccgggtccacccaacgaccacggccccatgtccttgcccacttcctccccctcctgctccaaacgcgcccgcatacccacgcgagcggcagatgatgatgagccgttgcggcggtcagggaccctaacccaaaggcaaagttcggggtcgggcattccccaatggctgctaatcctcatcggactcctcgccattctcgcccagacaccaggcagccaggtggccgccgagaagagtaaacactgtgagtacaccgttttcaaatatttatgagacaatagatttatggtttcttaattgctaacctgttttgaaaaatatgcacaggatatttgatatgagatagtccaaaaattaagctttcaaaacaacttcattatataatttttccacaaagtagatacaaaattgtaacactctttatctctctaacttgttaaatggtttatcttgtactatttcttaagctatcatatattaatatccttaacaagttccaagtgttttccatgttttcttttttgtttatcaccaatatgtcctattcaaatacaaaaaaatatatatcctggcattggcatttccgaactttatgagagcatatgtacaaagagaacattatccaccgtccataaactttgctcgtcttgtacaatgaaatctgtgaacagcttagttttatgtttttgtgcgatttcctttgctcgacaataaaaatttgtttgagcaaatgtaataaaagtgcatttaaatgttgccgaacggaagaaaaaatccgaaaagaaatgtaaatcctcgaactataaacatataaaaaccacgcactcacgcaaatgtatataaattcatatatgtgggggtgcgataacattgtgtggcacggctattgtggtaattcattcactttccgcatatattgtttatgcggcaaataaacagaaaataaatacacatttttacgatgcaatgtcaacgtgaaacactgaagtgtttacatgtgtacaaaagcacgtgcgaaggcacatacatatttgggccaatcgtttttatgtgcatcttgaattgtataaagaatttttgcttggtaaaatttgatctgcaactaaattagaaattgagaaattacacagatacaaatagctacttcttagatttcaaaccaacacaagttgtttgcgtcattagctattctatttctatttccatcaaacataatgagctgaaagttataaaatattgtccgtctcgtcaggaaagtaatttgtgcctaacaagcctggctacggtgtatatatggtttccccgatacggctaaacagagaatggtgaccgcgattgccgacccatgaaatggaattactcgggcgaagcgactccatgtgcctcttacctcctacgccagtttgcgttgcggcgactaacgttgttggctcaaattatttccgtattttagcattaaataataattaaaatttgaagtaaaacaacttacatgccagcaattgggggcgccgcctccatctttttgcgctacgcggagtcgcagtcgtagttgctgcaaaagtttgccagtcgagggcgctgaaaaagttcgttgcatacttatttgggcccgtttccggtttgctgctgacgcggctgctgccacttgcacagcatttccccgcactttcccctacgcgattgcaacgcagcctaattgcagccttcgcaggaatatatagggtgacaagtgtcgatgctaactagcatttgcttgtctgcacattcaacaaactctagcttggggatcataatcatggacgaggtagaaatatatagtatttacttaaaatgctagaaagattactttatttttaaaaagaagcttagaaaggaatgcaagcctagaatattttatttaataacctgtttagtggccccatcaaactttacaccgcgtgccactgtgcaacgctcctagttcgtttttcctgctcatttccgggcgacgcttagctgcactcgctgttgcttcagttcctgctcctcgtcctgcttcttgtttccctccagatcctgcgcctgctgctccttatttgctgtggtcacacaccccgactccaagtgaaactcaaacgcagacacaaacgcgaaccgcaagtgccgcctcccacaggcatcccttcgctgtccccagcagacttgtggcccacgtggcgtgtacttaatttcccatgctcatcgccgttaacttttttaccggccacatacttactgcctgattccctcgctccctccagctggctgccaactccttttagccccctacttattacgctgtcgagcagcagcattgaagacttttcaactcgttcaacaaaattttgcacaaaagtttcataattaatttcatgttaagtggcaatgcgagtggtgggcgtggctatgccctgccagcccatatttccatttagccccattctactactgctggattttagcatctttccattctcgcccaaaatacaaaaaaataaagcatcctggtctggtgtctttaatttgaattgtcatttcctttcttcggctctcgaagcagccactttggtgtcgtctgccaggcatccggttggtggccacgcccagctactcccacatccttcagcctcccccttatccccacgtccaccctttctcccccttaacttaccactgaatgcggtcgcacgttcaacttgattagcgtaacttataatgagtcgcacgggcaggatagtcagttgggggacaaacttgtttggctctcactcaaattccattctggcaaaacacttgcaaacgcttactttcgcaagtaaatgtgtactcaggcatatagatatttgcctacacacatatatacatatagataaatgtgtataaaggatgtttttttttttgcaggggggttttcacaggcatttccaagtggtttgcataattacattgtgtgagctcttcatggtgtatctaccaaaaactttgcaactgtcaacgaaccggaactctggcctccatttgcaattatgtgcgtaatatttgcacgtaattatatcaccatatatgtagttacaagtatatcacttttgataattggattgctctcaatttagtcaaattgggcatgcgttcattgatcgggcttgatgcgtaggaaaatcatagtgttctgctatttaatacattttgtgagcactttaattaaattcatttactaattggttagctgaaataaacttattcaagctcatttctatacaaatattgtaaatgttgttaaataatagcatggtttataaaacaaaatgtctggttgtactccaccaagaattttcttttctttaatgttaaaaatggctgaaatacgtatagattttgacaagggatactgtcatgcgtttttgttcatcatgccgaatccctcatcatttctcgtatccaattgtgcgattcttgcaataatgcgaacattatacaattttgaaaatatgtcacgttgcccgtgatccaatcccagctccacaaaatgttcccccgaatccaactcaaacagtagctgatggccaactgccaataaatttgtgagaaaaacaactgtcgacggcgagcaggacgaagaagtggcataaaacttttgctctttgtgtggcataaatatgaatgaacggatttggacttgaggcttgggagcaggagctttctaatgggagtgggaatggcagtgggaccaactggtccactgcggcatgaacgctccaacccgtcgcctacatacaaatattccaaaatgagtttcgaccgagaagaaggagtccaatgcggtcttcccacgtcggtgcttgaattcacaaaggcaaaagggctaagggatatgggggggcggttgaggggataaaaggggcaaggagcaaggactttccatgggcaataaattttaattttccccaaatccttgcgcatacgaaatgagatttgtaacaagccgcagcaatcatctggcggcgctttcctttcactgtctaaaaaacttccctaagtgaggaaatgattgtctggcagatcttgattaattgtgagtggcattatttgacttaaacgtcctaaatgcttaaccccctttatgccagatttaaaatctacggacttactttaatagctaaaaaaaaagctagcatcttgcttaaagcgctgtactattgatattgaataacttactttagatttgaaaaatggcattattatgtgccacctttgaccagcttgttttccatccgcagcttcactaataataataataaatcttggccgagtggcgatgactcagctgttcagcgatccttggagaaatgggacaggtcacagtcaaatgcgcagataaatgtttatggaagataaattgcagccagcggatagaaatcaggcaacgcataataaattccatttgttgtagttcgcaactgggagcgaaattttcgaatgtcgaagtttgcgagggagcgatgccaaatcgagtattgatgcgttggcatcccgcggcatggtgtcattgccaaaaaggcccaatcccctcccgatttcattttccaattggagcattgaaacattggagcaatctggagcattggagcattttagcaccgaacccccaaaaatagcgaacaatgaattcgttcgctgcgaattggttttgtgaaattatccacgaacgtgggcggatcatttatcaatatttccgctctgctgctggaatcggtagtaggtaatcgcttattatgcgaaatcggtcgataaatgcaatacatacatatatgcatactagtatgtacatatgtgccagtcagtgagtgcggactcgtgttccaccaaaccgatttccaaatttaatttatgtattactaccaaaaaaaaaaaatacaaaaaataagggtagcgcaatacacattctgtcaattgcgggaattgggtttgacaaattgaatttggggaattggcaaacttttgaccctattttaattggctttaaaaggcttactttttgtcaaccaatcagtgtttatttgcttctttcatgttggggcaaataaactctaaatgatttcaaagttataaatgcggaagaaatgttttattaaattgtattatttttaaggaatttattacagaaaaattttgtatgcttgagcaaatttcgcattgcaatggcttacaagattttgattacagaaaatctgatcaaccagtttcgccttctaatttggaaaccttaaagccccatccacaatccttgagtgctgcattgatggattccgaatcctgccggagcgaagaacgaggaaaagtgtatgaaacgggcaacaaaggggcataaaatgaatcccttttgtaatcaaatgcacagaaaattgtattctattcaagcaaaaaccactacgagtcccaaacctctttcgtgtcgtcatcatgggcattgtatcgtcggtagtttctcggccagggataaacttatatatatatatgtatatataaatatatatgtgtctgagtgtatatatatacatatctgtgtcctgtgtcctgtatccttagccaagttagtgtgcgcgtgatccacttaggcgttgcacggcgaatccacgggccgcccaaaaaacaaagcggcgaaattatcttccgtagccaagattccggtgggcggtggtgagcggtgggcgtggccggtggctgaaggaaaaatattacaagaagcgcctagacaatagcaccgaactaagtaaacaacaataataaaaaacaagaaaaaattaaatgaaatagaataaaataataaaaaaaaataatagagaaaagacgcagcaccaacaatggcgtaataaactaacggtagggctaagctcgctgggaaaactatgcaaaaacttttcgctttgtttcgcagcagcagcaaaaatggaattaataagaggaaaaatgattttcgttaaatatatatgtatgtatatgtttaagcctccgcctcgtaggccagttaagaccagccaaagtccggcccacaagggcagtgcgaaatttaattaagaattttgcgagtgggctaaaataaacaaacaaagggcccgcaggcgtttttcaccgtacatccatccggatatccggaggggctcatctgggcttaccttctcgttccggaaatgatctgctctgcggtagattgagcagcccttcgatggctgcataacaagttgatagctccttgacaagttcttaatgaaaagttgaaaagcgcgcataattaaactgctttttgccagcgcaactggcaaagtttactcaatcagaaaaaaacttaggcaatcctggtgaaaaatgggcaaaaatgatcgattgactgcaaagatagttttgttccaagaaatggattcttttctatcagaaataaatggacatcattgggaaatgttctttttgaaaatgaaattaaatttttcaatttttttcttattaatttcaataaatatttatgtattaagctttaataacaaaagtagatcattaaagtcatgatataagcaaaaagtttttgttcgcgattgaatctttgaagtagcaaaactaaatgtttaacgagagtcatttgccaaaacttttcagttttaccatcgattttaataaaatttcacttcaaaagtcagagctatcggagctgaactgtgccgcaggacaaaagagaaaaaaaaagaaggtgaaatataaattccgaaacttttgactattcaaacattttgacaagcgacaattcgcttgattattgcaatgggaatggaaggaaaaggacgagcgacaggcagacttgggtgaatcttatcgtctggcccatttggggcatgtcctttttgccagctcgtgttggtggatggtccgcccccatcggttgctccatagttccttcattagtttggcacttcatcttggctgcacgctcgagtgcctctggtctgaggttgccacattctgagaagtgacaaaagtttaatgatgcgtttaagttgcacgtggcatgccccttggcatccaccgcgtgcccccgatttgatgagctgtacgcattgcaatgtttgtttttcccaccgggagcaggagaattggaaatattgcagctgtcagcttgaaattgatttccatcaccagctatccagacaaatgatggtgtagataatggggcacttcacatggggtattccatagcacaaagacccaattttccacatccacattccacattgtgggcataaacatgttgtgaattttttttagaatacatgaatcatctaacaacgattatataatattaaaaccatattataataaaacttgctcttatgcctgactaatgtcttccaccttggagtcctccaactgcttgaattgaatgagaatcaccagataggtagtaacagccgagaagatcttgaagagtgttgagttgtctatggaaaagaatccgtaggcggtgaactgaagatcctgtttgatgctcttcgttaggaacttgtcgatgaggttctggaactgcttgctcttgccgtaaattctcgccaggatctgtgccgtgccattcacctcggatgccaggccgtcacatgcgctgcaaatcacaatcattgtgatagtttcagccaaaacccagatacatgatagtcctatggtatcagccacttctgttttggaactcaacgagccggctgtcaatgtggcaaaggccaagtaactctgatttgtgaccgtgtagaaggagaagccaaagtagaatagcaatgaaactccggccacgcagttaatattctcggtgatgtagcggaatttgcaaaggacctctatgaggttgctcaactcacgccagttttccatgtggccacaatcctgaagattaaacgtatccagtttctggttaagaaatccaattctctgtgccaaattcatcatgagtgtccttagatataaggccaggagagtggagtacagcagttggaggaagtagatcagaagcaggatgatttgccttttggcaccaatgccacttcgatagtgaatatagtagaaggccacagcgaggacaccgcctgctgcagaggtgaccagaatggtcagattgcgacaactgtaggtttcccggaatccattggccagcagatactcatcgattttggcaatatcgtgaagagtgcgaaagtgtctggatgcattctgcacactcgataataccaccatggtatagctgatgatacacagaagcgtctcgatggtcctgttgatctcctcggtatcaccttgggcactggccaccaatctgtactccttggaggcgaagagcacatcttcccccaatgtcagtgatccgattagtataatcagggccaccagtcgtccgtaccagcgacccaatcctccaaagcgaaagccatcatcgacgtctccactatagaatggtaatatagcaaagatctgcgagggcttggatataggatatatatcctggtagatcttcatatcgatatggtgcgctttgtggcactaactaaaatgaaacaatttggtgactccagtcattaactgagtagcaggcttactgtattagtacctttaattagctgtcataaacagcaaataggcgtaataatatgatactattaatagtatgaagcaaatatattacaagcaaaatttcgtatttaggtgttaatttcttgaattctaaatggctgaaaaatcatcattatcgtattaagttagtctgcgtccaatttatttgatcaaattcatgactgatgagtgggcaaagtagttcgcgtatcattgggtaattacgagctaatgcgacatgtcataattgccgactgacataaatatccgcgaaacttaaaagcgctgtccaatgcgccacttaaatagcccaattactttgacaaaccaccggcggcggacgcagctcaatgggccacgtgaatggtttgacggacacgggcattccgggcggcccaaggctaaacgacaggatgcagggatactgaatggggattatgctcattatgcaaacgccttcgacggataagctggatggacgaagtcggccaggcgaaaggcatttacttcaattatttcattaaagcagcaacagcagcgacaaaagaccagaggcgtcatctgggaatccttgtggcgcaggccatcgccatggcctccaagatgccatcgatggtggcgctaatggagcgtgtgagtccggcaccagatgtcgatgccagtagctacagcttagtcaagtggatagagcgtaggttgtgccacaatgcactggcaacaatttcctagaaccatgcttaattggaaattttgctgaaaataaaagggattgatatttttgaaattgaagcccatctatctaaacttgtattccatgtgatgaatctcttcttttttttttgatttcataccaatttttccaagagccaccgtgtatagttgtgagggcaatgactttacacgaacatcgagggtcattcgagggccagtaaaattcaatataggagcacaggaaattcattgtttaacctttgttgcttaaattgctcaaattcctgccattagtttgacaaacgagccagcgaaattattttgttgcagccaagttgccggggcacatccggagtaaaagaggcggctggctgcctggtgggcgggtatgatcgaaaaccgaacagatttcgggccaaagtttttgccacaactctgcatcgagcagagcagcaaaaccaactttgacccccgaaaaccaccttcctcaaacccatcactaccatctccaccatgtaacccacccacgaaactttcgtccaatcctcgctttggggcacgcactaagcttgccccggttgcggttactttacctccagccatccattgttgctactgctccttgtggccaccaccatccagcaaccaaaatccaacgtttacggtgggcatccactcgtttattccattgctgcagatttatttgtggttttgcataatcactgaaaattagtttaaaatatttacattaaatttgcatcacgatgtctgggaattttgagctgccggaaatgctaagtataagcccttaaatgggcattaccatgctgaccgggtgcaaggaaaatttttgagcagaaggctaattaagtagaccccttgatgaactataataaataaaagccccaaagctatttattacagtatgtatctacgagatttggatctgtgtgaatactggggcgaatacataatattaagtatacgtcatgttgcttgcgcttgtctagatgtttttttacatagattaagtaatgaactgaatatattatatggtaccaaaagtatagctgaagaacttttcaaattcgttgaagtgagaacttcgaaaaagttaaaactgatttaaccactttattgaactagcaactaaaacatgaagagtcaataaatattgaagttctactcatatattttgtttttccaaccgaacttttcccgagtcagcgaaatatttgcgaaagcatcttcgaaactttctctaatcacagtttggcacaaagttaactacatcaaataaacttatcgtctgtagtttgcaatacacctgctagcgtatttgcaatgctcagtgattatccttgggaatatccattgggaaatgtgttagctgaaactctcttgtttactcgtgtcaacgaatataataattcttcgccttcaaagcacctagcttctatattctatatttgtcgatactcttaaggtgtcctcattgggcgatgactcgtattcgaggagaaaacggcactgagctacacgcaaagaaatttgagtgtgcttcgttttcaacttctacagtacagcgtgaataagacttcccagttttgctaactgttcaactggggattgctttatttgcgaaggtcggttcatgcgtgtgactgtgctccaaggaaacgggaggagcacaaagttagaagacagagtaaacatcattttccagccagagtcaacgaagacatctagtgtccagggaggcgaatggcgaaagaaatgcacgaggggttcgggccaaaacgcatttaggaccaccaaaacacttccggcatccctttcgccatcgtcgaccggaagcattaagctgcggaatggcttctccgccagcaagggccatttccaatgcgattccgagtgccgcgagttatggtgacgacgcgcaacttggacgtttgcagattgtttgcgaattgccactggcaattggaggatttaagccatcgcgataactttcaaaagagctgcaaggaaaggtttctcgattggcaacattaaacgactcgcgtctcctggaaaacagatccaatggcattattagtcgattaataacgcgggcgacaaagctgtcaaattaattataccaattttaattccttttgacagtggctcagtcatagcaaatgacatttcgaccgggtaatctcggccattaactgaaaaattggctttcactggcagatgaggctcagtcagttttggatttgatattttcatgaacacgccgtccagattgaacagtttttttttcttctttgcgagccatctcccttttgatgtgggacgctctcaggatttaagccgggccttatccctaatttcaagcaggccattttcctgtgttttttggctgcccagccatcaaaactaatccctgccccccagtcggagatcccataccagatccgagtggttatgcccgctctgtgccttgtcgttatctgttttctgctgctacccatttattttttgctgcttttccctgcgaatgcataaacaaattgaagataaacatacttatgtgtgtatatctatatgaatggacactgacaaaaaaatattaaatttattaatggaattttaatacgtaagcttttgtggttatattgaaattcagtgcatttaaaaaaccagaaatattgtgaaatctattaggcagaaagttagctataactaatatattgctaccgctacttggtaccaatttgttctgagtgcatgcactttggctcatggacgagccgaacttgaagcatgttgcaatttcagccagcagatccgcgattccgcctcctcggcaaatggaattgttttccctgaagctgccagcatttgtgtcagaaatgccttaatttatagaaaatgtatctgctggatgggaaacgacttcatctccatcccgtggctgccatgaatgtcacatgggtttcaacgtcctgcgcggctttcgtttgtctttcacttcacacagaaagcccgacagcccgaaggcagccacgatttgctcttgtccttcgcccaactcccccagcaactcccacttccacttccacatccactgtatgttgccgccctccacatctatctcggtatatctcccatccccggggggatcagcgcagatgcatgataatcccgatacgtacatggcggcgggggtaaacacagccaactcgacgccactccacttcactctgcagcactcctcgcaatcctgtccagaaatgattgagggatttctggccgcctaggagccaatgataacggaagcggcaaccgagcactttgcgctccattttcactccacacaacgtaattgatattttacaattgtctctgccggttcatttccttgtgcttttgtcccttgttccctcgatccccgaccccacatatcttaatggcaaattgtgcagaaattctatttctatttcccactcaaacctccatcgccctcgagctgccatatgggatgcagatatagatacgaatgcggatacagatacagatgcagatacagatgcacatggatctcggtgctggcccatttgtcgctgtcgatgttccactcccagctgagtgaaattattcaagcagcagcagctggaagtgaatttatcaggacgaagaagtaactccaatggcataacttctgatatatatattcagagatttctcgacaaagtcgtataatttttcaaaactatctgacatgtttttaactacggggatgctatgcggtattaagtaatctattgttatgctaaaattaatctcaaatttctttcaaatacaatttttgtatataactgaaatagactcttatgtatatagatcaaattttagttggtcaatagtattccataccttaatattccttaaataaaatcatataaaacacctaacatttttatttctattgcacacagtttgttcttaaagtaattagttttatttatttaaatcgtaatgaaaaagccattagccagccctaaaacaaactgaccgttatgttacggccatatttcgttcgtatcatgattgttaaccattacttaacgctaatctgttaatccctcgttagggccatgacttgtgagttattttctctgccttgtttattcactagaatgttgaatgttgagcaaagtacagagcacaagcggaatagctaccgccaaaaatttccactaccgaaaaggccacggaaaattacttaccaagtggcttgcggccaatttgtgcaggtggcaaaggaggtggtgggcggaaacacgccacgccccgccctcttgccaccacccactttacgcccagttcagctctttggtacactcggctatttactttgccggagatcaaagcgaaatgtgtaacgaaattgccaattacatataaagccaaagaaactgtctacctagtcagagagttaggatccgttttatttggcagagatgcacagtaagaaattcaaagttatataagttgcataaaatattttcagtttaagtagggcatggttaaattatatcattaaagttaattaaattaagtttacaaagcagtgtgcgccaaaaagtatgctacatatttttatagagtaagcgtttggcagtcctttgtagtttcgctctgtgtagaaacggaatagggactaaaacaaaggccagccaagtctgtcagcaattcaatccaaattgtgaattcaattttgaagttggcaacgcgacgaggacaacatttgtgaccgaaaatgaggcattcacagggtggagcagccaggaccagccaggagctcacatgatggctccttttttgccccatcatcatccgcctcctgcaacggagggcgtaaaatgaatttgtagtaaattccttgggcgtgctcctgctccagctcctactgctacgccacatctctcccagctggccaggatgcggcgtcatcttttcgtgtgcgttttattgggaccgaaattgaattagtgtggcggcgggagcggaagcggttgctaggcaggaaattgcctgaaatcaggcgcacgtaagcttggggggtgccccacttatacttagtcccaaacctacctacccccccttgctccacacacacagtaacattattgtgtttcattaaaaatccggccgatgtcctgcgttggttttatggcatagtatgttggatgcgggggttcgctggttcatttgcatgccacgatgtccagagtagagcagctcctccaaatggctctcgtttcatgttaatgcatttggcacttaagcgccatagtttgcgccatcaaactaattaaaagttgcttaaataatgcgatattattttcgcattgccgcctgcctgcagctggcttcgactttctagcgccctcctcgggtcgttgaggtcgttttgattgagccgcggcaaattaaaagttcagcagcgaaaactgtcccccttggaccgttcaaacttatcactaaaagtgggaaaaagttcctatcataagatagttatatctctggcaggccaaaagtgggatgggaaaaaaacattggaacttttccttttctaaagtcatttcattagtttatagcttcgaactaactttatatgtgccaattaaacactgttttgctatccttatttcgttgatttataaatgggtttcttcttcatcttctttgagtgatgattgatgaaaaaatgataattcagctaacatctaaaagatatttacacttctttttcgagtttcctttacgagtacattaggtattaacgtgtgcattgaattcctgatcaggcattatgcaaatccaccgcatccagttgccaaactgcagtcgactgcagtctgggagggcataataaacgcaactggtgagctcggaaacatgtgcaagtaatacgcgtagcgaagcgtaaatgaatttttcatccttccattaaaatttaagtgcacattttccggcgcagcgcacgagacgcctcagcgccattaagccaaaggaagttgccaacggagagacgtcctgcagatttctgtggcaagtgctggggtttcgttcagccggagcagtcgagtttatactttatgtgggttatgaaattatttaaaaaaaaatatatatttaacaaagcttggggaacatgtaaatgagaagaacaatgttcagaggtcacatttcaaattaaaaaaaaaaaaaacatgaaattaaacaaatgaagtggaatgttttgagataaatattataggtgactattatgagtaatccatatggagtgtttttatatatgtttagctttgagctcttgctaaataggattcccttactgaaaaaatccttactaatattttaatagttttatgataattcgagatactaagattaatgcttttccgttccttgcagattacatgcagtcgctgtgcaagaaccacttcctccagcagctgtaccgaaagatcgatggagcggtgctctggtcacagaacgagcggaatctggactgcattatcaccttccagacgcactcggtgctgcagcgcttcatgctccgcttcgacatgctgcagttggactgcaacgatcacctgctggtttacgatggcgcccacgccgtcgccacgcccaaggtgagtccatggatttcagggacttcaattccttcttttttggtgtggtaattatgccaacattggcatctgcctttggagaatgtgaaaaactcgcctgtggttgcgatacgtgccccacatttttattagcgaaattgcgcatttgcatatgcaaatcgaaaaagcaaagtgaatctgttcggcggcattttacacccatggctttctaggcaagtagatttaaggaaaatttcaataatcaaagatgttaggggaagtttatgagaatgcattcatttatttaaggaatttacaaagctggtttcattaaatttaattgcgaaatgctggtgtgttcatactacgctttaaataagagataagctttacggatttcttagaccaacattattatcaatctattactatagatctatattatcaaattcaacgatagtacagttggatataccaaggtattgcagtcaaacataatcttaactatccttgaattgcattatggattaaagagagtctttatagtttgtccacacaattctcgctgagaactatttaaagttctttttttctcagtgtaccgatgcaccatcatcatattgattcgcctggaaatggctaatcacatgagtgagtcacccaacgccgtgtgaacaattaaattgcggcaggaacgcagtcggagtttgccacttgtgccttctatgtacatacatgtgtatcgaattcctggttggtggattctcgaggatggggtatctgcgcgcagctgtaattatgtgcatatgcaggggggggggaaggattggatggatacgaggagatgtgtggatgtgggcttagtgctacagtagattgaattattaggaactgaactgtgaaacaggcaattcaaatttgaatcactcatggcagaaggcagaacgatatgtatgcaaatgcggatatatgctaagtgaattaagtgatgttgcttctccattttcgaaatcaaataaaagtcattgattctcctgcagcatagtgtgcaaatcacatttcgcccccatctatctcactttgtgtcaataaaaatgaacaccagcccacagaaatataaatatttatttatagatttttgattcgtttgtttaaacatcggaaacaccgatgtgtttacatggagcgggtaatgtatatttaatttgtcccagatgggaaaagataccatccaggccatcagcacgcatattcatatatttgcatacctacctactttcattatggaatcatttgctagcgtgtaggtgtgtgtataaaaacatgaatagcctaatatacatgcactgcgctaaaaaaaagttgttgcccaaatgtgcagaaaaaactcattttcatattctgcattttagcataacatatttgttcgtttaatacaacatgtaaaaagtttacagcttcaatcacatccatgtattcattgtttaaagacataatctttcaattccttgctgagttttagtcaacttacatctctgttttggtaatatcttgtcaaagttgcgtggaattggccagggagaacccagaacccattgatgcattcccctatcgattacatgccacatccctggagctgcatcccggctaagcaacgtttaaggaatccaatgtcgccgcacatccttacgtatatgcaaatatgcgctggcatcacatgtcgatagttaaggccaatcattgcttagtttgcgacactcgaaggcggtttgggtgggttgggtggttttttgggttgatggtttgccagctatacgaattcagtgcaatttgttggccgtagaggggggggggggtattgagggagggaaggagggaggtagcaggcggagatctgggggcgtggcagccgcagccaccgcattatccagatcacgttgatgcctctgacattttaggttcaatccctgtggggcttccgctcagccaacatgggatgctccacatacccggacacacatgcaggcataattttgtcgctgcaacatttgcaatgatgacagccagcaaggatgttggaaaagtgggtggttgggcggatgggtggctgagtttggctgccactgcggctgcaatgcggcaacagcttctctggtggcgctgcttcttctgctgatagctctgtgattttatcagcaacaatttccatttttcattcgccaccaccccctcattccacccactcactgcattatttaatgcggtctacgggggggaggtgggggtggtgttgggttgggtgcaatggaaaatgcactgctgttggcttgtgtgcaatgtgagccaaggaaagtggccacaaatagagcgcgcataagccaaatcctttatttgccaaaggaagctgcgacagtggcactaaaaaatatgcataaaaaatgttcaactagaaaattagaaaaatgccagccaaggcagcgccacgccccccgccagcaaactcccccgcccccctccgctttcactctctatctctatctggattttttctctggggaaaaccttgaaagtgcatgtgccaaagctaaaaacaaaaatgtttcagccgctttctgtcgcctgtgtggcgcgcgacccaatttcccatctggctggtggttctagtggtggttcttgtcgatctagggctagttgtccggacttcggagccagtgacactgggccactgccaaagcgctgtcatcttccagggaaaagattgagtgcaaccaacacttcggctgctcaaattggggggtaaaaactatgttatttgagggatttttcaaagcacaaagacatatcttaaatacctaaagggagcccaaaattattgttccgaatgaatgaaaccacaacctaaaacattggagaacctaaagacgaagcactttaaagaaatacacattgagtatacgccgtgttagcaacagtgatttgattaagaatattacgtatacgcacagttgcctatttcaattcagtaatctatcgaacatagccaatactaaaaaacttcttaataaatatttcgcaatgcgtgtaatttggactccatctaaatccaaagcagcacattaaaaatatggtaaaacttccgaaataaaatttaggttataacccgtaacaaaagctaaagctgagaagcaagtcgaaattgcaacccaaacgaggtcgtaaagaaaagtaattctgttggtttttgcatccacaaaataatagccatcttcgaacattattaagcatcactcgaaaaagccacatcaatatcgatggcaacaaaaattaaccttaattatgagggctcagtgctcgagatgccgtgttcatgtgacagttattatccatggaggaggacagtgatttccagcaggttctctccactgaaagggaacccatcgtaaataagttagcaggcgaatggaaggccataaaagcgaaagtatcgtaaaatcgttctgccaaatcagcgacgccgatggaaaaggaccacaacaaggacaacaagcgagctcaacaggcgccatcactcaatgggccagaaacgaggatgggaatgggaacagcggattggaactgtggagtgggaatgggaatgggaatgggaatggacagggccacaaccttaaatcaaacaaggtcagcacgcacgtacgccttcgtggccaaaagaacgaaaatggatgaggcactgaatcaccggaatcgcctcattcggccattagatggatgcagtgccgcctgtcaaattaagacactcagcgatattaatttgaggccaaatacgactgcaataaatatatttaacgcattatgttcagtaataaaatgaatttaatataatttatttaaaccagctaactaagcaaaaatacatttacagtccatcgggtacctattaatttaaaaaagttcttcaactatgttaaagttatagttctaaaacttgacaaccagagacttcttcgttcatttccttcagcatcatatttttaataagcctgcaaggatcctttcacctgttcagttggcatctaaatggttgcgataagtacctcagcggatacatatatttgtcgagtgacttgttttgcagtccctctgtgcatatttgaagattcagaagttgggaatcagacgtcttgcggtatttgccacctaagcagctttgtaagttgtccgcccttttggatgggaggggggctaggatcagagcagccgagtaggagtgtcggccaggatttatgaattcgacttgagttgggaccactttacaccacttgctggcacttcgtggggcaatggcaaagtggcaaaagtatgtaaattcgctacacgctggccacagcaaaggccaaaagatcgggaagggaaacgaatacaattttacgaatatgtaaatagtttttgacaaaagaagttgtcactgcatcaagttgggcggtggccgcaaaaatccaaaattaaaattttccagcagacacacacacacaaaaagagccaagcaaaagttcgcattttcggggctgcaacaaaattaaaatatgccacaaagcgcggcacgtcgaagatgcaacagcacacatgatggaggggaacatggcgagcaaggaccaagaccatgctgctgtgtcaagaaaggcagccacagcaaagcctacaaatgtcgggggaggagatgttggcaggacgttgatgaacccccagtggaactttcatgagccaaagccaacaacattacaaatttacacagctgcgggcgggaggtgggcaaaggcgaagtggtcggagtgggcaggaggtcctggtgatgaaccaggcgacgtgacgcatacacgtgccaagcggtggggcagcgcaggggggggagggggtggtggtgtgtggcaaggacctcaaaggaggcggagacatcatcatcattttgcactttgcggcagtggcagggtgccctgagcctgggaatgaggatgccgataacgtgaccaaccagcagacgacagtggaaaaagtttgccaagctctgcaatttaattgcggaatcaaattaaatgccttttgtggctcatcaatgaggcaatgcaatgtcctgagtgtgcgaaaagtttgcgaatatttcgctggaaaaaattttatttctttcacttgaataataacatcgttcaatgcacaaaattgctgtcataatgtggaagctcaacttatggttgtattatattatattacggacacataatatctgaaataatatatcttggctgtgtgctgattgaaagtaatcttcatcgtgtttgcggcgtgcaaattcctgggtgtaaattggtcttaatttccattatgccacgcagactgttgcacacttgcatgcgggcccaaaaggccaggtgtcgtgggagcggaatgtgatgccactcgagtgcacctttccgcccacctgcagcactcccccctctcattgttccgaatgcagtgctctgtgcaggtacatctgcggatgggaaattaaccacagaatcagagcacatcaatacgtggcccgcagtttaagcgggtttgctgctctgaatcatgctactgctcctgctgcctggatcccaattcacagatggcttctgaatgctcattcactgggaaaaatgatgctctagttttccttgctttgcatttattacatgttttttttttagctttaaccttgatatatgtacatacatatgtatttcttccatgccaaattgcaagctataaataaatcataggcaaattccacgtttttgcatagtatgtgaaataatgctcgttagcgtaattgattgattagacagcaaatactaatttgtggatactctggcttgcagattgacatctcctgtcggaacacaaagaacaccgtcaacgcgctcctgacgcgcacgaactttgtgacactgaagtacgtgaccgatggctggggaacggatgcgaacggcttcaagctggtgattacgtcggtgaaggatcccagtaagtgctggcggaggacgagtcctccattgtggttaccattaccatacccatacccatttccatttccctacagagcacacctgcaaggacttcacctgcgccacccgcgagttctgcatccatcccgatctcctctgcgatggcatcaaccactgcggcgacaactccgacgaatccgtgcagaatctgtgccagagtgagtatactgttatcttcaatcaattccaaacaaattgtaattattaaatgctttttgtttccttctaattttcagatgagacgagcagcacggtttttggcctggacatgacctggttcgtcctcattgtcgtcggtgtgctgctcgtcctgagcgcgctcatcgtggcagtggccatttgtgtgtgccggcgacaggatgagaatgccgccaaccagaacaccgcgctccaaggtaggtcctgatatattggactattttccgcttatgtatatatgacgtttttgattgtctttcagtgcaccatacggccgacacgaacgggtcgtcgaaacatctgcactaccacggcatcagtgtcggcgggacactgacgcgggagcacacccaactgccgacgtcgggaaactggcatcaccctgcgggaccatccgggtaccaccgcactccacacaactacttgaagatggccaccaaagtccgtcccatttggtgcttggcaaattccgtcaattaggtcaagatctttcccacaataccgccgggctcagccagacgaacatcgccggaaccggacatcccaatgccaacgccgtcggcgctgcgcaaaaggacgagtggttcgtctagagccaggcaacactgtggaaggaccgattgacttgagcacaataatctgtactttattaagtaaatttatggatatttgcagagcattaaatgaagtgagtacagtttaagtaataggcattatactatattgaatccttgcaatgccctggtattatatgggatctttttttacttatcttttcaggactataagactataattaacaacaattagtgtggacatcaccgcgcagggtgtattatatagagatctctactcgtacccaagcagaatctcgaacgcattgggcagaaccagcctgttctgtcggataaccaatgcacttgtaaatagtttataaatatatcatttttatttaactgattaatacaacaagctggctacacaagatcccacaatccaaatatcctctaaaaacgatatgtaatacagaagatttccccccctcaagtatcataattttgtgcaagtatgttggcatttatttagagaattacatatgtttagatggcaattagatttgaattaatgctcttcgattaaacacttgtgttaggtttgcatagcacggattaagataccccaaagtaattgtataacgaatcagatgtagtcgccgattctgagaggtaaactaacatttgagcgaaacaatcgtaagcatttaattgaattgtgaacagaaaccgaaagaagtattaaagctcaacaagaataaccgataactgtcattaatatacaacttccgaaacttacaaatttgagatacacaactggcagtgctgttggccagggcgtttttacaaaaacttaagctgaattctaatcacaaaatggacacaagaagatcaacaaaaacaagggatgtacataagtagtcgacaatatacttaccaaaataataatacaaacaagcaaacgaacaaaatcgaaacttcaaatgcaactgtcatcatctatacaatttcacctaccaccactcaccattgtcgtcca

SEQ ID NO: 12827 - DNA, 1185 bp, DROSOPHILA
atgcccacatcctgtgggccgggtccacccaacgaccacggccccatgtccttgcccacttcctccccctcctgctccaaacgcgcccgcatacccacgcgagcggcagatgatgatgagccgttgcggcggtcagggaccctaacccaaaggcaaagttcggggtcgggcattccccaatggctgctaatcctcatcggactcctcgccattctcgcccagacaccaggcagccaggtggccgccgagaagagtaaacactattacatgcagtcgctgtgcaagaaccacttcctccagcagctgtaccgaaagatcgatggagcggtgctctggtcacagaacgagcggaatctggactgcattatcaccttccagacgcactcggtgctgcagcgcttcatgctccgcttcgacatgctgcagttggactgcaacgatcacctgctggtttacgatggcgcccacgccgtcgccacgcccaagattgacatctcctgtcggaacacaaagaacaccgtcaacgcgctcctgacgcgcacgaactttgtgacactgaagtacgtgaccgatggctggggaacggatgcgaacggcttcaagctggtgattacgtcggtgaaggatcccaagcacacctgcaaggacttcacctgcgccacccgcgagttctgcatccatcccgatctcctctgcgatggcatcaaccactgcggcgacaactccgacgaatccgtgcagaatctgtgccagaatgagacgagcagcacggtttttggcctggacatgacctggttcgtcctcattgtcgtcggtgtgctgctcgtcctgagcgcgctcatcgtggcagtggccatttgtgtgtgccggcgacaggatgagaatgccgccaaccagaacaccgcgctccaagtgcaccatacggccgacacgaacgggtcgtcgaaacatctgcactaccacggcatcagtgtcggcgggacactgacgcgggagcacacccaactgccgacgtcgggaaactggcatcaccctgcgggaccatccgggtaccaccgcactccacacaactacttgaagatggccaccaaagtccgtcccatttgccagacgaacatcgccggaaccggacatcccaatgccaacgccgtcggcgctgcgcaaaaggacgagtggttcgtctag

SEQ ID NO: 12828 - protein, 379 aa, DROSOPHILA
MSLPTSSPSCSKRARIPTRAADDDEPLRRSGTLTQRQSSGSGIPQWLLILIGLLAILAQTPGSQVAAEKSKHYYMQSLCKNHFLQQLYRKIDGAVLWSQNERNLDCIITFQTHSVLQRFMLRFDMLQLDCNDHLLVYDGAHAVATPKIDISCRNTKNTVNALLTRTNFVTLKYVTDGWGTDANGFKLVITSVKDPKHTCKDFTCATREFCIHPDLLCDGINHCGDNSDESVQNLCQNETSSTVFGLDMTWFVLIVVGVLLVLSALIVAVAICVCRRQDENAANQNTALQVHHTADTNGSSKHLHYHGISVGGTLTREHTQLPTSGNWHHPAGPSGYHRTPHNYLKMATKVRPICQTNIAGTGHPNANAVGAAQKDEWFV

SEQ ID NO: 12829 - DNA, 14111 bp, DROSOPHILA
aataatccaccttcgaaggtaaaccatcttaattatgctttaaaattgctggattatataaacccctaaggtagttcatcccacttgttcaactgaaatcgacccacacaaatggtggttggtatctatctaccagagttaggagctcgtttaacccaatattgcctattcgtagagatccgcattcctgcgaggagaagtcgaactgccgtagctgagctgcgagtcggtcttcttcagaatggaaacgtggtgggtgggtgcatcacccgtccggttggccatcagcgagtcctgtttgtggagcaggccgcgtcgctggtcggcgaaggagatgaccgagtcctgcttcaccagttgatggcgcctttgctctggtcgctggtccacaaacgagatcaccgagtcctgctttacgaacttctgccgcttatcgagcagagagctcggtgtggcgccctgtcgccggcccacatccatggaaacgctatccctgtccaccagtgtgtcgttgagaccgtgtcctgccgacctgcgtgcctccatgtaggacacaattgagtcctgcttggacagggagaccttggagccattgctgtcctgctggcagaggggtcgccggatcccagaagcatcactgcaggagctctcctgcttgatgaggaactgacgcgatccgtgagagtcctgcttaagcagcatctgctgcgacaggttgctgtcctgcttgagcatcatgttgtggcgccgcagcgagttgtgctcgtagatgtaggacaccgcgttgcccttgctgctcggactcttcctcgagctgttctggtggtagtgcgatgacttccgggtgctggtggtgctggaggcgatggccacgttgtcgtagtacctaggtggttaaggtggaaaaagggtttttatcgaagggaacacgatttcttacaaatcttcatatcaattttgaaggccttcacatattttatcaatatatttgaggttagaaattaactaacctgaggcgtccgcagcagctgcgcgacttgatgatggccgcgaatccgcgtcggtacttcttgttcactgagtagagtatggggttgatgcagctgttcgaggagcccagccactgggccaccggcatcaccttcttgaggatctcgaactcctcctgcgagatgtccgagccgaatttgatccgcgcaaagatgacatagagcggcagccaggacaaaacaaacaggatgaccacggccaccaacatcttgatgaccttcaccttgctcttctgctgcatgcggtccatttgcgcgtccttggactcgccggggatggacctcgtggagaccttgatccagatgagcacgtagcagagcgtgatcagggacatgggcagcaggtagcaggccaccaggttggctagcaggaagtagaggttcccatccgtgcccgggggccacacctcctggcagaggaactgcggctgcgagtaggccgagaccagggcgtcggagaagacctcctcggcgggcaccaggtcgaagaagagcagccaaggaatggtggtcaccagcgcgattacccatatgccgattatcatgatgcgggcacgtcgctttgtcatctgcttcaggggccaccagatggcaatgaacctgcaagaggggagtcccaacaaaggggatttttaccaagtagtcaaagaaggagtcttcgtaggagcagcagcagcagcaggagctccggcttcagatgccactgacggctttgagccgtcaaggataatggcaatcatcaagctgtcgagtcgagtcgaggcgacgatgacgatgacgacaccgtttcaactaggaggagcagctcggcatgcaaatatctccgctgattaattcgcacacgcaggatgccgatgccagcagccatccttaagcctttttctgctgagtgttcgctttccaatctcgactattgaacccgcctgctactcctgctcctgctcctccgccccaaaaaagcggcgctgcggatcctgtcattttttattctgcttgccataatgaattgtaatttgaataagagctgcgaggtagtgagacgagtcggtatggggccaacaacgagttcagcatttttcatttagcttagtgcagccggctcattgtggcgcccgctcagtggtcatagacaagacttgtcccggacgaacgaaactggttgtctgctcctggcccgaaaccatgtaattacgtgcattgtgttcgtattttcgacttggaccttgggttgtcgcctgcgtctgtccgccaaaacatttggcagataacacagcggtaattccattagagggcggccatgccaggccactaccccagaatcctattcctcaccgactaaaaatagccagcttaacaatgtggccgagaccctcatctctgcgaaaaaaaaaaggtgggccgcctgggcgaccaaacaaagctgtccgcaaagccaataatcaaattgtcataacgtttatttataggagcaaaccaattgcatttgcataatttgcccatgcgacttctatggtcataaatcaggcgagagcttaattgagttctttttgggtaaaaacagcggagtcggaaaaagtaatcagcagttttcgctggtgcagactaattcaaactaaacctctaatttgatgttgaaattttgttaaatcgtattaactacacttttgatgatgtaaaccattttatgagctttaaaaactaaaatttctcttatgagttctcttatacgatttatgtatgatttgtttcacaaataaactctccttatagattcaattgctgtcggaaaattaaattattaatattattttggtaatcacgggtaattgttgcccatcaattccgttgagtaccatatgcgtaaatctctaaggacgtcagttcagtattgttagcatatttattaagaaaaatcttgccacaatcaacttaaacaaagtagttaatactcgcgcttttaaagcatttaataagccgcaagtgtattaatttaatatttgccacacaatcctgtgtttctgtctagatccacgtggttttatggctcctatttcgcttcctactgcggttacccatacgcactgttgacatttgcgacgcaaagaagacacaaaagccgcaatgccagcaccgtaaagacacaactatgtctataagcgagtgtgctttcttatagactttatgattataagcaatctagttatatacatatacgtattcagacaagaaaagaccctaattaaatgacagtggcataagtataaatataagtagaagtagaagtataagcaagtgataagctaagtcgaaggggcattacgggctctaagaccgtggagagatttaagtttcatgttacagataataaatcttaaatttcgattcagtttacgatggctcgtaaaaggagagaataacagcaaaacaactggataaacggacatcaatgacgctggactcggacttcgactgggacttggaagtggaagtggaattggaagtggatgaggatgtggatgtggatttggactcggttgggttggcgttaagcgtgggcggaggctgacatgcgggcctgtgggtgaccaaacgatcaagtgaggcgctatgcctttgtcccgctggctgaaaaatgacagtggcaaaaacagaagcttctggccaaaactcctcctctgattgtggccagaaattgatataaatgaaagtgcacataaagcgacgggcgtcttattgtccttgcggctatggctagcacaatttgagggacttcagcatcacttgataaatctgttgaccgcgacatttgccgaatttattgcttttttatactttatgggccaggaaacgcagggctgacacatcgattcctggcggccaatcatcaatggtatcaatattcgcggtatcgcggccaacaacattctaaggcaattgaaatgcacataaaatgagaaacatgaaattgattgtaagcagcgcctaatacggacaaggtgagccatagaagcatatgatgatcttgatcttgagacgactgctccactgactctcctacataactgcctaactggctaactgccttactgaccagttttccccgcagctgattgcattgagtggcgctcactttcggttcggtcgcctggtgcaaatccactataaaagccgcactcggagctcaagttgtcaccagttgacaatttgaaatcattagcctagctacctttcctacttcagttatcccgccaaaatccaacgcctcaaaatgttcaaagtagtgagtatcattgtgcagaagaagttgtaaccagtttgaatccaagcatcgtatcattatgatattatatcagtttgctctatagcatttaaaaataaatgcaataaattaagtttatattacaactcatatgagtcacctagtttgttgttaggattggtcttatcttactcagaatgagtaatatatgctttaaagtctgcgacaactaaccaaattcactgtggagtggcagccacctgctgctccgtctaatgccactaatcaggctaattcgtgaactctgatccgccgcagctgttcgtgctcgccgccttcgtcgcctctcaggctatcgcccatcccggcgtggtggccgtggcacccgtggtggcgcacccggcggtggtccacacgcccatcatccatcatggagcccactcggtgcactcgtaaggccattcatgtccaatctgcttatcaccaccgaacaactcacccctttcattttcagccatgttgttcatcatccggcagccgtcaaggtcatcacacccgtcgtccacaagcccgtggtggcggtgcatgctgtcaggccggtggttccattggttccagtgcatcatgccgcccccgccgtcgtcgtgcatcattaagtgcagcgaatacggttcactttcaatacctttcccgctcccgatcccgttcccgatccccaccagacccagaccaatcccttcctgagcaccataaccacgatcccacaataaaagttcatagccacgtaattggagcgagtgttttcaacttacctgtccagggaaacggcaatcaggctgtagaccgaggctgccacggagacaccttgtatgtagggcacaaacttgcacatcagccatccgagcatccaggctgcgagttccagcagttcgcgaaacatgaaagggggaaaagtgcgggaggtgagtaaatattggtcataaacaacgcacaaattatgctgagtaactttcggtcacattgtccttgctggtgtcctagccatacactgaaggaaatgtgagggcctatggcaacaaaaaaagaagaagatgcagatttttctaaaataccccaaggacactttgctcgaaaactttataaatatcctaaccacgaaaatcaaagcaaattaatgtggttaaccgaccgaaggatgcttattgttctcatgggaaatattcgaaatagtagatggtgtatcactttaaatacaaaccgtaagtcatcttgactgcttagctaagaaaagagtgaaaatattataaaactaataattctccgctaagtattataatatatttcatatcttacttttattcttgaataagtacagttttacagctggggatcattgagttctttatagctttactgcttttccccgagtgcactggtagtggttatgctcatggttgtggtgatggtggtggtggtgatagtggtagtcatggacagttgggttcgagatctggttagcgttcaatgcttcttgtcattgccgccgcccacgttcccgtcgttgtttgctgactgagatttatgtgctgcatatcattcataatttggtgacaagtctcagattgcgcccagccatcgtagtgggtggggcagaatgtggagtcctggggggcagagcattgtttgcccagacccagactcaaagccgcggtggaccgcaggactgcctaacttaatttgtattccttttactccattttgtggctggatgatgatggtaaatggaatacacgggccctacttgcgcatagttgagcgttatgaattttatgctaagaggcataactcacccagacacaaaaggttataaagcatacatacatgggcgtgcaatgggaggggcaacttcccagggttgatgacagtcgggcggagaaaggcgcccggttcatgacatatcgaatggcaattaaacaagtgcaagtgcggcccacacatcattagcagttagctgtttggcagtttggcaatttgcagaaggagtttaccgagttcaatgctcgaccaggagacgcctcctgcgtcatggggctcctaatttcctgtctcgttcgcctgtcttatctctatttgttgtcgctttttattatgcagacgcaccgtaagccgccaaggcagcccaataaaagctaactttaatatgatttggcacataaaaatataaatattattggcgctgtggcgcttcgtgcaagtgaactctgtggctgtggacaggttttggttctggacaggatcatgtgtgtctgctgggaggacatacacatcctcccgcctggcaaacaatcaacagtgtgtacacaggacagcagaccgaattggtttttcggttttattcctccgatttgaaatggctttcgggcagacctgcaagtgcaacagactggatccgaggctattaatgcgagtgtatttggccactcacttgatattatgctgataagggtgaactttgatatatagctgtctgcgggagctcttgactcggcaaactttatgctttcaagttgtttgaaaacaatttaaattcaaattcggttccgaaatgcttcatcacttgcgggacaccggattagcagtgccactgggtgaacttttttttttttttaaatacatgttcttccaacttcccttcggcaaataaactatctaattgtgtatgcaattctattaggacaggcaaacgtgactcggttggtttgtctgggattaaagtttgcatcagtgcactttggcagtcaagtgtcttaaccaagtttacattgtggttagcttagcgcagtcaagtgaccacttgataatcccgaacaaacaatggttttcagttcatatggaaagtattttgacaggctgaggcattcagcacggttcaacttattaaattgtccaactcgctgatttggatatttaatataaaaatggaaaaaccacattttacagaaccaacgagaaaagctgacatttaaaattggtttttgttaacataaaacgattgagaaggaataatacataattaatgaaccgcaaaaaccgcattatatataaaaaaaatcaaataggtcaagggttatgccagtagttatttatagataccacaagcttaggtaagacatgattatttcaaggaacaccgagtcattcgaaaccaatctttaattaaccccaaccttaaggccacattaatgtgttgtacaaacataattgtagctaccgaaataacctaattgccttgcgtgacggggctaacccgaacctccttgtggcattacccatttgaggactcaagtgaaaccaaacactccacagtttgctcggccaacatccagcctccccgtcaaggtgagaatgggatgggtgtttgatccgacttggagtgcgtttgacatggcaacatatggcaaacagacgcctccatttatacgcgaaagctggtgctcaatattgatcaactagaggagataataccaatcgatactcaggcttatcgccagccttcgattgtgggtggtgggtggtgggcttgtgcgccccatcagcccttaagaaaatgtcaagtgcgccctaagccttttattttttagcctcttaccctccttacaacgagagcctttgtttttcggtttcggtatatatgacttttagaaatgtgattcaactgaaaatatttaccttatttgataatttgcctgcagaattaaatttaacgcggttatttatgaataatgtccccttatttggaaacaaatttttctcaaggacaactttaaaacgcgttatcttttacagcaacaataaacattttctctactgtgctttatgaggctttaatagcgccaacaaagttttgttacatttttatccccaataccgtgggtgattgttcctatgtaggcaaagtggattggattattccgggcattgcggattcgtttcggtggcggcattgtcatgcacggagtttgatcgtaaagttaatgaaataatcaggcgtgacaaatccgcaggtttggacttgggagtgggaacgggcgtggattgcagtggagtggagtggagtggagtggccatggaaaaggcataacataacacttctggcaaatgcgttattgttatgattatcgccgcggcgtcacgtcctgcggcgacttctgtggcagctcttcgggaaaattgaataccacagctagttcgcagagaaatgcgcctgggacgcggagtgggaataggaattggaatctgggaatcggtggtcctcgatgtgagatacgggattgcgggagtaaagaagctgcagatcttaggtggagggctcagaggttggatgccatttgccgacggcacgtagagactaaattaaaatacaattggcgagctgaaaaatgacttcatcagggatagggaaacagaaatgcgggagagtctgcctccaagttacgcatacgccgcgttcgcccggcacaaatcacgtggccccctaatgaacaaactggcaacgtgactgaaagatttagccaacgggagatgctgatctaaaaagggccgtaatgataacgattccccattgataaaatagcacaacaatggccataaagcgccatctgagacaattgccgttgctgttgcaaggatatccttcgtctcaaggcggcatcgttgctgggaaatcaattcatttcgcattttattggatttcaaagcacacacataaataagggccagcgccacattccgaccaacaaccaccacccaccacccaccacccacaggccaccagccaggaaccacccacaaagagtacacggcccaacccaatacaggtgctcccacaccccacgcatacacacacacacacaccctcaaccacacacactggcacactcgcaagtgtgtgtgtgcataaccctgactattaggtttgccaagcgaaatatttaggtcaattcatccagccgcaaagagccttgaatgcaaacaaccttccattgcaattctgaggcttgaaggtgtgcttagataatggcgctgccagcggcgatggccgtgggcgtcgctgccagctgcgactgcggcggcgacgtcgtctttgacggctggaatttgatttcatataattcattttggtggcaaaacaacccgcccactttgccactcgctgggggcgagtagtgggaactatcagacagcgatgtgaaatgctcgatgtacaaatatgctaaacttccgaactcccacgcactgtgctacacagggagaaaaggttttgttagaggagagcaaaggattaagtggtatgactttacactgctaatttgattatgaagaatattcgtaagagttatagcatttcatcacctgacgaagttcaaaaacatttaagtttaaagccaaaaagtgtatatttctgaaaacgtgtggattgtttaatgaaaatgacgtgttaaacttttgtttgtaaataatacgctacacatgtgtttagttggcaacacatgttttttcccctgcattagtgctatttcaccgttgccgctgtgaaaccgttgccttcgttttaacttcagcaggttgtcgaaagtgaataggaatgtaagtggggttgagagttgtggggatgaagaggtgaagctgaaatgagccaccccaaaagccccaatgccagcgggagggctgcaatttgttgtgactggcgtttttgctaggcatcggcggctcagctgaagctaagacatgccaagcgaaaattgcggagtgggcggccaaaagggtgccccatccaaacaaccatacaaccatctagcccacccaatctaccatccaccgccagccacccaccacccccagtgacccagtaagagctgtcggccctgcgcccagcttgaatttgtgaaattaggtcagttttgtgtcgatgatcctttgggccaccccgaaaagcagccaccaatgcacctacacatgcacagtagcgagcaaacacatgggcgtgagagcgggcgagagagagagagcggagagagtgcgcagtgacacggacacaaaaacggagacacggacaccgatacagatacacaatgcaggcggaggtaaactcattcacttttcgccactcgcttcattcgtttccagcgattcgcactcggcagccttcgtttactacatttcccccacagtgggcttctctgggggagtgtattggtatggggtgggatcgagtgcagtgccgagtctaagagtagagctgcattggaaaataaatctgataagtcaactgcatctgcatatttgttaccagtttgtaatattaatattcaggttaataaataatctgaggggaagaggaactaaaactatttttattattattattattaatttaatttaatttaatattattattattaattattttaaataattttaattattttcatatacttgtggcaaagaaatgtagtaacacaatttgttaaactatttcctattaatcgaacatattgttttacgagtatgttgacaactcttattttgccagcgtactcgctgtatagcaacaagaaaaggagagttctcacagggctgagccacttaattggcaacacttggcacaacctgcgagcctacgacctggcattgggatttgggactagggacctggcactgggattggggtagccatcgaaggcaaattgcagtgaaggatggagcttgcatggcgtgctccacaatcggaatttgatttaccaaggatttcgatcatttttccatgtcagcggcgatttgcatagacatttgccaacctgctcaccttgtcgtccaggtctgcgactatcaatttggatgtcagtccacaaagttcgtttcgaatgcaagcggggaagttgcggaggggaaaccaaccaattgggggtgtaagacggcagacagggacagatagatagatagatagatggacggatggataggcatgtcagggaaatttatttaaattaaagcatacaattatgcgtagcctcgtttatcgggtcgtttgtgggtcgtctctgggatttggtggaattggcctctaattaaatggacacttgttctttggtccatgcggattgtcgtttccaagaaggtaagggctcccatggagagagcacaaattaatttaattgagtgcgaacatccgttgctacggaaatctgacacatttctggtaaagtacgctgaatgaattcttctttttttctttgctgcgtactgtgtgagatgtagttccttgatttaatgaataactggcttttgtcttggcagtctattttaaaagttatcttgaccattgcagaaagctattaaattttgatactaaagcttggcattttccagaacaactttaatgatgctgcatcgttatgttcttcttgtgtatgtagtaaaaattcggaagaagccagggagtctggtatataaaatgcagcttacaaataaacggaaacacagtatgtctgtcaaaagtaaatataaccgagtatgaataaaatcccataatttattattttccaccagaaatatgagcactttcgtttggacatttatgccgacattatgtctaatgagggtcaattacacttgcccaaacatatcgggcacattacgcatacgcagcgtaagcacgcaggagcaacaactttcgtcagtgccatttggcagggctttatctaaagcggcgattaattgcagtacataaatcgggctaatatgcagaacaaacaaaaaaaaacttcggcttccccctagcagctaacgtggcccccagtggcgaataaatctcgtcggcatcttgcggaattaaagagatacttacgcacaaagatgttgccaatcagtgtggctggcaggcagaagacaatgaccaggatgtccgcaatggccttttcgttggagaggggggaatgtaaattttatttcaaattaatggggttcatccacgagatttacggggtccacccaccagattcacaatgaagtagttcgtcaccgtccgcatgcgaggagcccgcaggacgacggcgatcacgaagctattcccgatgagtcccaccaggaagacgacgatgtaggccacgcagtagaccatggacatggccagcgagtgacggtagagtgggtcgaatccgaagtccacgctcccgtccagctgctcccaccggagggcactgtcgttgtacgacttggtggccgcagccgccgagatcaagctggtggtcgccggcgataggttcagcaagttggaatagtaggtggatgaagtggcgtctgcgatggccagcgacttgcccgccagggatcctctcgcagatgctgttgtggtggccgccaaggtggctagcagcgaactggccgccggagccaccgtggccgtggccgtagtgagaaccgtgcccagcagagtgtccgtaatggcgctgttattcagtttaatggcactcgatgagcccaaggagctgacagcagtcccaccgctaccactagtgccattcaattcgttgaaactcaagaggttctgcaaatcgacgaaattatgcgtgaaattattgtaatccccggcgagggcggcggcttcctccattgtctccgcgaccattttccccggcgccatggtcggaatgggcatgggtacactagtcgtcgtactgggaacgtcgccacttgtatggcttttatgctttcgcttgcgaatccgcccgctggctgccatcatcaaatcatccggcgtcttgattgggcggatggcactttcactggcgcctcgctttcgctatcactatctgtagacgtatctcgaatcttgaatctggtatctcgcttgttttagaaaaggtctataaaaatggcatcgtcacttggcatttcgttggcttgtgtaggatatgcaggaagtttcgtggctttgggttagagaacagtttttaattaacacccatgtccatacaatatctcgtttatccggggattgttttgcgtttgccccgaagttgcacaataaatgcagttttctagaaactcgcttctagcgcccaaggacccttccgttttcgttttttttttttttgattgaaatcacctacaaaagtttgttgccgtttcggctgcgaatccgagtgcggaatgcaatgcattgcctgggtcgttcgtcagctggttgacgttgccttggctggcattacgaaaaagtcggcggcccaaggcctcgtgtgcatatttcagataaggccagatgctgggtgcctggataaatgcagctagaggggattggggatcgggcattgggcattgggcattgggcattgggcatcggacatcgggcaaaggagccgagagcatcggctcagggacatggtcaccgccacagttgcaacacatgcgcgtcgctaattaattttaatgcccgttctgccattgtttggctgttgtttttggcacaattgaaaagccagcgagcgtgcactttgacctcaaaaaatcgacaccaaacatcgaacaaacgagcaattgagcaactcaatagcagcgcataaaaattccattaagcacaactgccaagcgcacgcagcactcttcgattgagtgccaaaaaattgccagtaagcattgaaacaattggtaacaaacgaagccagtgcgacattcttttgtgcggttccatgggagtgtccacatcagacaaactggcgactaagggcccctcggcacacaattca

SEQ ID NO: 12830 - DNA, 1525 bp, DROSOPHILA
atgatggcagccagcgggcggattcgcaagcgaaagcataaaagccatacaagtggcgacgttcccagtacgacgactagtgtacccatgcccattccgaccatggcgccggggaaaatggtcgcggagacaatggaggaagccgccgccctcgccggggattacaataatttcacgcataatttcgtcgatttgcagaacctcttgagtttcaacgaattgaatggcactagtggtagcggtgggactgctgtcagctccttgggctcatcgagtgccattaaactgaataacagcgccattacggacactctgctgggcacggttctcactacggccacggccacggtggctccggcggccagttcgctgctagccaccttggcggccaccacaacagcatctgcgagaggatccctggcgggcaagtcgctggccatcgcagacgccacttcatccacctactattccaacttgctgaacctatcgccggcgaccaccagcttgatctcggcggctgcggccaccaagtcgtacaacgacagtgccctccggtgggagcagctggacgggagcgtggacttcggattcgacccactctaccgtcactcgctggccatgtccatggtctactgcgtggcctacatcgtcgtcttcctggtgggactcatcgggaatagcttcgtgatcgccgtcgtcctgcgggctcctcgcatgcggacggtgacgaactacttcattgtgaatctggccattgcggacatcctggtcattgtcttctgcctgccagccacactgattggcaacatctttgtgcgtaagtatctctttaattccgcaagatgccgacgagatttattcgccactgggggccacgttcattgccatctggtggcccctgaagcagatgacaaagcgacgtgcccgcatcatgataatcggcatatgggtaatcgcgctggtgaccaccattccttggctgctcttcttcgacctggtgcccgccgaggaggtcttctccgacgccctggtctcggcctactcgcagccgcagttcctctgccaggaggtgtggcccccgggcacggatgggaacctctacttcctgctagccaacctggtggcctgctacctgctgcccatgtccctgatcacgctctgctacgtgctcatctggatcaaggtctccacgaggtccatccccggcgagtccaaggacgcgcaaatggaccgcatgcagcagaagagcaaggtgaaggtcatcaagatgttggtggccgtggtcatcctgtttgttttgtcctggctgccgctctatgtcatctttgcgcggatcaaattcggctcggacatctcgcaggaggagttcgagatcctcaagaaggtgatgccggtggcccagtggctgggctcctcgaacagctgcatcaaccccatactctactcagtgaacaagaagtaccgacgcggattcgcggccatcatcaagtcgcgcagctgctgcggacgcctcaggttagttaat

SEQ ID NO: 12831 - protein, 507 aa, DROSOPHILA
MMAASGRIRKRKHKSHTSGDVPSTTTSVPMPIPTMAPGKMVAETMEEAAALAGDYNNFTHNFVDLQNLLSFNELNGTSGSGGTAVSSLGSSSAIKLNNSAITDTLLGTVLTTATATVAPAASSLLATLAATTTASARGSLAGKSLAIADATSSTYYSNLLNLSPATTSLISAAAATKSYNDSALRWEQLDGSVDFGFDPLYRHSLAMSMVYCVAYIVVFLVGLIGNSFVIAVVLRAPRMRTVTNYFIVNLAIADILVIVFCLPATLIGNIFVRKYLFNSARCRRDLFATGGHVHCHLVAPEADDKATCPHHDNRHMGNRAGDHHSLAALLRPGARRGGLLRRPGLGLLAAAVPLPGGVAPGHGWEPLLPASQPGGLLPAAHVPDHALLRAHLDQGLHEVHPRRVQGRANGPHAAEEQGEGHQDVGGRGHPVCFVLAAALCHLCADQIRLGHLAGGVRDPQEGDAGGPVAGLLEQLHQPHTLLSEQEVPTRIRGHHQVAQLLRTPQVS

SEQ ID NO: 12832 - DNA, 9594 bp, DROSOPHILA
aaatggcgaccagggtctgtggggctcaccagattaatatcagggtggtgaccacattgaggatcagtcccacgatggtaatgagattgggggccagccaaaggggcgtctgggcgaccagccagttccaccacggctgcagcagcggatcgagcaggctgacactgaagcaggagtacttgtgttcgctgagcttcctcagctgctgggcactcaggatgtgcttgtcccggtaggcgagcagcgccattttcccccacctggttacgtcgtccgattcctgcgtcgtcgcgctctcctcacgcttttcacttttcactttcctctgacctagcgcttttccctcgcgcgcatttgtgtacgtgtacttgacgtatgcgcgcgtgtgcgtgtgtgtccgtttgtgtgttcgcttttcctggctattttcacacgtggagcgcgatgctggcgcaactacgaagcgcgtctatgatttgcgtttatcaactgcggcgtggtcagttttacgatcgcttggatgcgcacggagtatctgcacttgtatgtttacttagaaaaattaacttaattgaacgaccgtgccgtggagtttttttttcttattgcctatgaccagtgtgaccgcgattgtgactgcaaaataaaccatctgcgcttgcaatgaaataccagaaaagaacgatgtccatttgcgataacacatagcccagactcaacccaatttaacagcagtcttggtgttctctgttagttgcattttgcgcacagctatttaatatcttagcgatattgtttgtgcaacttaaaaaaaataaattttcaatattgaagcaactcaattaatgacaattttgtatagactaacaatgacacgatcatttgctctgttaatgtaacatcaacatttgcaatttcctgttaatagcccgttataagtcttttactatcggtcgtctatcgatatcggccttttagccgcccattcaaattcaaatgtatatatcatagtttattagataaatcagtttgttgcttaaactacgtcctcaacttaacataccgtatgcaatgtttcatttgtgtattcgcttgttagttaatatctaaaccttgtcaattgcctgctttattgttacgattagaatttatgtttaaatatgcggctactactggttctgggccgggaaatgctcgccaacgcctgcaaatatgctcaaaaagtacaaaactgtcgtgcgtccagctgctggccaatataaattgcggcttatgtaaactatggcctatcaaaagttatttttgatgtgttgtttccatgaggcatcgtcgtcgtgtttcttagtttggtggatattaggaaaatgtataaatgtatttgcttcgatatataatatttatatatagataaaaaaataggcttaaaatgtttcgttttagcattttgttgttgtttaaattactttatattggcaactctcattacatttgttaatgcatatagttatgtagttgaaaaacgctcgaacgtgcaactatttcgctttgctgatgacaaaaatggttacacacagcacactcaaccaattatataaatagtagtagtaataatttatagcacaatatgatatagcagcagtttgaaactttttacacatgtcacaaatgttttcttcccgtttgcaagattcatttttcgttcatggagtttttgtggtcagaagacagagtgcaaattataattactgacaattttcaactttaaagcgaagggacaaaatttcacataatcaatttacagtcgccgcaaaagttgcatgtgcagccgaggcctaatatcgttcaatttgcattaagaagatacatatttatttatagatgcgtgcatgtatgcatatagtaaccagcgatgcaaaaattaatttaatttatgtggtaggcatttacgataatataatataaattttgttttaattgtcttcagctttgagacatttaggcaaaagttttcttttcatagtgaatttgttttgttttctataaaacgtgttaagcattaggttggttggttggtaattcgttatcatataatcataataatataagtgttcactcgctgcgaaacgcactccttgaaaacatcaaaacataaactaaagagcacatgtagggcaaaatcctcaacacacgttcaaaagcacaggacagaacttctctttatcgaacttaaattatatatttatatcaaaaatccgcttgtttacaataataataatagtgcctggtctggtatgtagacatacttgcatatgcctatagttgcggtcaagattgtagcaagtgagtttcgtcctctgtgcggaaggattgcaaaggaaaactccgatcaaatgcctttttcttcggccgcagctataaatacacaaataaatttacatatctagtttaaagtgtcactcagttgctattaaacgatttcgtaatgttatcgtaatgtaattgttttatcaaaaaacgtcaaaacgtaaaaaatgcattcggcttaaaggcttaaacttgtgttgttctatacgttgtctacagaatttatgtccacgtttcttgtatataaatatttaaaatttgtgttttttagtttcttcttgttgttattcgcaattgctgataatgctgcctaatcgttatgggtgtgtgttgtgtttttcgcgtttcccggagaggattgtgtgtggcgtccctccttagaagttatcttattatgaatgatatggcgtcacataagttgctgggaagatgcctttcctattgccgatctcgccgttccaccagttctcatcggagcgatctgtgacggtgatgacatcgccgcgtctgaagtccaattccccggattcctgtggcacaaaatcgtacagcgcctgcacgagcatctgcaataaaaaaaatcgttcggacataatgaatccaatctaatactcttggcatcgctgtttgtttatagttcaaatgggtgggcggtggcggcggcatcgtacgcaaacatgacctcaatgtgttatgcgaaatttgtatttttaaaatgaatctgcatgtttgctgagcaaactcatcacatcaaaatggaatggaatggacggcacacccacctcttcaggtatcatatcacgcaatttgacatcctgcgaccgggacacgctcgccgtccgatgatattcgaccagttcgttgagggagttgaacttgaccacccagaggaagaatttgctttgggcatcgcgcagaaccttgaaatgctgaacgccatcggggcatctgaaggggcaaagaatttcgattatatacggttttcaatcataaatatgaaagctgaagccattcaagcgcaactcacttgactgataaggagaaatcgccgggactggattcgctgatgcgtatcaagaaggcgccttcgtgcttatttgacagcagcttctcagcatcggcgcgtgtgatgcgtccgtaataccagctacaatagaaatgatcattatttgggtctcgatattggaaatttcaggctcgacttactcgtgattcttcatttctatgtaattactaggtatgaggccttcctttccatccagctccgcgcgataccaatttgaatcgtcttccatatttaatatctgtgtaaaaagaagggatgtaagttaatttaagcaatacaaatcaatgggtttgtaaatgtaatgaaccatatttttgattaaataactaataaagaaagcttgatttgtggaaaaaaggatcttaatgggcataaaattacctaaatcttctacccctgcctaataaaacaatcatatattcagcttcatgaggctgagttaaatgttaaatatgttctttggtttttccatgaagttattaaaaccggagcatctgattttaattcccatttctcacgaaaccaaagtaccagctgcacagtgagtaatccgatccccgaaaatttgttgtaagaacctgcctccgttgtttccattttgagggccactcccctttaatcccaacccccccagacaatggcgatcaatcgagacattcttccgctttgtttattggcgactggcccgattccccagtggattcgatgaacagttttcaattgtttgttgattgagcgttgtcccaaaaaactgtgtcagtgcgcaatcagcgaagataggcttatggtttggtatgaaacgtacatatttatctattatctccactattctcatatcttttttttcttgcgaaacgctaaaaataggcaagcattatggccgcgacatgtgataagaatgttaagtgaaacggagcactcactcgaatggacgaatttcacttttgtctatctaatgaactttttcctagcccatttcgcatgccaatgacacaacaacaggctgctgcctacgtaatcatcgactacttttatgatatcttacgattgacagccgaaattgaagattgtctatctgcaaaggtctcgccatttgcttggccactgggaattcccagattcgaaggtgctgagttgagcttttatgaatgaatctcgtcgcttatgacggcgcccagcagccttcagttttcggaatctgtttgcttttctcaaggaaatcggttgcacaaatacccaggaaatgtgtttattgtgcaaaggtcaggatttcgacttttagttaagtcttaagtaaagcatattcctatctttatggatttctgccatttttcccttgagcagttcagtgtttatttggtagctttgttgttttccaatatagcttgttcgtcaagtcggaataatggaatggcattcaaatgagtcacccacaaaaaaaacccctgttgatactgtgtagttgagggttggttacttttctgaagttgcaacttgtaattaccccatgaatgtctcatcgttaattatacacgctactaacatacgaggttaataacaaacataataccttaacccacagatcgatttcttgttaattaaagatacaaatatatatatataaatatgagatatatcatattcgattcgtataatgatgtttcgagttttttggttacattttcgcacgtcggaatgtggaggggatttgggtgatgtggagctggaggtggatggggtgtcaatgtcgtttccagcttatgtaaaacccaattattgtgctcactgttggctgtggcagtgggattttgcccgctcagctggatctggccgactaattggcatagctccatagttctaatccaccccgcgatcaccgaccatcccgcccgcatctgtcacccagacattgttcatcgtatatttattttatttttagattgtttcattcattgaaaacagccgccgagaaattcatttccacggattcgtcgtctattacagaaagttttctcgccgctcagcactgggaaaaaccagagggtttagaaataatataaacttaaatatgctgaaatgcttcaagaacataaactttccaagtattccatgatcgcatatttattttcccaactgcataaggaagtgcaccatttttttttcagtgcaggcaatgtgcaatgtgcctgttggataatgcataaatatttagcggcgctttcggaaggcaggcacgtagtggccatgattgttattatcaattgtttatactcgtatgcttatgtaattactagagaaaaaattctattgtcgtttcggaaatccgacgctgaaaaaagtgtcaaagcaacacgaacgttcacttttcgctgttttcgcgacaagcgaaagttgagcacagaatcccatttcgtgtgtttcacattgttatgataaaacgtggccacttttggtgcccacacaacaaggccgttagaattggaggcatttttttttttggaaaatggagctccaaatatccaagaaatacgctgacctgtaaaccagttttctggaaagagaacgaaccccaatgaaatgtttgatgattcacagcgctcctctctctatcgccttctatgcctgctgtatgtttgctggattggggcatcttttcagataaggctatcgagaagtgactaatcgctggcaaacaaacaaatgcgctgggagttcgaacagatatgcgtaacatacatatctccaatgcgagataatcgtgtatttctatttatcccccgcatcaatggagcccagaactatgggctattaaacgaactatgactatcagtgcggattgtttacccattgataagaccgtgcagctggacagagggctcatctacggcgtagaagcccctctaatggacgggagcagcgcacacacttgaccttcgggcggcgataaagaagcctcttcggcgagtcattgacaccatcaatcagcagcagcggcagcagcagcaacaaatgctgcaaatgcagcggcggcatatggaaaagaggcgcaaaaaaaagaggcacaaaaagggagaaaacctgccacgggcctgggttcctgctgtgactaacctacgacaaggtagacacacagcaacgaaaatcagcttacatcgcgccctggcaacaagaaaccggaaaattcgccagccaaaacaaagggtttggcctaggacagccagccagccagccatcgagccagtgagccaacacaaacacaaacacctggaaggaagcaaggcggcgaaaaagatcgaatcgcagcctgccagcagcctttttcttggccagaaaagccagcgaatacaagcaacacgggtaagcatcggatgtcccccacaaagttccgcaaagtcaaagggggcatcgaatatatcatcactacaaactgttggaattgtttttctaagcattcggaagaaaacgaataaggaaagttgaaatagtatatatactataggaatgctaacaataaataagttcattcaaggaaacacagtgaaaaatgctagatttgcaaagtatagtatatagattaaatcatatatgcatgtttatagctttagaaaccccctcctcacatcattttttaaacttactttgtaatgctaatcacaactatatgcagattaaatggggtcaaaaatatggtcttgatagatttgaagtgcagttgagaaatgaaaaaatgtagagtagaatgtacaatatttcagtatgtgatgcttcacaaggattttgtactgatagtggaatatatttgactgaatcttttcgttctagtaagagtattcgggctgcggtggctaatgagtcgtaatcctttcgtgttgccttctgcgaatgcaccttttgaaactctttagccagcttttgcgactgctgtctgtttggtcgcgatttagtaacaaaatctgtctggggattgaacctaggatgtgggttaaggcaacgacctggacggcggcagctgcatcgcagcggattatgcatgcaggacctgccacgtccccctgtgcacccccttacacccttgcgtgcccccattcagtgtgaagtctatgaataaatgcagatattatgatttgaggtgggaattgatgattttggaacagcactcacctttagaatctgagttttgcgaaaactcagctcgtcgtcagccgtcgcagagaaatcgtgtttggcaatcgcttccattttgctgtgttgttttgtgcgcagttagaaaacgctttcggagtttgttttaaaatttagttgcaattgtagttttggatttagttctatcagccttgatgcaccacacacacgcacacacagaggcacagacacacacgctcgttctctgctctttctctctaactctctttgaatttctctctcactcactactcagtgctgtggaaatgaaaacgaaacgagacgaatccgcgattagttagcgcacattatataaacgataaatcatggatattcggcagtgcgcttttctcagttcggttaataataatatatcttgtgcgaaggcaagggaagaaagcgattaaaaatacaccgacgacgacgacattcccaggcggagcagcaacagagaatgaacacagacacgagccgctctctccacggcggccactgtgtgggtgtgtgtgcgtgagcgtggcagcgttgccagcagcttgcgatttggaatttcggggaaaagcaggtaccgcaaaagcaattagacgatgtttggctattacttgttgttatgcgaagtaatttgccttaaataatatgaaatgtgtcgcttagaacacaattaacatttggcaatctagggcgtgggtgcttgctgttggcaatgctgccgcggtgacgttgttgtttgttttattttttgtaaccccaataaacacacacacacacacacacgcggcgcttatatttctatatgcgtaagttgcggctaactattttcgagtctctggcacgtgcaaagaggccgccgggcttacaatttcaaagggctagggtggctgcaagcttaagcgacactaattaggcgcgggagcggtttggctaacatattactactgctaaatttgtaattcacttttattttcatagcagcgtgaccgtggccgggtcgctttattattccaagaaaatatactgaacacaacactgtgggagaggcataccgcagggctttcgtagttttccttcacctggtcacaccgcaagacgcttcgccattttaaaaatcaaaacaggagacgcttcgccggaaaagtcagcattacgtttcattcccaaccggacacttcagtttgactcgcccatccgtcacagcagtcgccatgcagcgccacaaggaactgtacaaggagcaatcgctggtgctgagtccgcgcaatcactgccaggagaacagggatcggttgcaggcggcgcgcgccaaaaaacgagaggattgtttttatcagaaccgcatcatcagcgtgagcccgacgcccgtcaaaataaagcaattggcggcggcccaagctgctctgacccaggaaaatgtggcacccaaactggagagtccggagcggctggacacgaagcccgcagaactgctgaaggaatccaacccgaaggtctcccgccagaagctctacttacaacgctacatggagtggaagatagccaagaccaaggagcataagcagcaagaccagaaacgtcgaggcgcagccatcaatgtgccgacagtaaaacaatcaaaggccttgcccaaatcacaaacatttcgggttcccgataatctggcttctgcaaagcagaaggaggcggctcccatgttccagcctcccaagcggtgttctctctacatgattgccaatccgacgggcaagggaaaagccgcagaaccgattaaaccttcaatacccaagccaacgtcagcagcagctcctccgtcatccaataccgtggctgcatcttccgccttggccaggcataaatcagctgcttctgcaacaaaaatagtgcctgcaattcgtcagaacaacaatccagtggccttggccaggcaaaaagcagctgcacgacccattcccaacacaacgaagcaaactaccagtgtaaggcagcct

SEQ ID NO: 12833 - DNA, 2718 bp, DROSOPHILA
cacggtcacgctgctatgaaaataaaagtgaattacaaatttagcagtagtaatatgttagccaaaccgctcccgcgcctaattagtgtcgcttaagcttgcagccaccctagccctttgaaattcactgagtagtgagtgagagagaaattcaaagagagttagagagaaagagcagagaacgagcgtgtgtgtctgtgcctctgtgtgtgcgtgtgtgtggtgcatcaaggctgatagaactaaatccaaaactacaattgcaactaaattttaaaacaaactccgaaagcgttttctaactgcgcacaaaacaacacagcaaaatggaagcgattgccaaacacgatttctctgcgacggctgacgacgagctgagttttcgcaaaactcagattctaaagatattaaatatggaagacgattcaaattggtatcgcgcggagctggatggaaaggaaggcctcatacctagtaattacatagaaatgaagaatcacgactggtattacggacgcatcacacgcgccgatgctgagaagctgctgtcaaataagcacgaaggcgccttcttgatacgcatcagcgaatccagtcccggcgatttctccttatcagtcaaatgccccgatggcgttcagcatttcaaggttctgcgcgatgcccaaagcaaattcttcctctgggtggtcaagttcaactccctcaacgaactggtcgaatatcatcggacggcgagcgtgtcccggtcgcaggatgtcaaattgcgtgatatgatacctgaagagatgctcgtgcaggcgctgtacgattttgtgccacaggaatccggggaattggacttcagacgcggcgatgtcatcaccgtcacagatcgctccgatgagaactggtggaacggcgagatcggcaataggaaaggcatcttcccagcaacttatgtgacgccatatcattcataataagataacttctaaggagggacgccacacacaatcctctccgggaaacgcgaaaaacacaacacacacccataacgattaggcagcattatcagcaattgcgaataacaacaagaagaaactaaaaaacacaaattttaaatatttatatacaagaaacgtggacataaattctgtagacaacgtatagaacaacacaagtttaagcctttaagccgaatgcattttttacgttttgacgttttttgataaaacaattacattacgataacattacgaaatcgtttaatagcaactgagtgacactttaaactagatatgtaaatttatttgtgtatttatagctgcggccgaagaaaaaggcatttgatcggagttttcctttgcaatccttccgcacagaggacgaaactcacttgctacaatcttgaccgcaactataggcatatgcaagtatgtctacataccagaccaggcactattattattattgtaaacaagcggatttttgatataaatatataatttaagttcgataaagagaagttctgtcctgtgcttttgaacgtgtgttgaggattttgccctacatgtgctctttagtttatgttttgatgttttcaaggagtgcgtttcgcagcgagtgaacacttatattattatgattatatgataacgaattaccaaccaaccaacctaatgcttaacacgttttatagaaaacaaaacaaattcactatgaaaagaaaacttttgcctaaatgtctcaaagctgaagacaattaaaacaaaatttatattatattatcgtaaatgcctaccacataaattaaattaatttttgcatcgctggttactatatgcatacatgcacgcatctataaataaatatgtatcttcttaatgcaaattgaacgatattaggcctcggctgcacatgcaacttttgcggcgactgtaaattgattatgtgaaattttgtcccttcgctttaaagttgaaaattgtcagtaattataatttgcactctgtcttctgaccacaaaaactccatgaacgaaaaatgaatcttgcaaacgggaagaaaacatttgtgacatgtgtaaaaagtttcaaactgctgctatatcatattgtgctataaattattactactactatttatataattggttgagtgtgctgtgtgtaaccatttttgtcatcagcaaagcgaaatagttgcacgttcgagcgtttttcaactacataactatatgcattaacaaatgtaatgagagttgccaatataaagtaatttaaacaacaacaaaatgctaaaacgaaacattttaagcctatttttttatctatatataaatattatatatcgaagcaaatacatttatacattttcctaatatccaccaaactaagaaacacgacgacgatgcctcatggaaacaacacatcaaaaataacttttgataggccatagtttacataagccgcaatttatattggccagcagctggacgcacgacagttttgtactttttgagcatatttgcaggcgttggcgagcatttcccggcccagaaccagtagtagccgcatatttaaacataaattctaatcgtaacaataaagcaggcaattgacaaggtttagatattaactaacaagcgaatacacaaatgaaacattgcatacggtatgttaagttgaggacgtagtttaagcaacaaactgatttatctaataaactatgatatat

SEQ ID NO: 12834 - protein, 211 aa, DROSOPHILA [sequence omitted]

SEQ ID NO: 12835 - DNA, 10786 bp, DROSOPHILA
gagacaccttcgcaattgaatggggtcattctatcaatctgggttacttaatcagttaaggcttttttttaatgacattagaggtgtattataaaccctatttgtactagtgtggtaactaattcaattaaaagtgcttttcatctttaagtttatgatttgtttatactttctcaagtttactccaaaatactgcctaaatgcgatagtacaaatatatatgattcactgttttggttttttaatttccttatcacctatcaccactggcttatctccgcaaaaaccgtcaaacgtgactaccccggaagataacccccgaaatttggtgaaccagacaagagaatccatatataaatacgaatattttcaacactaggtctcgtgaaatggggctgaatattaagtgcgggttggttttccactgcaatttgggaaagtgctatggtttaataagaatatacgacctccactgggggttgagtgtgaaaatatttgcacactgcaagtattttcgggggttggacactcccttttgcctccccccaaaaagtggggcacaagagggatgaaagtaacattgataagatgacaaactctacgttgattacattttacaaaaagcaataaggcgagataaattggtcttatctcgggggattacatgacttgtaaggaatgataatgtacgggggccttcggaaacttaaagacataccaaaactgccttaaagttcttcggtttactgaactcaaaaaaccgcacccaaaaatcatgaaacaaccacaaaatggagtatcagatgaccaccaccagttgtaaaagatgcgggtaaagacaacatatataatttaagttaagtaaagttaaggcaattgtgagtaggcaagctgtgtgtgtaggtgggtgtgttgtgtgtgtgttgtgtgtgtggttgtgccgtgtgtgttactcattataacagtaaaaagttaatgctataactaaagtttttctgtgtgtagttacagttacgatactcaaacaatacgtgtaggtgcaaaattatagaaagcattagatatccgggactacaggtgtctcccgttctgaggaacttggcttaccagcagtatgtccgcaacaattgcccaattcaaatttaaagctaactgcccgaaaaatatgagtgcataggtgccaaccgaattgctgttgaccaagagacaggcgcccgtcagcagcggcgcactcacgagcagcccaaaggcgcagattaccggatccgccgtgggataacgcttaaccaggtactgggacaggaacgagcccagcggcacgcccagcaggcccgccaacatggtgatgactccgaagttgaacgcaacactaagggcggggtttggaatttcggggtacattcggttagttatgccaaagcttaagaaccccgacatacacaacaacgttcttatccattgcatggtggtcttaatcatggggaacactagctccaaatggataacaacgctttcgtgcattctgggcattaacaattaaacgagcattgggtggttagggcaagtttttggggtttaacgtagagctcccctttcatgaattgctttcaataatcggctggctggcttttagcatttgattcctgcgctttcattgcttctgcttctgctgctgctgcatcttgtttctaccatcttaccagtaggatgtcggctacaatggaccagcacaggttcagtgccacctgggccacgaaaacgaagaaaaagcagaggctctcgcttgtctgcggcaccacgagagcagcgaagaccatcggagccgagatgaaaagtcccaccgcacagatgtacggatcacagttctcgtagcgacccctcaatcgctgggccagaaaggagcccaacgggactccgatgagtccggccaacatggccaccagaccaaacttgtacgagatgcttgacgacgaatcggaaatcattgtaaggcgcacagctcgatattcgcgggggggatttttggggggctcggtgtcaaaaggttgcgcacaagccccattttcacgattaaattctttagagatattcaagtcatttatggatcaagttcgtgaaaatggggctttggcttgccaagggcgggcacacttactcgtcctggacaatgttctcgttgccgggctgcatcttcatgcctagatagatgaaggaaggtccccaccaggccagtgctccggccacgaaggcaacgcacgtgaatccagccgtggagagcatgaaggaacggttcctgaccaacgccttgatgtcctgcttgtaggtagtggcctccaaattgtgcgatccctcgctgtgaccccgcaccggatccttgatcagcaaaatgaggaaaactgccacaatgcccagaatgggcgtgaccctcagagcccagcgccaatcgttggccaggtgcgctgtcttggatcccacaatgtatctatgtttagagaagaaaacaaagtggtatgaattgatgagaccgatcctgatgaattgactcttggtccgcgctgcattggcggccaattagacgttgcataatttccaatcaacccgcccaattgacccagcactctaattgaattagagagccttcaattgtcggcattccaaaagtaaatcaatttcaatttcaatttacaaaagcatacagtcacgtgtcacttctcacgcttcgccagcagtgggtattgctgattatcaaccgtcctcaaactttggcccccatcgcctgttaccagcagatgataaggcgcattcgtagacggatgataagaacccatcctcccggactgttgatcattgacctggacattggccggcaatgtcaagaggggaacactcaccccagaccggatcccacgggtatggcaaagtagaacagtgccagcatcttggagcgcatgtcgtgcacgaacagatccgagataatcgtcggtgcgatggtactgtacgatgcctcgccgatcccgaccagcgctctgaaggcgatgaaccatccaaactgcttcatgaacgaccccagtagggtggtggtgctccacagacccacgcccaccgccattatccaggggcgggagtaacgatcgcccagatagccgaagatgggggcgcataccatgtacgagataacgaagaccgtctggagaagtccggcactatcattgccaatatcgaaatcatttcggacatctgtgagaactcctggaagatgaaaggatgaaaagcggagattagatccttttcgaaatgtacattttagaaaagtggtatcggtggaaatgtaaatgaacatacagtattatgtattactcttttattggcattatgtattaggaattcgcgtgatgtgtgatatacattgtatacattgtacttcgtacatatcagcccatcctcagcgggagttgttaattgacaaaccatataaatcgttaatacaagcttgctatattcgagtgttttacgtaagtcccaaattgttcagtttagcagggcagatggatgtatctataattagcactccccagtcattggagccccactatgacggcgagaaaattccggaaatgtggcgtatgcttttatgggtcatcatattttccccagagtgccataataaacccatcgatatctattaaagagaagcctatatagatagtaccaactttaattgatcaaagttgatacaacgcccatttttgtcgatatctttgtagtggtaataatatctgcaatcgatagtcaagggtgtgacaatatgttggatctcaatgtcattatttatcttaaaataacattgaaaatgtaaatatatcataatcatgctgtttatagtctcgaatagtaagtactgataagatccgcaactttttatcagctgaaggatagcttttcaattggtaacaatcgaagtgttgaaatatcgaaatatcattatcttactagttatttcgtagctccgataatcaatgtatcgatctgatgaaaatctgtgtcatgatttgaatatcgatcgctgcgatcaccttcgcacacattttctcagctgtgtggtcatgtatttcctgcacgtctcgtcttcagctttgcgacgtttaaaaattcattaacaaacggatgtgcaactagcgaattaattgacaaacgaccttcgtcaataactgttagccgatctaacgctacttcctacattctacatgcagctcaaaataaaaacaaaaaccgctattaagctccgtatttctatgcgtctctcttcgtacattggcctttgcggaatggccaaaataaaataactacctaaagtgcttgagtacccaaaaataaacaacggcccacaaaatcaagtgggcgatgggagagagtgagagtggggaagagaaggagagagagagtgtctgagatcagaagccggcaaatgcagcagcaacaacaatgacacacagaaagctcaacaagttgtgccccaaagaaggagagcgagcgaacgaaaaagagagccgcaaagagacctcaagagagagagagagccgaagctccacgaacccccgcgaaccgaagcgaaacgtggcacgaagcagccaagttgcagtgaatcagcctttgctttttaattattccattttctgggtcttttcgctcatttcgatttgagaaatttatcgtacgatgtttttcgaccaatcagcgtgtttgtttgccttgcctagtgacgtaacggttgggggacgccacgcgataagtctgtgtgcgtgtgtgtgtgtactgcattgcgattgtggactgagagtggctggcggagagaggcggaggggggacacagtggggctggtctgggtgaggcattccttatgatatatacatatgtatatttatattattgctatctcgcacacttaacgagtaatctcattccacgcaaggaattcctaatgtttatgggcacttcttggccaaaaacaaaagaagtcaaaggaatacgtagatacatacatacctccctctcattaccattttccccacttttggggaagtttcgtcaatgtatttagtattagtattcttttttagccggctgccgcatttttagaacctgtttatctctctggccaaattctctctttggtttgttctctcttgtgcccaataaacgcgacagtgggattcgcaatgctaggttttattacaaataatatttggacttccccaaaggtggaactttctggaaaccagacaatgactagtggtatttactaaaagactctgaaatgtatgtacgtttatctcaaaataatttctattacttgagcagtacaaattccagaagtcgaaattttgaagtgttttatttttccaatttcaacgaagcttattactataaaaatgcactgtactgtggccagagaaatctgtagaacgttgatccgtttaaaaagccaatatttataaccaggcaactgcagaagccacaacaacaaagccgggactctcattaccatgaatgaatgaaaaagttgtttgcgtccgaaagtgactgttctcagtcactctctccctctctttcggcacaacagcagtctatctccctctgaccccccatgttctgtggcgtctgatgacgtcggccttgaaaaatcgcgcgatatgcagcgtaagctttaaaatcggacgatgaataaacgacgaatttctgacagatatttcggccacgagtcgaagtcaaaacccaaaaaaaaacgaaaaccaaaaagataaaaactcactgaggctgtgactttcgcttggaatgcatttgaatgcttagcggagcactcgaattgtgtttagagaaaaactttcttgctttcttttcggcgggccaggtggaaattaattgtgaaagcggcggcgcccacagaaaagtgttccccaaccatcgcgttccagacattccctaccccaaccttttttctactattcttcggatagtttttttgcctttcgttaattgaatttgttgcggcaaaaagtgtgcactgcactttgcgtaggtcgttgacccaaaaaacgtatcttgaatgcagaatagaaccattgacgttgaatgagcgcgcaagcctcaaacaaaaatgcaaaatacgctaaggaaatgtgcatttgttacatccacgcgttttgtgtaaccaaagaacctattcaaatttgaggcatacgtaagtaaactatccacaagtttgtgccatatttagaaatatcgtttggacaaatgtttatgcaatggaattgattcagtaaatttcagtgtgagtaatttcactcagttggtggttattttccaagggtattgacaatttcggtttgtcaaggctgcatattttatattttcttttcattgttatttctttccccaactgcgatggcaacaaaatggaaagtttttatgtatctttcgcagaaaaaaaaacatttaaagcgaatatataaaaaaccgaactcagtgacttttgggtttaaacaaatgcaaaatatgcaaaacaaacgttgaaaaatggcaaaaaaaaagtaaaagtgattgcaaaagacttgaaaataactaaaaacagatatatgtatgccaccgaaatctcaactcgatcaattgacatagacaattattgtgatcgcttgctttggatgggggccaagaaaattacgtcggaagcatagcagaacggcaacttggtctatatatctcagcccacatatctgttgaccaaaataaatgccagttctttttgcgatgatcaaagttcgctgtcggtgcagaaattgaatttactgtcaacaacagaatagccccgccccccccttcccatccaccctcacacagatcacgatcatgaatgaagaggggggcttcccagtgttttttttttttttttgaccgaacgaggtggttacaaaacatcacaccactaccgtcagtcggtcggttttagcttaaaaaaccaggcgaatttcagcaaagtcggaggtcgaagccaaaggccgagacgcacttaaaattataattaaatgcattccattaggttgggcagacatcagctgatacacacgtctatgtgcgccaaataaatatatgcatatgtatgcatgtatttttgcttgttatatacaaccacacggaaacgttgcaaatgccgaaattcacattaaatacaaaagggccaagcaatcagagcagtcagttagcagaagctaaacaaataatcgcttggtaatctaatcactgcaaaaaagtgacccaaaacaccacgtgcactgcagctggtgatccaatgcaattgattatgcagcgcgtctggtttcagccacttcttgataaggcccaaaaaagtggggggggggttgataatgataacaatgccactggcagaaatggcaaaacaaaaaccttgtgcgaccgaccattgtttatatgagttttctatttcgccttgcgctcgcagaattctcaaaataaacaatcaattaggcgcccatggaaataatgaaaatttccgagtggcgagtagcgatgtgtgtttatattaaatataatatgtaaacagcgattttgtttggctcggtatgtaagtgctatcgccccttttcggtgagtaattccacttcctgttctgttgcaaaaagtcgtatgatgtttttttagtcactcgatccggtggctttacacgaatcaaaagcttatgatttgcaaccgaaaaaaaagggttgtaagatcgatttccaattgccgctgcggcaatcaactgataactaatagccagtgatttataattgcaaattaattgcaactacacatacagtaaaagacgttatcacatggccttgagtggaaaagttctgctgactcaggaagaactggctgttcaggttcacgaagaaaatgcgaaactatagctataatatacacatatttagaaatgcatattaaacggtcgtctgaggcggacttgtacgtataataatcagtcacaacttgtttcgccatgtaacctgaaacaagtttccaatcgatttgcaccgcgttttgtgtaactaagatgtcgccagtcgaagtgcaagtgcaatcggtagtagtctcattttccagacacaagtaaacagtgaaaagaacttcggcactcaacaagtgtccaatgaaatgccgcccgcatgaattaagatcaatttccttcgctaatgttcttaataataataaactcaacaattatgtgggcagtgtgtctgtatttatcgactgaaacatgagattaccctgtaattgtcacgcgggcgggggactttctgatcgccgatcgcaactaccattacccgccgtgctaagcaggtcaggtgccgccaccgccgtgctcactcactccattttatcgcacctgagtgctagaaataatatacatatgtttaggtttaggcgaaatgggtcttgattgattgcccacccagtggaaatgtcccgagtttcggtgcaaagcgaatcgaatgataaaatgctctgtatgaatatttttggatcgcgtgattcacttgtaagtagattagtcactaatcaaattctctcgctcgcaatctttatggtacattttgtaaacaatgggaacgcgacgactcgcattgtcgacgatgaggtataaatttcaactgattaggtcacaagtattgttgattagcggctgctaattaataacattatgattttgtcagcagattttgtgcaatttaaatgtttttattattcttttgcctgatatataaatgaatacatactataagtgctttgggctgcccaatcttttggtcacacaaaagttgtgatttttacagcggtctatagcaatcttcttcaatagtgtcaacaaattttcctatctactgcggcaacaagccccccaaaaaacgtatggaatcccataggacacccaaagaggtatcaccggactcacctgcgatcgtaaagcgatccatgtagttgatgaggttgacgaagcatagcacggtaacggtgaaccactgcgatctgcccacgctggagagacgcgatggcacgacggcggatggtggtatgcccgggatgtggtggtgctcgcccagtgggtggtggtgatggtggtggggacgcagtcggtgccgctcctcctccatgctgtccgtatccgagggcatcaattgctgtgacgagtaggtcgtaggcagtccgagcggcgatagattggccacatcctcacgactcccgccctcctcagaggagctgctcccactgctaccgctgctctggatcatcgccggattgtccatggcggccgccgttgggagcggttggtaggattgcttctggtgtttcagcgacattcacccgatcactcgatcctctcttctcttctcgcgctctcgctgtcctctttcggttggaaattcgcagcaggcggacaacgcggcaaaaagttatttgcacacgctctttgctcacgcacacagagaaacgggaactcgcgatgaaagcggttcaaaagcgaatgcaaaagaatttgctcttgggctgttggcacaccaccgcgcttctcttttataacacttttgccaatttgtatggctaattcgactgtgtactgagacacttcctctaatcgcggttgttctttaaatgcagccaatgcatttgcagtgcttctcgctgtttttctttcttgtttcttccgcgacgcgaacactgttgcctttccaactggagtaagtgcaataagtgtgaccgtccggcgaccgcgaatatataccagaatccaattggcgatgacaatttcgatagtactatcgataaactaagaccagctgcatatctatcgactaatatcggtatagctatgcctatcgataaaaaacatttaaagcaatttttaataaatatttttacatttaatacaaaaacatgaacaagaatctatattaacaagctaagttgcgctctgttaattaaagaatttttattttgccataatattctgagcattacagatagtgtaccacttatctctagaaaactgttgacaaccgaatttgaattcaaatttaagcgatgattttttggttatgattgtgatgattaaaatctaagtgcgttacgaaggtatatgcgaatgaaaaagaacgatttctattcaatatccatatcatctacgcgcccgcgaacgcgattcttgcgcttgtgttttttagtgggcggtggcaggaaactctcaagaaactcaatggtattcaaaatcgtttccgaactgacgtttccaatgtagttcttgtcgaagtagacgaccggtacaggtggctccgttgagagcaacaatttgtcacaattacaacgctgtccctgaatttttgcatcgagcgtttccacttcaacatctgtgttatttgatttgtctggaaagaggtgcctaaataggtcaatctatgtctgaactccataaagagttgccacccaccgaataagggacgaaagcactccttcacctgaatccacttggtgcaaaactgtttgatgaaactgtcgttctgattgaagaaactgcgagctgcattgtcaacccggtatttcatgaatccaggcacatatggccatttgcccttcgcggcataaaagcatatgatgtctgaaatgtaaaaatttaagcgatttgtaattctgctagccttaataaaagtattcatatgcttgaggagataaaaattt

SEQ ID NO: 12836 - DNA, 2102 bp, DROSOPHILA
tggaaaggcaacagtgttcgcgtcgcggaagaaacaagaaagaaaaacagcgagaagcactgcaaatgcattggctgcatttaaagaacaaccgcgattagaggaagtgtctcagtacacagtcgaattagccatacaaattggcaaaagtgttataaaagagaagcgcggtggtgtgccaacagcccaagagcaaattcttttgcattcgcttttgaaccgctttcatcgcgagttcccgtttctctgtgtgcgtgagcaaagagcgtgtgcaaataactttttgccgcgttgtccgcctgctgcgaatttccaaccgaaagaggacagcgagagcgcgagaagagaagagaggatcgagtgatcgggtgaatgtcgctgaaacaccagaagcaatcctaccaaccgctcccaacggcggccgccatggacaatccggcgatgatccagagcagcggtagcagtgggagcagctcctctgaggagggcgggagtcgtgaggatgtggccaatctatcgccgctcggactgcctacgacctactcgtcacagcaattgatgccctcggatacggacagcatggaggaggagcggcaccgactgcgtccccaccaccatcaccaccacccactgggcgagcaccaccacatcccgggcataccaccatccgccgtcgtgccatcgcgtctctccagcgtgggcagatcgcagtggttcaccgttaccgtgctatgcttcgtcaacctcatcaactacatggatcgctttacgatcgcaggagttctcacagatgtccgaaatgatttcgatattggcaatgatagtgccggacttctccagacggtcttcgttatctcgtacatggtatgcgcccccatcttcggctatctgggcgatcgttactcccgcccctggataatggcggtgggcgtgggtctgtggagcaccaccaccctactggggtcgttcatgaagcagtttggatggttcatcgccttcagagcgctggtcgggatcggcgaggcatcgtacagtaccatcgcaccgacgattatctcggatctgttcgtgcacgacatgcgctccaagatgctggcactgttctactttgccatacccgtgggatccggtctgggatacattgtgggatccaagacagcgcacctggccaacgattggcgctgggctctgagggtcacgcccattctgggcattgtggcagttttcctcattttgctgatcaaggatccggtgcggggtcacagcgagggatcgcacaatttggaggccactacctacaagcaggacatcaaggcgttggtcaggaaccgttccttcatgctctccacggctggattcacgtgcgttgccttcgtggccggagcactggcctggtggggaccttccttcatctatctaggcatgaagatgcagcccggcaacgagaacattgtccaggacgacatctcgtacaagtttggtctggtggccatgttggccggactcatcggagtcccgttgggctcctttctggcccagcgattgaggggtcgctacgagaactgtgatccgtacatctgtgcggtgggacttttcatctcggctccgatggtcttcgctgctctcgtggtgccgcagacaagcgagagcctctgctttttcttcgttttcgtggcccaggtggcactgaacctgtgctggtccattgtagccgacatcctactggtaagatgtgttgcgttcaacttcggagtcatcaccatgttggcgggcctgctgggcgtgccgctgggctcgttcctgtcccagtacctggttaagcgttatcccacggcggatccggtaatctgcgcctttgggctgctcgtgagtgcgccgctgctgacgggcgcctgtctcttggtcaacagcaattcggttggcacctatgcactcatatttttcgggcagttagctttaaatttgaattgggcaattgttgcggacatactgctggtaagccaagttcctcagaacgggagacacctgtagtcccggatatctaatgctttctataattttgcacctacacgtattgtttgagtatcgtaactgtaactaca

SEQ ID NO: 12837 - protein, 552 aa, DROSOPHILA
MSLKHQKQSYQPLPTAAAMDNPAMIQSSGSSGSSSSEEGGSREDVANLSPLGLPTTYSSQQLMPSDTDSMEEERHRLRPHHHHHHPLGEHHHIPGIPPSAVVPSRLSSVGRSQWFTVTVLCFVNLINYMDRFTIAGVLTDVRNDFDIGNDSAGLLQTVFVISYMVCAPIFGYLGDRYSRPWIMAVGVGLWSTTTLLGSFMKQFGWFIAFRALVGIGEASYSTIAPTIISDLFVHDMRSKMLALFYFAIPVGSGLGYIVGSKTAHLANDWRWALRVTPILGIVAVFLILLIKDPVRGHSEGSHNLEATTYKQDIKALVRNRSFMLSTAGFTCVAFVAGALAWWGPSFIYLGMKMQPGNENIVQDDISYKFGLVAMLAGLIGVPLGSFLAQRLRGRYENCDPYICAVGLFISAPMVFAALVVPQTSESLCFFFVFVAQVALNLCWSIVADILLVRCVAFNFGVITMLAGLLGVPLGSFLSQYLVKRYPTADPVICAFGLLVSAPLLTGACLLVNSNSVGTYALIFFGQLALNLNWAIVADILLVSQVPQNGRHL

SEQ ID NO: 12838 - DNA, 3134 bp, DROSOPHILA
gtggcaaggccaaggacttcagtccgcgcgctcgattccgcagctggctggggtgagtatactccagacggaagatctcacctgaattaatgttcgaattgtcttacagatacgagctgccattcgataggcatgactggatagtcgatcgctgcggcaaggatgtgcgctacgtcatcgactactacgacggtggactggtggacaaagactaccgctttgccctgctggatgtgcgcccagccatggactccgtggacaacgtttgggacagaatgcgcgtagcttacatgcgctggaagtacgagctgtttgagaagtttggcagcgcggatggcggcaaagtgaccgctggtagcgactagatggaatgcatatttagatgatcgctataggtacaaaatcggcttaagttatcgaatggatggaagagggagtttggttaaatgcgtttaagacgctgcgaagcgaaacgatgttgagccctctctttaaataaatgttgaatcttgacttctgaacaccaaaattcgaatgtggttttgctttttattttattctttacttaaatccttttaaggatttcgaattatccagtaacgagttgatagcattgtggaggaatatattaattaaagtttttttttattgatatacttatgtatatgcagaattctcatctgttcaaaatgcctgtaaaaattttttttcttaatctttagttttatattttatttatatgctctttaaaatgattgcgaaattataaaaatacgtttactacttttttatcattactacaaatttaaaaaatgtatagtaaatagaatataactttagacgtttcttaacttttttaacatacattttctgataaaaagttgatatgcaacccataacattatatgtatgtttatatgtatgatgcttttctaacacctgcggcttcagggggttaatgtctggcagtgttgaaaagcgcgtgtaaattctttaactgattgctggtgccctcattacgtgagattcgagtttggccactggagcgttaattggatagccgcgatagattcgttcgacgtaaatcagtcataaatgcaagctgccagaatgaggttcgttcaatacctgcgaaaaggtgacttggccaagcgacttggtctactgtccgaggatcaaaagtcgctggtggaatttgccggcttggagggtgtgcccagcgatctaaagatcctgattgcccaggatcccaatctggaggaactggcgaagaaggccgaaaagcagccgcgactcgaggtgaatgatgatgtcactttgctgccgcctcttaccgatcccggcaagatcatctgcattggtaaagaatgaattaacatacatatgtataaacatatgtagttggaccctgaccttcaaaatgacgtattctcgatctgcttgcaggtctgaactaccaggaccactgcgatgagcagaacaagccgacccccaaggaaccattgttctttagcaagtttaacaatgccctggtgggtcctcaagataatgtcatcgctcatgcggccagcagcgtaagtgaagcaagagataacaagagataggctcatcgagataaccaaccgaccaaaaaaaaattccacagaaaatcgattgggaggttgagctggtctgtgtcattggcaaggtcgcccgccaggtgcccaaatcgcaggccatggactatgtcttcgggtattcggtggcccaggatatctccgcccgcgactggcagaaggaacgcaacggtggtcagttccttatgggcaagtcgatggacacttttctgccgctgggaccggctgtggtgcacaagagtctggtgccggatgtttacaacttgaatctgaaaacctgggtcaacggcgtggagaagcagaacggcaataccggcaacttgatcttcaagctggacgatgtgatcaatcgtctgtcgcagaccattaccctgctgcccggcgacatcatagtcaccggaacgcccaagggcgtgggcatgcatcgcactccgccggaattccttcagcccggtgatgtcgtgcagtcggagattgttggattgggcaagctgtgcaacaagattgtggctccctaagattgtcaactcatttggcttgttgtgtttgtaaagtttgtgttattagtgaaacaatggcatttaatagatgattttgtagttttcaatagataaactataatcagatattttggttttgtttaattcaagtatgtagtatctttgattagccaggtcacaccttaaaggtctttgactgtgtggcgtagtactcgttgcggctgtgatagggcttatagggatcgttgatgaaatgctttgggcgccgccaatagctggtgaccatcttgtccagcagccagctctgcgtggcattggtgaagacgtgctgcttgaggcggcgtcgtaaagctgcggatttcttgaagagcttcttttggcgaccggaatgggtgcgtatccaggcgccccagtccaggcgcttaaaacgtttcagtaccgccttgacggtctttcgtttacccttcaccagcgagaatttggtcacgttgcgtgtgtttgatggtgttcctgtggctgctagcacacccggcagctgcaggagctggtgatgagcaggagatgccagtgatggcgtgggcaacaggcacggacgggatagagtcatcaaagtggcacgttgtgtccgctggaccagaggaaccaacgaagatgcagccggcgactggcggcaaacgcttcgcagcgctgaaagttaagaacaattaaagtaacgtaaacttgtaagccctattagctgacttcaacttaccgcttgtcacaaaagttcttagcatttcacttaaaacgacaaagataaacctataattccatacaaaacgcaggtgctcttcttcttatcgaatcgcgtaacagtcagctgtgtgccattcacagcgaacaaacatagattagcttgctattggagatgggaaccggtcatcataagaactatcgcaaatgttttgggattcacccaaggaatggatcaagttcaatttttcgttgataacaattaaggcaaaaggatcccttaacc

SEQ ID NO: 12839 - DNA, 977 bp, DROSOPHILA
attgctggtgccctcattacgtgagattcgagtttggccactggagcgttaattggatagccgcgatagattcgttcgacgtaaatcagtcataaatgcaagctgccagaatgaggttcgttcaatacctgcgaaaaggtgacttggccaagcgacttggtctactgtccgaggatcaaaagtcgctggtggaatttgccggcttggagggtgtgcccagcgatctaaagatcctgattgcccaggatcccaatctggaggaactggcgaagaaggccgaaaagcagccgcgactcgaggtgaatgatgatgtcactttgctgccgcctcttaccgatcccggcaagatcatctgcattggtctgaactaccaggaccactgcgatgagcagaacaagccgacccccaaggaaccattgttctttagcaagtttaacaatgccctggtgggtcctcaagataatgtcatcgctcatgcggccagcagcaaaatcgattgggaggttgagctggtctgtgtcattggcaaggtcgcccgccaggtgcccaaatcgcaggccatggactatgtcttcgggtattcggtggcccaggatatctccgcccgcgactggcagaaggaacgcaacggtggtcagttccttatgggcaagtcgatggacacttttctgccgctgggaccggctgtggtgcacaagagtctggtgccggatgtttacaacttgaatctgaaaacctgggtcaacggcgtggagaagcagaacggcaataccggcaacttgatcttcaagctggacgatgtgatcaatcgtctgtcgcagaccattaccctgctgcccggcgacatcatagtcaccggaacgcccaagggcgtgggcatgcatcgcactccgccggaattccttcagcccggtgatgtcgtgcagtcggagattgttggattgggcaagctgtgcaacaagattgtggctccctaa

SEQ ID NO: 12840 - protein, 288 aa, DROSOPHILA
MRFVQYLRKGDLAKRLGLLSEDQKSLVEFAGLEGVPSDLKILIAQDPNLEELAKKAEKQPRLEVNDDVTLLPPLTDPGKIICIGLNYQDHCDEQNKPTPKEPLFFSKFNNALVGPQDNVIAHAASSKIDWEVELVCVIGKVARQVPKSQAMDYVFGYSVAQDISARDWQKERNGGQFLMGKSMDTFLPLGPAVVHKSLVPDVYNLNLKTWVNGVEKQNGNTGNLIFKLDDVINRLSQTITLLPGDIIVTGTPKGVGMHRTPPEFLQPGDVVQSEIVGLGKLCNKIVAP

SEQ ID NO: 12841 - DNA, 3413 bp, DROSOPHILA
tactagtacatttatttacataaattggatatacctttgagaaacctgagatacgtggtgaatcaaacaaagtttctcataccttttccatttagaagtaccactcccttctccaaagtgtggcggaaactgccccttcttctcgagaactttatatcaacttgactcaaaactaaaacggaaagcagattacaacgcagaacgtggctgataaggatcgattgtgcacattccaaaaccaggtggtattacacgatcgctaagatttatagtgctgtaacacaaccctcggttgagctacctacttaagtcgaatcataatcgcagcgacagatagagttctatagttatactatatactatcctatactatactctcgattgcccaactgcaactggactcattgaccttgtcggggggttttttaagagccacatcgcttgataagtcaaactggatttacttacggagtataccgatccatatgcagtcacggactccattccttgagtccctgaccgtctggtggcataaagattaccgatatcgcgtggtcactcccattcatcgagctagtgaaatcaagtttcttttctgcgccgtaaactatttttagttaactaacaacaaattcgctgataactgagcaatcgaggattatatggtcagtatgctgaactgggggctataataatcttgaaaccgcctagaagtagactatagttttgtgcaacgaatggttgtagtatccgataaatgtggtctatgaaaattagctatgtacaataagggatccatcctaataataattatatctaaattatattatgtatacactatcaaaagatacacacagaggacacagatatatctagagtacttctaataaaaaccccttgttatcaggttaatactaatatcgttttttataaatacccaaataaattttaaaaacacatgtttagttcttaggttaaataggtttttattcaaatatttttagaactgcgtagccattagtctcagagcgagtattccgggcagaagaagagtcagacttccggccacggcggccatggcaccaccaccatcaccacttccatcttcgtcgtcaccacttccgtcatcaccactaccttcaccacttccttcaccacttccctcaccacttccctcaccacttccctcaccactttcttcaccacttccttcaccattctcgcccatattctgtagtatccagtcgtagtagtaggacacctctgtgtacacacccggtaatctgggcagggcacattgaatgccccaggaaaccacgccggccaattcactttggcacaccaatggtccgccggaatcgccggcgcaggcatccttttctcccacctccaaataaccggcacatatcattcccggctgaatcaggtggcccaggtcgctgtcattgatgcaatgctcctcgctgatcatcggcacatcgacggtcatcaggatgtcggagacatagccatcctccgtattgccccagcccgtcacctggcagacgacgccctccggtatggcaaaccgattgagggcaattggacgaatggtcggatgtccagtgggtacagtaccattcagcatcagcagggcgatgtccttgtcgtaggtggaaaggtcgaacttatccagctgcattatgcgctcttcgatcgtgaatgttagcgtgttggtgcgattgtagcgatccaggttacccatcaccacgatgaactcctccttgggcacgaaagtgccgtcgtaaataatctgactggtaagcaaaagttaatgataagaacgaatagttagttaaattgcatgttaattctaatgaaattcaaagaaatttttaagtctaatctctaagctaaaaggttaccccaaagccacatttctgcatcccttgaacaattgaatgtggattccaaacttttccacctcttcgactgatttgcatttgaatttcacattattttagggcacattctcaatgagtagcccaaaatagttagaaatagacccacttactccacaaagcaatgggcggcggtgagtacccatcccggccggatgagagatcctccgcaaaggtgcccggttccaaagaagtagccatcgttgagagccttgcgaatgcccacctgatgcctagttgcgcccagagaggcctctgttccattgataatcctgccgggatccgcattgaatctcggacggatggccttcgtgtccaagtgtgttcgtgtcgttgcgcctgatttaaaaccaaataaggttttcaattaggaaatattccatcatttaataaatctcccacaaacctctcaagcccgatggcaagaaaatgagaagaagggctaccgccaaaagttgtcccaatccgaacattctgccaatctatatgctaactcctcgacgtggcggtaccaactaatgaaggagccgagcccagttgtccaatatcgccgccaaaataaaaatctggcatcctaatctaatcaatagacatcgtacaattcaatagaacaccacaaaaaacaccggactgatttgtcatcgccggagaaccgaagacctccgtccgggtgtgacgaactgcagccttagtttgaagtgccaccgctggattttccacgcgaccaatctttgggtttaccacaccgatttatgagccccttgaaaaacggtagttccccagtggatttcctgaaaagtttgcccaaaactaattaaatgcgatctgtgtatcttgtcaagatctttggagtctttctggctaatacaaatttacataaattgtttttttttttttttttaaacacaactttacctttatgtattcaattattcatatatatagcaattatttatttatatatttattatattttttctttaacgtggttcaacgatcttgtatatcagacaataactccccccaatcatttgtcatccaaatttcctaataattctcaaatcagtccccatatatcttcgatcttaattgcgaaatgagggtccagtgtgcttttttaattaagatataacatgaactcaaggcgtcatgtgcaaacaatattgactattcaagccaacttcgggtaacttgttaaataaacaatttaaggcaactcaaaaactacaaaacgtaccaatcgaatgttactcattcatgaatttgggtcattatcaattaacatttatttatcttgttccaataaattctatttgcatgaccataaaaaccatataaaaacataaactatcggaaaatggggattggctcaatttattggctacatttgccgtgtatattattgatggtatttgaaaaaggcaaatagcacatacaatacattctagctataattacaatagattccaatgt

SEQ ID NO: 12842 - DNA, 1089 bp, DROSOPHILA
atgttcggattgggacaacttttggcggtagcccttcttctcattttcttgccatcgggcttgagaggcgcaacgacacgaacacacttggacacgaaggccatccgtccgagattcaatgcggatcccggcaggattatcaatggaacagaggcctctctgggcgcaactaggcatcaggtgggcattcgcaaggctctcaacgatggctacttctttggaaccgggcacctttgcggaggatctctcatccggccgggatgggtactcaccgccgcccattgctttgtggatcagattatttacgacggcactttcgtgcccaaggaggagttcatcgtggtgatgggtaacctggatcgctacaatcgcaccaacacgctaacattcacgatcgaagagcgcataatgcagctggataagttcgacctttccacctacgacaaggacatcgccctgctgatgctgaatggtactgtacccactggacatccgaccattcgtccaattgccctcaatcggtttgccataccggagggcgtcgtctgccaggtgacgggctggggcaatacggaggatggctatgtctccgacatcctgatgaccgtcgatgtgccgatgatcagcgaggagcattgcatcaatgacagcgacctgggccacctgattcagccgggaatgatatgtgccggttatttggaggtgggagaaaaggatgcctgcgccggcgattccggcggaccattggtgtgccaaagtgaattggccggcgtggtttcctggggcattcaatgtgccctgcccagattaccgggtgtgtacacagaggtgtcctactactacgactggatactacagaatatgggcgagaatggtgaaggaagtggtgaagaaagtggtgagggaagtggtgagggaagtggtgagggaagtggtgaaggaagtggtgaaggtagtggtgatgacggaagtggtgacgacgaagatggaagtggtgatggtggtggtgccatggccgccgtggccggaagtctgactcttcttctgcccggaatactcgctctgagactaatggctacgcagttctaa

SEQ ID NO: 12843 - protein, 362 aa, DROSOPHILA
MFGLGQLLAVALLLIFLPSGLRGATTRTHLDTKAIRPRFNADPGRIINGTEASLGATRHQVGIRKALNDGYFFGTGHLCGGSLIRPGWVLTAAHCFVDQIIYDGTFVPKEEFIVVMGNLDRYNRTNTLTFTIEERIMQLDKFDLSTYDKDIALLMLNGTVPTGHPTIRPIALNRFAIPEGVVCQVTGWGNTEDGYVSDILMTVDVPMISEEHCINDSDLGHLIQPGMICAGYLEVGEKDACAGDSGGPLVCQSELAGVVSWGIQCALPRLPGVYTEVSYYYDWILQNMGENGEGSGEESGEGSGEGSGEGSGEGSGEGSGDDGSGDDEDGSGDGGGAMAAVAGSLTLLLPGILALRLMATQF

SEQ ID NO: 12844 - DNA, 16962 bp, DROSOPHILA
gacaggtggtccagtcagcaacttgtaaatgtaaaatgctagcgctaaaaatgaaaatcgtctaaacgtctgatgaaaaatgatttgctaattccccagcatcgctctttttcccttctttagaagacatacataaatttacatatacacactgactgtttttttagcggccgttttgtgttatttattttccaagcatatgtgatttataatgatttatcataagatttggccagaaggcgcgaccaaaacgaccaaatggaatcattcacattgtgtcggagcacttttgtttgtttctttggagccaactctttaatggtggaatgcagtttcttattttctgctttaccactcaataaataaaaaaaaactataaaatttaaatttcactcaatatcttgccaaaacattacaaaactatgaacattgagaaatgtgtcccaattcgatcaataaaagtgcactgccgatcaaaatctgagaatcagccaagtgtgagatgtgggagtatcaataatttatttaagtgcattgcgcattaactcgccgatgatcggccctgggtgtaaatacattattagaattattgtgtggatcggaaaagaggaaaacaataagtacgaacgtccgcgggctttctcaacttttagatttctttcatttaaataaactcaaaattcacagaattttccgagcagacgcactttacacatgctcacatgtgtacgcacacaatcgcattgtgaccactacaatcgcactgatatggacacggacatgaccgatggtcgaatagaatatgtactgaagacgaaggagcatttatttcgaaatgtgaaatgtgcttttcggcttttcggccgagaaaatttcgtgtgcgaattcagtgcgacttgggctgctaacttgaacgcgttgcaaacgagaaaaccatccgaaataaagaaattttcaactagaaactaacacatagatatatctataccatctagctgggctgtctatatatacgaatatatatagatatagatacgagtattttctctagcaaaagtgagcaatgcgtcgtgccgcgttttataaatagcaaattacaaaatatcgaaacgaacgttggtgaaaagggtttcatagttttaaaaacagtgcaaaaccctaagttcttagcgaaactaacttatctgtatatatgaaaatcaacacgatattgaacacaatatagtatatgtatatgtatataattgtgggaaaaactatttccgagtggatcgcttgtgtccgtgccgcaaattatataagaacgcgtgatttttgatgcaaaataattttcggcttaatattcataatttaataataattttccataaatttttcagtgtttttgtgtgcataggcgtcgtttgcaaaatcttttcgtagaacttgcgtgcgttttggtgaaaaccaacgcctacgaccaaatctaaatatcgcgatttcttccgactggcggctgtgtgtaggcggtgtgtaaaagtgttctgaagttgaacttgaaatacataaaaagcggctaaaatgagttctgggtaagaacaaaaacgtggtgcaaattaaagttactttagtgcaacagtaatcttttaagcaaaaagaaactgtctaatagtcataagctattttaaactacacccgatttctaccggggaaagtcaaaaaaaaagaacaaaacataaaacagatgtacttaaaacagaatttaatatatggccgctgacttcgtaatactgcgaaaaaaaaatagttcaatcgaaagtttcataatttttctactgctgactatttcaatagaacggcaaaacaagggaaagattatgtagaattatgaaaaatattttaaaacgcttttattggcttgtgttcttttaaaagttggctttatgagaagtctttttaggcactttatgcgtcttttgctcaccactattattctgaccacagctgtatgggcctatacgtatatatctatagtctgaacatctttatgatctccgctacaattaaggctcacacatgagttttttgaaggccatcgatggcccacgcccacactagaatctctttattatttttttttttttggctagtcccatgttgcacgcgctttttggcaggcgacactttcggtgttttcccctgctttcctaagcgaattaattaattaaatttcccatttttcaacaacatctcgctggtgcacagttttgtgtcttagacacggccagcagctgtcttttggctttgtctagaagcaattggcacacgtgttgggtatttagacggctgacggcattcaccggaagtttccttcgaagccacgcacatcataaaacacattctcaagagcctttcacagcaaaaaagccaggaatttggcataaaatgcatttgttttatttatttttttcccgttcctcagacagcacattttttttgcatttcgccgttgacgttgatgtgtggcgcataaattttcagctcccacggaaatctgcgataatatattgacaaaattgggtcaagcattagaagaaaaaaataagaagcactaggacctctattcgatattaaatttcagattttcataattttcattgtttatattctactttctgaagtttagacaaattccatcgtcaaactttcggcaaagcatcaagtatacgccacgtttaacatataaatgaaatatatatcttgtaatatcttgactataggtacttacaaaatttacgtgtgaacttgggacaaatattgaccatgtacatggttttaaagtgttaatgtttattttagcttaaattattattcgcattttaatgcccgagactgtgatgcattgccgaacatgactttgatttttgtcaacgacaattattttcacacttctttgtcggtttatttttcacttttgttgattgcgtaaatcaggtgtgagtttatttattttataaatttttgcatttgtaaaatacgtaaacagatttcttgtcccaagttcaagttggtcgcagttgaccgtgaaatttgtatgcgaaatagggtactaaactcaaaggaagattcccaagtggataaggcacaagatataaagccacacccagatgacagttcaacagcattgggaattgattattggacagcgatgtgaatgtacctagatcgttcccatgatagttgattcaatgattcactttgcctttatgacttctcttcagcaatacactctgaattaaaattaattaagggaaagttcacaattaattcgcagtcaaacgtaaagaacaatttctgcaatttaattatttattgaattatgcttacgtttaaatttacattttgttttggggaattttataagaactattgctcagatttttccatgatttttactatttatttgttttcccggaaaatggctttgctgtgcgtgatttattccttcacactttctccacaaacaaatatcgaattttcatggcgcggctatatttaatttttttttttcattttttacaaatcaataacatggcaatttttcaaccagcaccaaattcgagctgcaggaaaaaagttaaaaatcgaaaaaaaaggcgctggcgggatttggttgcctatctgaccaaaaacgaccgacggtgaatgacgacatgtggtcatggtaggaaaaatacacagaaattcgcgtttgtatgcgcatatattccgcaaggcaactgaatgagaaatattaccgccatcgattgtgcaacgggcttttggggcagagtctgcgttttcgctttcacctgggttcgctgacgttgacccaggccagattaatataaataattgcgagtaccgacaagagccagacccactcccaatcccaatcccaatcccaatcgcaaacccaacggctccctgtctgatgtgctcatgtcatgcaatcaacgcagctaaatgacaaatgcaaaacgagttgcacactcaagtggccgtagaaagtgatgaatggcttccctgattgcgtttgtttttctttgatttttgtttttttttttcgtacgtaaaacttttttcgccgccgttcagataatttttcaaggtcagatacaacaaaaaaaaagccagaaatattatagttttatacacgcttgtgtcttctgggctgtgggtgttgttggtgaaacgctaatttttattggattatccatctttgtttttccttttacttttccgtgagagatcgtttcgtatttaatggggtataaattttctttcgttttatgtttgcaaaattaagtttcttataaatagcatcgcatctgtgtgtttgtaggtgtttatgtttcttgcgtttctttaatttctatatagtttcggataatttatgagattaaccgctagacctaaaggcgttgatctaagcatttgcttatgttttatactttgctaaaaaatacatttattttaatgtttagctatattgtttataaaatcgttttaaaaagctattgcatttaagaacctactgcaactaagtgggtcacaaaatgaaacgaaagtgaaaagagaaaatcaaacgaaattgtttttttcaaaaagagcacagcaacatttaacacataattaaaaatcccattcttcacggtcagaagaaatgactctagtattttccgcaatcagaggcctgtggctaactaattagatggcccccatgattgatgtctgcacaaaaccaaatatctctgtctgacccagtttctggccagccaaagcagaaatattgaatgaatagggaaaccaatttcactgacagttctttgaggaacgaatattattgacagccactcgaatttcaagtgtgcgtcaattggcggcgcagcacttaagtgtttattgaaccaaatgagtcactcgtccggacaccttttgctaggcgtccacttggaagggatcgggctcgccgtgtagcacgatcttgacgaagatcctacgctgctctccggagaggcacagctcccgaatgtcggtggccgtgtacaggaggtagtccgtgttgcaatacagccgattctgactatccatcaatggactgtccagggaattgcgcaggcaacgccatccgcgcttctcgtgggcatggaatccgtcgaggagtgttacattggcactcaccagactggagggcacagcactcaccaggtataagatgtaggcctgctcggtgttcagaataggagggctcacatagagcatcaggataatgggcagatggtggacaatctgcagatccgaagtaacagcacaactaagacccggctttggggctccctcataggcgatgactccaatcgaatgatttcgacccggtgtcaatttatcaatatccacttcgtactgcttgggcacgtcctcagcaatctcgatcatcgagtcctgcggactgtgccgcatcatcagatgggccagcatctcgagtggcgacatctgcgcctggcaattggtcactggacacatagccggaattccatagagggcctccagattcaaattggcgaatcgttggtacttggggttgagattttatggaacggtcagttcacgcggcttttcttgcatttgttttaacttaccatagtttctgaactggataaatggtatttctccaagtattcgttaagaaattaaactgagaaatctggtaatgtctatgaaatgtcagtgacttgaaaggaaacgcttggctaatcatatttcctaaaaagtgactttagcttttaagggaatttatggagttgattatattatccaatactaaaaatacattcattatatacttatttacagtcaactgctcgatattccaaaatgtcgatatggttcagttaaattattaaagctacacaaaaatacttttcttgctcatggttaaaactatataatgggatcaaatgaaagtagatgaccagaactatccacaataatcgtttgccgatgttgtctcttgactttccccttctttgtggcattttaagttttttacttcgtacaaattgtggatgtcgagcgacaaaagaaaatgattttagcccagtcattccgcgttttaaattccttaacgctttcttgccaattattatttaactgtgcacaaagcagtcgcaaaaaatgaaaataagactgaaagaaaaaaacagcagaaaagataacatcttatttgtctgtcaaggctagtgggccacatttccgcagatgattgttcaaatgagttaattagagcaagccgagtgcgcagattcgataaagaaatcccccgaactaaagataatgccgaagtgggagatacccgttctttcgatttggcttaatcgtgaaaagcgacagaagtaataagcagacgacatgacagtagagtgaaaacaattagtagcacgataagagatgcagatacagccgaaagataccagatacagataaacgaaagcgtcgcaaagtctttttggcgtttagctggaaatttgtcgccatcatcgaactgcattgacagacaaataaattgctatacagtccgcgtgccagtcggccgtttgtcaagcgatcgattttccttttgcggcaccaccaataccatcaaagcgactggaaatgtatctgcaacaagttgccgaacaagccaactcagatgtgccgtccaacctccggcgaaccgaacccgacttcaatgcgtctcgagagtccgctgcgatcagtcgcccagtgcgctcctcagatacagataaaaaaaacgaacctacgagatactttttgtgcgcagcgcgtgtgttttcaatttaataattagtgagtgagtgagtgattaaagtcggatactaacagaaaggccgggcaaatgccatcttaattcggagcaactttagctcatgcctaaaaataattcaactgcgtaagcgtatctctgcgagacggaaaacggctggtccacatagtagtgattctgttataggttcccccaaaaatttcagtgattcttctccgccgatgtgagtcagcagaccatttgtcggctgccccttgtcaaaaaaggttaaattcaattcccacaatcgatggttgagtcattcgaccacctaggctccaatacagcacctttgtttgcatgtcccctgatcggccaaatgtaaatcgattgtacaacccattgtacttggctgcttgaattgtaactctttgttctgcgcacatttactgataagcgcacttgcaacctggcaaatgggttgcaaatattttcatttcaattgtttaacttctaaagcgattcaaaacagatctggacagcaaagaaagcagaaggaactacggcgtagccctaatagttttatatatgatgtggaaaaaatttgctttgggctttctttaaacccacttgcttgtacccattcgcagatagaggtccgctttaaagatagtcgacccactttcgtgctatgcaagtgtaaaagcaaaattcagataaaatagtgtacaacaaaaataaattagtataaaagtattaaaacaagtaaacaagagtccgcgagcaatggccacctcaacgctgcaatctccgtcgccgtcgccatcaaacgcctccgtgtcatccaagaatccgcagctgaagcgcgtagtgtactccaaatatcgggaactacttggttcttataatgataaggccaatgccatcatcgacactctgcccgcatatatggttcgtcaggatcgcggatttcagttgtcggagctgcccgtgaacggggatgccaatcgcaacggcctggaattgtcgtaagtccgctacgagtatatctatatatttgtatttatataaatatatagctaaattttctaaagctaaaatgccagagcaagagcaatttccaagtaaatatttatcgctagattagctcaactgcggaatgtgggcggctggagggagcaccctgtacgaacgatcttccgatctccgacttcagagccaagctatttatagccaagacgggcggacaatgactatcattatgtcatgttgcatgtggcagctttcaagttcttacttcttcttctacttctgctggctgcccttgatcttgaaatatgcgcggccagctgcaactgcagattcttctaggcaactagtttgcttttactagagggtagtaggggatatgatggaactggactaaaaagaatcaaaaatataaattcaataaataaattgaataaattaaacgttatattaaatgtatgatcacataatgcacaatatatacataataatattaatccaaataacacaataagctctcgtataaacatctcataaacaaaatatggctatataagggataccaactagttcatcaatccggtttccagtgctttccagaagacatcacccgtatcttgtggatccacccggttgccagttagttgcaaatgcctttagatacatttctgcacgctcatttgcatgcgaaaaggcaaaataaaagtcaagcacacaacaacaaattagaaaagtgaaaatgcgaattgcacagatgtttttctatcatttaaatttgaaattgtgattgcttgtgttattattgcatgtttttaactcacgcatgaacagctgcgactattttacatgtatttttggcaaatcataaagcccagtcattagtcggtaaaatggatttacatttatttttagaaatgtatgtttacttaaggctaagtgcatgtgcaacgcatatgcatatgattcacaaagaatatgtgcatgcttgtgccagtaaattagtcatgttgcattatgattataggcgaactttgtatgccagtttattggttatttcttcccggttccttgaaactttttcctggtgctctgacattttaattgccaaatctgtcagtggctagcaaacagttggtggtcttgtcttgtggtcaattgcttcttatccgcagccccaagtaccaagtactgacgccatgtccccgccaattgacgtcatcaggggacatctgtgatttcagcgcgtgtatcttttagtttttaacgattcttttgtttttcgaaaattttggcaacgcattttttagttcactgtgcgtgacgatcattggaattgagaacaatgaatgggtatttacattgctttcgttggttcaggaaatgtttagtgcattaagctgacatttttccaggcttgtcacggtgtttaataacttttatagcccagcccaatatggcagcggtcgaatgtttcatacagaaaaaacagttaacaaaacggttgtgtaagttgcatttcctatccggccataaagcatcgatcgaccgatcgagtcaataaacggggaatagaccgatctgaactgaacgacctcacaattttgggcacgcctcgacaattatggaagctgttgatgctattaattcgcacataatcaatggcaagttcaacaaaaagttgatgcccaacctgactgggcatatgtatccatagtttattatatccaccatgccatgtctataaggagctgacagcatttcttcgaccatcccaaatatgggaataattaaagatttgttttgttgcgactcgattcgatttaaatacgattttctgtcactaaccgcagggagttacgtcatttgcatttgactttgatgcacgcgctccaatttgcatgtaagccagttgtgggtgagtttcgcaaccgttttcccacacaacttggccttcgcatttgcggtttccagagtagggtgccttgtttacttagttttattttcttaattatttggcgagaccgcagagttttggccgtgtcaactttatggaacaactgccaggcagacctgatcacctgttcctgttcgcctgacccacttggatgcgtatcatccacgcacaccaagctcatgtcaaacgggcctgacaacttttcagaacccgatcccgaactccatcactttctttcggcataaacgggctttctggtggagccaacgttaacgagaacgtatattgtcgccgaacctcttcgattttcgcttttaattagcgaattgttaacgtttaacgcatttaaaataagcaaattatgcggagaaaattcgacgttgactgggaagtgggatgctcgtacatgaagacatattcaacgggactgagaaagtgcaaatgggaaattttcacaagcctaaataggcattaaatcaactaatctttacaaacattattttacgtagatactctgagggaagccagaaatcttagatcagctagatagattaactattaagtctttaattccccattactcatgttatgtcttacaaatttattacaatgaaactaatgcagccaatttcttcaatagaccttcttatagtcatgataccacaataacttctcactttcaacctttcaaatttggcacttcatcggacgtctcaccttttatggtcggtcgtccgtaacaacttgaactcactttcccccttttgatcgttaaaaaaatcaaaacattggctcgttgaactatcgatgatcgactaatgagtcgcagcagctgcgaagaaaggaaaacaatacaaatgggtgcttttgccggcgaccaagagcgaaataataaattagaaaagatttaacaaaaattatgataaatagcccatgcaaattggagaggaagtcagattaacatgacagctgggttgcgaaaaaaataataccaacgttaactaaaagattaaagtattgttaatgcatatacctgtttgaaagcctttgcattgtattaataataattatcataatccaacgaacttatcgttatcatgatatctttatctttatctttatttcatctttacttttcctgtttaataattaataagattatacttacacatattgaacagatttttaggattttcagtagctcatcttatacagaaacaacgataatcttgaatgaaattcggaaatatttaaattaaatgatttaatgatatatatattgtctaagtactggttaaacaaaatattattcttctttggttgaattattaagtggtttacagagatttgaactttgttttcctgcaggtatggacagcgcggaggaggcggatccggaaacggtggctacgaggcgcccgcgtgcgtgcagaacgcgatgatgacaaaagacaagaagcccttcacctacacgcccggcggcattgatctctcccagatccggtcggagcggatggccaagcggttggcgcgcaatgcccaatcggaaggagcaaccggagccgcccaacagaacagacccgcccagccacagtcgccaggtgggccaggtggtgcagccagttcgattggagccgctgccatgggcatgccgttccaggtgctgccgccgccaccaccgccgccgcaaccacagtcgggtaagaatggcacccaaggtgctagcgccgcacccccaccaccacccccacaacaacccagcacattagcgccacccactgggcgcctaagtgcccctggttccccggctacggcgcgcaaatcgccaactccacagcgttttgagccaccaccactgggattccggccggagatcaagataccgccaaatcccatggctgcactgcgcaaggtggcaccgcccgtggagaagaacacgttctggaaggacgagtacattaaggatcgctccaagagtccgctgcccgaggtggcacctgctgcgaatggaggatatagcagcaccacatccgatgccgttgatggtgagcagagcccctaaggatttggctcgctttactttttgggtgattttggttcagctactgatcccgatacgactcatcacacatcgccagctcttactaagcggttgaggttgcttcttttaaaagccccattcgactaatcaaacatccaaaaggccctacaaattggctcacaatcctcccactaacagcactaataaactgatgtaatttaaactttctttggctaaaaaattctatttattttgtttaatataggtccaagaccatcggcggctagcgttgaaagcagctacagtccttacactccgactccgcaagtgccgcccgtggccaagagtcctccggtgcaatatcaacagccaacgccaccggcaacaccgccgcagcagcagcagcaacagtcggagcagcagcctgcaacacgcccggagttccgcagtgtgcccatgcccacatcgccagcggtgaacgtctacacacgtcaatcggacagtcccagatcgcctttcgagccgcagcaacagcagcagcagcagcaaccacagcgatccactgagagccccttccggtttgcacagcagcaacagcaacagtcaccgcagcagcgtccaccaacagcgatatcgccgctggctcaggtgcagcagcagcagcaacagcagttgcaacagcagcagcaacagcagttgcaacagcagcagcaacagcagttgcaacagcagcagcaacagctccagcagctgcagcaacagcagttccagcagcaacaattgcagcaacaacagttccagcaacaacagttgcagcagcagcaacagcagcaacagcagcaacagcagcagcaacagcagcagcaaccggctgttcaatcagtaccatggcgcactcaacgtgctcagcctggagcacaacagcaacaggattcgcatccacaaccaatctacaacaatgttcagcagcagcaacaaagatctcgcgatgtcttcagtccggcaaggaatgaaacatcggcagcaaacacgttcaattcacagcagcaacaaaaccaatttggtggagcagcaaagccggtaagtgatctataaaatagatttttatttattttattctttttactctggaatctgcaatgcaattaatcttactattcaagattgccccacttatttttgcgttatttccatatcgaattgacctttaactatattactcatacgacattgagcatcattgtgcaagtatctgtgtggcctatgagtaattcctaagtaaaccagtcacagctaatttgacaaatacccatatatgctaagtaatatgaagtgttcacgttgctacaatgcaaataaatggaacgcctataatcacttacattctgttttcgcggaagaacattaggatatttataaaccaaaatctttgcgagagaatgctcgaacattgaatgcatttaccaagtgcagtgtctaaaattaagcgcaaccaaaggccaaacacgaattttaaacttgaggcgactgacgagcgcaaaacttcatggggaaatctaaaaaccagaataatcatgttaagaaaacattggtgattaacaattgctaaccaaatgttgtattatttttcctttttttttcaatgtgcagaccaacgttggatcgctttacatagctccactggcccagcccactgaaccgcaggctcaacgaatccttttgcaacagcagcagcagtcatctgctcgggattctcccatgcgccaacttccacagcagcagccgcagaccaatcaaccgatgagatggctcagttcacagccggctagcaaggagcaggctccatgggctcgtctcgaggagaatggcaacgtcctgccctccaccttgcgtcagactaccccgcagccccaagtcgtccctcagcagcaaccacagcagcagcagcagccacagcagcagcagcagcccaccttctaccagccgcagttggtccaaggtaatggctacggaccaacaccggtttcagccgctcccatcagtctgcagaacttcggatcaaatccacagcctggaggactacgtttgcagatcaacttaaacaccaatggcaacagcagcaataacacaaatcaaagtgctccacgggtgagtttaaaactagagcattttgatgattatcacaacatgccctgtatacgacgagttcatgtcggcatatggagtattagtgtataattatcataaataagtctgacatatttctaactatgttttgatccgcttttatactttccttagaaaatgttgtatttaatatataattatctttcttttataggagcgtatcataccgataactctagagcagacgccgacatatgccgcagcccagcccaactttggtggtaagtttttaagacaacatcttgctttatgtgtcttccgtacaatatgtgtggcgctttcctaaaatccgtaaatgtttgtgactaatacccaacgtagtttattcccaccccaaacccaccgaaactcccgtgcactctccactccaaaggaatgactttcacccgtgtatgattttcccaaattcccgctctcgtccaattgtgtaactctccaacttttacatcaaaatgtgtctatgtatactctttctatcccacgaaagcgcctgcaggtcacataatacgctcagctaatcaatttgtcgatcaaggttaccagaattacccaccacaagcccagcgatacccgtcgcccaatcagccaacgagtacgagtaacaacaccaatggcaatgccacccggctaatcccgatagccatcgagggaggacgaggcggtccagtgtcccagtcgccagtgctgctgcagaagtaagtcaacttttgtttgcgaaggttttacccttctgccggctatccttgtgccttatcaacacccaacaattggcccgcactaatgcgatttaattttgtgcttttctaccaactaaaacaaccaacaactacttagtggcaattacaatttgtatgtgcaccagtgtccgctcgaggcggagatcctctacagaaagaatcgtctcaggtagtacgagagcactgtgcccaccaaagtatatcgagcaacatcaatacatcatgccatgcattcctctgtgtgttataatctcaattcgaatctgatatttcaaaattgaaaatactttgatcaattgaagctagctagaagatatattttaaataacttaaaaggtatcataaaattttcaaatatcttagttaaattctttataaatttaggtattgaacttgtttcgtatcacaacagaaataaatagataacaagtgaaattgattaggttttttgcatcgtagttagcctcatacattacatttgcattctcgcatatagtagagtttcgtacatttatgcaaaattctaaaattggtttcgttaagtaccccgatcataaatccaagccaaatctaaccaataattcaaacgtttcgttcgcaccaaacaaaatcgttgtaatttggttaatttcaaacattttcgatggcatgctaaccaacaacctaacctaacacacgcctatatctacttgcagcgatccacgctcaccgcccatccaatcgaaatcgtttagaatattgcaaaagataaccgacaccgtggacgatggcagcgggaatggcgattcgcggcaggacttgcagcagacgccccaggaggcggagctgcagcggccgcagttcgcccgccagatgagcgcccagcaggcaaggaatagtccgaccatcgagcagatgcgacgcctgcaaatcggacaggatcagcagaataaccatcagcagtcgggtacgccactagcttggtccccgcaaggtgagatctgataggttgtcctcctcattgctcctcgcccatcctcagatatctcacatcttatatatatatatatacggtattatatatcggtgggtaagagtgtagttgtggtgaaagttcttaatccttggggagtgtccttgggtccttgggaaaacttatactaaaccctataaccgcttttagctacaagaataccttctggttgatagaaactaaccagcttactgtatctgtcctgactagaattgctagaatcggtgctatgccaaaattatgcagcactactaagtagaatatatgctaagtagctatattattgaaatattatttcaattagttggctttagcttatgaaagtgaatgtttttgtttcaggtaatggagtctccgctcagaaccgattcacgcaacaacgatatggtaaggattgagtttaaggattagttagttttaagtatgattaaatatcgataaaaataatacaataaattattatgtttctttagatgccccccaacaacaacagcaatatgtgcctccaagtgaacagcaagctccggaacccaaaaaatacacaggcagcgctatacccagtcgatcattcaaaattctacaggcaatgacaacacctgaaaatgccggtaagtacagatgtgccgagtagtcaatgtgccgactgatacacttggaaggataaatcgttttctgaaattaagttacaagttttataaaccatacatcagacaaatatcatggctgtatatatactcagaatccatcaagcatcactaatccctaccgatcacaaagttcactcagacacaagcacatggagcattgcaccaaggatcgtaatttttataaaaccgtttttgagagatttcaccttttttgctgaatggtgtccagacactagattgacctaatcccaatggcttttgatattaatttcgagcatcccacaccattttgcttatactcatgcgccatttacttgtacatagcttgcttgaccatttaaccaatcagttattcaaatcgcaattgatcggatcaatttgataaaagagatcacattcgaaaaccaaacattttgttcgcactctcatcgtgtctatttctctttttcttcttttatatttgataaccgtgtaccacaaaaccgacctcagaccataaaattcacaccgagctggactcggatttggaaaa

SEQ ID NO: 12845 - DNA, 3263 bp, DROSOPHILA
ctgtctatatatacgaatatatatagatatagatacgagtattttctctagcaaaagtgagcaatgcgtcgtgccgcgttttataaatagcaaattacaaaatatcgaaacgaacgttggtgaaaagggtttcatagttttaaaaacagtgcaaaaccctaagttcttagcgaaactaacttatctgtatatatgaaaatcaacacgatattgaacacaatatagtatatgtatatgtatataattgtgggaaaaactatttccgagtggatcgcttgtgtccgtgccgcaaattatataagaacgcgtgatttttgatgcaaaataattttcggcttaatattcataatttaataataattttccataaatttttcagtgtttttgtgtgcataggcgtcgtttgcaaaatcttttcgtagaacttgcgtgcgttttggtgaaaaccaacgcctacgaccaaatctaaatatcgcgatttcttccgactggcggctgtgtgtaggcggtgtgtaaaagtgttctgaagttgaacttgaaatacataaaaagcggctaaaatgagttctgggtatggacagcgcggaggaggcggatccggaaacggtggctacgaggcgcccgcgtgcgtgcagaacgcgatgatgacaaaagacaagaagcccttcacctacacgcccggcggcattgatctctcccagatccggtcggagcggatggccaagcggttggcgcgcaatgcccaatcggaaggagcaaccggagccgcccaacagaacagacccgcccagccacagtcgccaggtgggccaggtggtgcagccagttcgattggagccgctgccatgggcatgccgttccaggtgctgccgccgccaccaccgccgccgcaaccacagtcgggtaagaatggcacccaaggtgctagcgccgcacccccaccaccacccccacaacaacccagcacattagcgccacccactgggcgcctaagtgcccctggttccccggctacggcgcgcaaatcgccaactccacagcgttttgagccaccaccactgggattccggccggagatcaagataccgccaaatcccatggctgcactgcgcaaggtggcaccgcccgtggagaagaacacgttctggaaggacgagtacattaaggatcgctccaagagtccgctgcccgaggtggcacctgctgcgaatggaggatatagcagcaccacatccgatgccgttgatggtccaagaccatcggcggctagcgttgaaagcagctacagtccttacactccgactccgcaagtgccgcccgtggccaagagtcctccggtgcaatatcaacagccaacgccaccggcaacaccgccgcagcagcagcagcaacagtcggagcagcagcctgcaacacgcccggagttccgcagtgtgcccatgcccacatcgccagcggtgaacgtctacacacgtcaatcggacagtcccagatcgcctttcgagccgcagcaacagcagcagcagcagcaaccacagcgatccactgagagccccttccggtttgcacagcagcaacagcaacagtcaccgcagcagcgtccaccaacagcgatatcgccgctggctcaggtgcagcagcagcagcaacagcagttgcaacagcagcagcaacagcagttgcaacagcagcagcaacagcagttgcaacagcagcagcaacagctccagcagctgcagcaacagcagttccagcagcaacaattgcagcaacaacagttccagcaacaacagttgcagcagcagcaacagcagcaacagcagcaacagcagcagcaacagcagcagcaaccggctgttcaatcagtaccatggcgcactcaacgtgctcagcctggagcacaacagcaacaggattcgcatccacaaccaatctacaacaatgttcagcagcagcaacaaagatctcgcgatgtcttcagtccggcaaggaatgaaacatcggcagcaaacacgttcaattcacagcagcaacaaaaccaatttggtggagcagcaaagccgaccaacgttggatcgctttacatagctccactggcccagcccactgaaccgcaggctcaacgaatccttttgcaacagcagcagcagtcatctgctcgggattctcccatgcgccaacttccacagcagcagccgcagaccaatcaaccgatgagatggctcagttcacagccggctagcaaggagcaggctccatgggctcgtctcgaggagaatggcaacgtcctgccctccaccttgcgtcagactaccccgcagccccaagtcgtccctcagcagcaaccacagcagcagcagcagccacagcagcagcagcagcccaccttctaccagccgcagttggtccaaggtaatggctacggaccaacaccggtttcagccgctcccatcagtctgcagaacttcggatcaaatccacagcctggaggactacgtttgcagatcaacttaaacaccaatggcaacagcagcaataacacaaatcaaagtgctccacgggagcgtatcataccgataactctagagcagacgccgacatatgccgcagcccagcccaactttggtggttaccagaattacccaccacaagcccagcgatacccgtcgcccaatcagccaacgagtacgagtaacaacaccaatggcaatgccacccggctaatcccgatagccatcgagggaggacgaggcggtccagtgtcccagtcgccagtgctgctgcagaacgatccacgctcaccgcccatccaatcgaaatcgtttagaatattgcaaaagataaccgacaccgtggacgatggcagcgggaatggcgattcgcggcaggacttgcagcagacgccccaggaggcggagctgcagcggccgcagttcgcccgccagatgagcgcccagcaggcaaggaatagtccgaccatcgagcagatgcgacgcctgcaaatcggacaggatcagcagaataaccatcagcagtcgggtacgccactagcttggtccccgcaaggtaatggagtctccgctcagaaccgattcacgcaacaacgatatgatgccccccaacaacaacagcaatatgtgcctccaagtgaacagcaagctccggaacccaaaaaatacacaggcagcgctatacccagtcgatcattcaaaattctacaggcaatgacaacacctgaaaatgccgcttgcttgaccatttaa

SEQ ID NO: 12846 - protein, 900 aa, DROSOPHILA
MSSGYGQRGGGGSGNGGYEAPACVQNAMMTKDKKPFTYTPGGIDLSQIRSERMAKRLARNAQSEGATGAAQQNRPAQPQSPGGPGGAASSIGAAAMGMPFQVLPPPPPPPQPQSGKNGTQGASAAPPPPPPQQPSTLAPPTGRLSAPGSPATARKSPTPQRFEPPPLGFRPEIKIPPNPMAALRKVAPPVEKNTFWKDEYIKDRSKSPLPEVAPAANGGYSSTTSDAVDGPRPSAASVESSYSPYTPTPQVPPVAKSPPVQYQQPTPPATPPQQQQQQSEQQPATRPEFRSVPMPTSPAVNVYTRQSDSPRSPFEPQQQQQQQQPQRSTESPFRFAQQQQQQSPQQRPPTAISPLAQVQQQQQQQLQQQQQQQLQQQQQQQLQQQQQQLQQLQQQQFQQQQLQQQQFQQQQLQQQQQQQQQQQQQQQQQQPAVQSVPWRTQRAQPGAQQQQDSHPQPIYNNVQQQQQRSRDVFSPARNETSAANTFNSQQQQNQFGGAAKPTNVGSLYIAPLAQPTEPQAQRILLQQQQQSSARDSPMRQLPQQQPQTNQPMRWLSSQPASKEQAPWARLEENGNVLPSTLRQTTPQPQVVPQQQPQQQQQPQQQQQPTFYQPQLVQGNGYGPTPVSAAPISLQNFGSNPQPGGLRLQINLNTNGNSSNNTNQSAPRERIIPITLEQTPTYAAAQPNFGGYQNYPPQAQRYPSPNQPTSTSNNTNGNATRLIPIAIEGGRGGPVSQSPVLLQNDPRSPPIQSKSFRILQKITDTVDDGSGNGDSRQDLQQTPQEAELQRPQFARQMSAQQARNSPTIEQMRRLQIGQDQQNNHQQSGTPLAWSPQGNGVSAQNRFTQQRYDAPQQQQQYVPPSEQQAPEPKKYTGSAIPSRSFKILQAMTTPENAACLTI

SEQ ID NO: 12847 - DNA, 3104 bp, DROSOPHILA
aacaaacgaatatcgcgatatacaattcaaagaatgcttccttaaatccagaatgcatactaagtagcctattttctatgtgtacttccacaaaacggactcacttgactagcaaaaatatttggttagaagacgaaacacgaggagcaaataagaaacataggaaggaacaaagaaagctatacaaatgctgactcggcaaccgcaagtaataggccaagtctggtcgggagtcgaggtaacaaataataaccgagcactttcctcttccgctctgcaattctttttgccttattcctgtcggactggacatggaattgtttaaattatttacacaagctggaaaattaaaatggacagctgctgttcgggggctgaaaacgaaaagcagagaacagtggaccagtggagtagctgtagcagtcattgttatgactgttgcaactgcttgggtcaagtgctgtgtattgcggcacgtactgtacatgggtgtggattttgtggagtggactggactggactgaactgaactgaactgtaccagcaattgcccatgctgtagttcataacttttcattttggcccctctgtggcactccttcactttgtctttcggggcttatcctttgtggcaggcaaattttaattattaccaggcagccgagaaaaggtccgattgcgaatctgttgccaagtctgaggtttatgagtttgattgttcttcagtccgcaggcattgcgtatgcgtaatgcgtacgtctgtatctaattgaaaaaatcaagtatatgccatgttgtgccactacttttggcgaagcacaagctggcaattggatggccataatgcacagctgttgctacatagtagcacacttccttcggctaacaaaatgggaggatttcttcggaataagataatgaagcgaagaatacacttggaaaatatatgaataacattaataaactttaatttacttgacttatgtgctcatcaaatattctacatggaaaaataatcatatatttcagccggagtatctggaaatttctcgtggaaagcttgctctataatgtaatattttgcataaagaccaccgccaggtggtagatttggaatgttaatggccattcttttcatcagtcgtataagtgtttcaaagtcgtgtatttcgtgcttctcaatcacttccttggttatttgcacaatagtttgatcaagactcctttcggccttaactgcatccatatcgacctttggtgctccaggcaaaagtaggaggagcagtgtcatattgtccctgctgcctttatgcaggcaaatatccaatacgctgttaacaatcatcggcaggtcataggtcaccaaaagccgtgacctaataaattcacaaacctcgctgctagtcatcacatcccaaatgccatcgcaggctacaactatgaattcatcgtgttcggaccgattgcaaactattatatcaggttccggagacaccatctgatcgacaggagactttgagccatcattcttgaaatcatagtcaccgaaggcccgggaaactgccagagtgccatttatccttttaatcattacactgcctccggcattttgaatgcgttcttgttctttgggagaaaacggcttgtgatcaattgtactgatgacagctgctccatttcgcgatatcactgcacgcgagtcaccacaattgaccagatatattttgtccggtgatacaaaaacacaaatggccgtcgagccgccttgctggtcgtgatacagcttcctcatatcctcatccaactgcaggaagccctctcgtatgccagcctcgtatttgtgcttcgaaaaagattcggattccaatatagtactcattagatgttcagcgcaatgcagtgatatttgactgccagcgtgaccatcgaacaccgcaaaatatgaccacgttgcgaagggatccttcagccggcaagcagccgagtggctatcctccatttccaatcgccaaccttgcatagaacttacgcagtatcgcagcccattcccatgaccctcttgagcctgcttttcagtttctggtttttccaagaagccacccattttatgacccatatgatttttacaaagtccccgaaatttccttagctgtagctgtataacaataatttgaaaatgaaatttggagcagggctttttagaatcggtttttctttgtgtaggctgacttcttgttttctgaagcatataactttcctccagaagactggaagttattgcttttgcagtatcgaaccatttttggcgtggctcaattaatcaatgacaattcaattagcatcgagtccataagcacacagaaatcccactcactcatggatgacttctattccgagtaccccgaaaactttcgattacggacatctttcgacgccgaactaccgaataactgaacagatcggtatgggaattgaatggccataagaaaagtttaccgtttaattagacaggcaaataggcagcagggagcgttacagactcgttgagagtctaaatgtcagttagttcgttcccccggcacggctacttctactgctactgccattcggtcgcattcgcattctggcgaacaatgagctaaattttccatggaaaactactaagtaagcttgttaattaaatacgcattaccgcccctgtaattgcctgtgacgcgctgcttagcaacaactacacctactaatgaaatggggtagtacaaggtgcggaatgggctgaagcttcagcggaattcccactccggcattggatgggggaggacacaaactaattgttaaagtcaagtgcaaagtttcagcgccctaaccatctcagtttctctcccagatttttacccgtgcacttgtcaatgtgtcacggcaaggtaaatgaaatgatatgggtgctaagtttatcctagagctattgagtaagcaactacttattagaattttaattaaaaatgtttttgctctaaataaagtgatccgaaatgcagagaagccaactttgattaatggtaaaattaagcaaatggtaacatcaattagccaatgtggcaaaa

SEQ ID NO: 12848 - DNA, 1104 bp, DROSOPHILA
atgggtggcttcttggaaaaaccagaaactgaaaagcaggctcaagagggtcatgggaatgggctgcgatactgcgtaagttctatgcaaggttggcgattggaaatggaggatagccactcggctgcttgccggctgaaggatcccttcgcaacgtggtcatattttgcggtgttcgatggtcacgctggcagtcaaatatcactgcattgcgctgaacatctaatgagtactatattggaatccgaatctttttcgaagcacaaatacgaggctggcatacgagagggcttcctgcagttggatgaggatatgaggaagctgtatcacgaccagcaaggcggctcgacggccatttgtgtttttgtatcaccggacaaaatatatctggtcaattgtggtgactcgcgtgcagtgatatcgcgaaatggagcagctgtcatcagtacaattgatcacaagccgttttctcccaaagaacaagaacgcattcaaaatgccggaggcagtgtaatgattaaaaggataaatggcactctggcagtttcccgggccttcggtgactatgatttcaagaatgatggctcaaagtctcctgtcgatcagatggtgtctccggaacctgatataatagtttgcaatcggtccgaacacgatgaattcatagttgtagcctgcgatggcatttgggatgtgatgactagcagcgaggtttgtgaatttattaggtcacggcttttggtgacctatgacctgccgatgattgttaacagcgtattggatatttgcctgcataaaggcagcagggacaatatgacactgctcctcctacttttgcctggagcaccaaaggtcgatatggatgcagttaaggccgaaaggagtcttgatcaaactattgtgcaaataaccaaggaagtgattgagaagcacgaaatacacgactttgaaacacttatacgactgatgaaaagaatggccattaacattccaaatctaccacctggcggtggtctttatgcaaaatattacattatagagcaagctttccacgagaaatttccagatactccggctgaaatatatgattatttttccatgtag

SEQ ID NO: 12849 - protein, 367 aa, DROSOPHILA
MGGFLEKPETEKQAQEGHGNGLRYCVSSMQGWRLEMEDSHSAACRLKDPFATWSYFAVFDGHAGSQISLHCAEHLMSTILESESFSKHKYEAGIREGFLQLDEDMRKLYHDQQGGSTAICVFVSPDKIYLVNCGDSRAVISRNGAAVISTIDHKPFSPKEQERIQNAGGSVMIKRINGTLAVSRAFGDYDFKNDGSKSPVDQMVSPEPDIIVCNRSEHDEFIVVACDGIWDVMTSSEVCEFIRSRLLVTYDLPMIVNSVLDICLHKGSRDNMTLLLLLLPGAPKVDMDAVKAERSLDQTIVQITKEVIEKHEIHDFETLIRLMKRMAINIPNLPPGGGLYAKYYIIEQAFHEKFPDTPAEIYDYFSM

SEQ ID NO: 12850 - DNA, 2811 bp, DROSOPHILA
ttgaaaatgtgaacataattcgattttgttttgatttattcaaaagtccctgtatgcgatatttgcaagtatgactaaccaccatccaccagctatgtttagtccataagatttaagcgaagtaataaaaaatcagaaatatgcaaatgtttactttaacgtattgacttggaaacgtgattggcagagtcatgtccaaatttgaggtttatttgccgttttgtccaccggattacgcgctcttctttttttggactttgtcaataatccacgagattatagccggctgactcatctgcggaccactcgttggtcaaacatcgcacatgccgcatgtgaaacgaaccgcagcgcagatccaaatacgatcaaaagtttattgctcggagagtccaacggtttgccgactgtgcgcctgatgcgaatgctaagtttatagccgagtttatgaggcccaacaggaaatgcccgggccttagcaattgaggtggccatctgcggatgttacgaaaatagaagttgtgcttaaacgtttaaaaccaataaagaaaagatattgcaagccgaccgcttgatccggctttcgagcattttatttttaaaaggttctgttctttaatagatcttaaatgtgtcattagcttattattaagcgaaagtgtttcctttgcgtctattaaatggcaacaatttgatacaaagattctaactttatacttgctattacatttttagggacatttaaaatgttgatttttaatcaaattagataaataattagataattaactttgaatggaattgtgtaatgtattttgtcgtacaaaacgaactatacgtattttaaatatttggaattggcgccatatgctcacactttttgtgttgaccaacacttagttagtatatttgtacagcgacaatatcatgcatttgatatttttttggtatatttatcatcttggcaacatggtaacttttgttgactcatttgcggtcacactgctctctagggcgtatcttttattatttacgttgtgtatttgtgttatctgttttattttgaaaagaaaccccgctttattaaacaaaacatgcactaccatacgaatctcattgcagccctgctgctggcagctctaattcacgagggtaagaagtatttccaacgccctcaccaaacagttacatatgtatgtactataacatacaatttgttgacaggctctgcaatttggtgctaccgctgcacttcggccacgcccggctgtgcggagaagtttaactggcggggaataggattcctgggcgagcactgcccggaaccggacgacatttgcgtcaaggtgacggagcgacgcggcggtaagcggaaatcctctgttatccgagcttcattaacaaatgaaactcgcttttagccagggaaacaatcacacgtgactgcctaagcgcgctgagcttccgcaaagacattcccgccgacaaatacgaaggatgtcgtcctgccgcccacgatgaaaagctagcgaactacgtaaaccacacgatcaaggagcacgacgtgcgccgtgactactacacggacaccacgttctgtttctgcttcctcgaccatcgatgcaatggggccagcggcctacaaacgtccgccgtaatcggtcttctcactctaattcctgccctgcttctacgctagaatctcctcttgagtgcagtatttaagtgccttactaactcgctctgcaactacgaattccgtccaacattccacactttttgtacaaccttttgacatgactacagcttttagagtcttgtgtttactcaactaattaaatacattttaccatatttataaacaggagtgaaatcgttgctttaaaggacctctacattcttgggcgcccggtaatcataggcagccacctcgggtcgcgtcaccagatgctccgaatagacttccgccaacctcaggcactgctccacagttagttcaaagggacgcagcgtgtcctgtacttcggcgcgctgaaatagcttctcagcaacctcctcgcgatcttctggaggaagcagggtgccatagcctcggcgacagtacttctggcgcatgctaaagatgtgacggactacgcgctcaactaggtgaaacggcaattgagtcttagggcgctttaggggaattagcttgacgacgcccacatccacctgtggtttcggaacgaacgccttgcccggtatggtgaacttcatgacgggttccgtccacacctgcgacatcaccgagagccggcagcgctgttcgccgcctacaggggcacaaattcgctcggccacctcttgctggaaggtaagagtcatacaggtgtcgatgcgccggaaagcaccacgcctggcggccaaatcatcaagccaattgatcaacagtcgagtggatatggcgaacggcaggttgccaatcagatggatccgctgtgaggtgtccgggatgtgctgctcaatgttgaagcgcaggatgtcatcatagtggatgtcgaactggatgtttagtggactggcgcattccttgagcaactgcagtgtttcgccgaagcgcggatccttctccacaagcaacaatcgctgtgggtgacgacgcagaatcgagcgcgtgataccgcccggcccgggacccacctcaagaactaaatcccggggatcgatgcgtcccgccgacttgactatcttgtccgtgagccgctcgtccatgaggaagttctggctaagctgtttcctggcctgtagtctgtatagcttcaccagctcccg

SEQ ID NO: 12851 - DNA, 683 bp, DROSOPHILA
cactgctctctagggcgtatcttttattatttacgttgtgtatttgtgttatctgttttattttgaaaagaaaccccgctttattaaacaaaacatgcactaccatacgaatctcattgcagccctgctgctggcagctctaattcacgagggctctgcaatttggtgctaccgctgcacttcggccacgcccggctgtgcggagaagtttaactggcggggaataggattcctgggcgagcactgcccggaaccggacgacatttgcgtcaaggtgacggagcgacgcggcgccagggaaacaatcacacgtgactgcctaagcgcgctgagcttccgcaaagacattcccgccgacaaatacgaaggatgtcgtcctgccgcccacgatgaaaagctagcgaactacgtaaaccacacgatcaaggagcacgacgtgcgccgtgactactacacggacaccacgttctgtttctgcttcctcgaccatcgatgcaatggggccagcggcctacaaacgtccgccgtaatcggtcttctcactctaattcctgccctgcttctacgctagaatctcctcttgagtgcagtatttaagtgccttactaactcgctctgcaactacgaattccgtccaacattccacactttttgtacaaccttttgacatgactacagctttt

SEQ ID NO: 12852 - protein, 158 aa, DROSOPHILA
MHYHTNLIAALLLAALIHEGSAIWCYRCTSATPGCAEKFNWRGIGFLGEHCPEPDDICVKVTERRGARETITRDCLSALSFRKDIPADKYEGCRPAAHDEKLANYVNHTIKEHDVRRDYYTDTTFCFCFLDHRCNGASGLQTSAVIGLLTLIPALLLR

SEQ ID NO: 12853 - DNA, 5234 bp, DROSOPHILA
ttttggctgtactgaaacaccttttgagaacattgtatttgtaaagatttaataaactaacataatcatactccctcctattttccgttcttctttttggaacctcctccggtggctttttgagtgcgccccaactgcatttcctttaacttagcatccagacgcttttttgcattcttcacatcctcctcctgcctgatggttttcgccggcttcgggtgcagaaacttcttgcgctcgtcccgcttgatctcctcgccacacccgtgcacctctggcagtccgtgcttgaagcagaatctcttcttgcaatgctggcagtcttggcccatcaggctggttttggtcttgcagcgcggatagtcgcagaggttatccacttccttgacggctgtcagcacatcgtccagcttgagatccaccacctggctgggaatccgctccagtagctccaatgtgttgtttgtcccatagtcaactctttttcctggttttgcgggcgggaacagcggagcatcttcagttttcgacgaggtagagggcttgtttggatcgtctgcagaaaatcatttcattaatgaccaaaacttaaacatttcttgagacaattcgcacctgccattgaaaaatatctaaaattcgactaatatttatgatgttttgctaatttcgttaaatttacatttcaagcctagaggtgaaagttgcaagacgtaaacagctgactgttaatcgatagatcgattgacgtcaagcagtgcatgcagatgaatgttattttcaaaagtttattttttaatcatttaggtacttaatttaaaaatgtttctaagctatttaaagtatgttgtagtgttatggaaaatatataagaatacaactggctaactttaaaaacatgttttcaatgtcaattattttcccacttcaatacgatccacaaaaagaattacacacccaccaaagattaaatacttcagtaatgatattgtcgatttatttagttactacacacaggtcaataaacgttgtaagcttaaattatttaaccaatcttcgacggctttcaatagtgcgtaatttttgtaaagtttttactttaatgtggaacattcgtttccggtgtataatatgtgtatatccatctaaaagccgcgtataaacgtttagtaattgcaattgttgttggtttgatttaaatgccaatggtgcagacatctgtgatccagctttgggatttctaaatcgcatgcccaatatatgtacatagctagtcgttgtacgtatctatccaatggtgcgatccaatggtacgattacaatttgttttcgcaaggacatgatgcactttctcctgatccggtgacagcggcatggatcgccttggccacatattcaacgttgcccttattcaggccactcatgctgatgcgtcccgtcttcagcaggtaaatgtggtactggtcgatcagcacacgaacatggctctcgttcagaccggtgtaggagaacatgccgatctggttgacaatgtgatcccaggtgccgggggtgcccaaggcaaccagcttgtcccgcaaagctgtacgcatctcgcggatgcggctcgacattgcctggatggaggccatccactccttgcgcaactccggtgtgtttaggactttggaaacgatgcgagctccatacgcgggcggattcgagtactgtccacgaatgagcagcgtcagctgagagtgaaccgctgccttggtagcaccattcttttgcaccacagccagattgccggtacgttcgcagtagaggccaaagttcttggcgaacgactggcagatgaagagctcgaagccacgctgcacgaagtacctagcggcccaggcatcgcgatcgggatcaccactggcaaagccctggtaagccgagtcgaacagcgggaacaacttcttcttctccatcagatcggccagctcagtccactgctcctgggtgggatcaatgccggtgggattgtgggcacaggcgtgcagaatgatcacagcaccgggcggagcatcgttcagatcggccagcatgttcttgaagtccaactcgcgtttattttggtcccagtagcggtacgatttaacggtcgtaaagccggcatcgcaaaagatcttgtggtgattctcccaggtggggttcgagtagtaaaccacattgcgattcagttgtgtgtgcaggaaatcggcggcaacgcgcagggcacccgtgcccgaaatggtctgcactccaaaggcctacaagaaaattgcagtctaataaaagagtacatatttttaggttgagccccaacttacgcgattctccttgatggctggggaatcggcacccagaaccaattcagtggccgcattggtgaatgtttcgagtcctgcaaaacagaatcattgggttaattaaattactttgatgaaatgcattgcatttactcaccagtcactggcaaatactcgtggttaacctgctcatcgctggcaatgctgatttccgtcttgcgcaccacaggcaaaacccaaggaactccagcatctgtcctgtaagctgtgaatgaacgaaaccaaagatcaaatgagtaaaccaatttattcgaagtccactgattgctcaagtgtttagggaaatacatgggtcaaagtgctaaaatccgtacaatattcaagtcttatctgaatgctcttaacaagcctaatcaatcctcattgctataggccatttgatattgttttcatgcgttgtttctaggccaatttatttatttattggagcaactgaaaagcactggcgtcgtgttatacgaaaccaattgaatgaattggtctggtaatgtttatacttttgcagcattgtaaataaaagcgaaggcgcgataaacaagccataacgacaataaattgacggaaatgagaagaatgaataattaagctcattaaaacatccatttgcttgagttaatatggtaataaaataccatgattcgatataagtttagtttaaagataccttttgtaaatcagctgattttggcattgaatatacatatttattaattctaatgctattaaaaccaaaatacgtcgaataaattggcataatcatttacacgagcaagggttaatgactcttggctttgcgagcaaaacaaaaatacaataatcggcgactctgctggtgggaattgttatttaaattatgcaataacattcataaatatagaaaaggtgaagcaaaattgctcttgaacgacccggcggcaatattgttgttgtcgttccttcaaattttcgctggctgaatgtattgtattggaggaaatggatggacgtggtgtacctgccaaaaacaagtggcttatcatcatccgccacacaaaaacatacataggcaataaataaatacggtgttagctgacgtcagaggaaaatatagaacaaagaaagtcgcaaaagaaattcactactaaaaaaaattagattgatatttacaatcggagctttaaaatactacgttttgagctgctaatttaagcaaacattgagtttaaatattattgagaagctgaaacaaaatggaataagcaaaatatgtaactaagtaattaagaaataggttgtaatatttaaccatatagagtatttgaaattgtttacacacacacaaaatccacaattggttataagccaactaattggaaagcaagaaggatggaaaaatctgtgcaattcatacattgcgacattgacatccaaatgacctccagcagagtggcctgttgggtggcaaacggaaacgggcgttccagcggtgcggggggtggcgaattgcaagggcaagccaactagcaaatgatagcaaattgagccgcacacaaatacagccggctaagtaatacacatatactttttataaacatatgcacatacataggtatgcacttcattctgttagaggaggggggtggggtgagaaaatagaactttagaacttaccgcccaccgacaaattgaccttgttgggattgctgtcgtccttgaaggcctgcgtcagggcgaagacctcgatggcgggtccttttggaacgtcggcgtagatggacatcgtggatagcttgggaaacaagtccaaacggagcgacaataacaaataaattaatttggaatagtgtcggcaaagacggccaaaagtagtgtggctgcacttgtctaaatcaaattggcccacaaaagctcagtcgatgaaattatcgatatttatactaaaaaattactgaaaaaaattatgacacggaaattcgaaaaaatgtcttctgattgcatgaattttaattgaatttttatattttgcaggcgtttatggctaaataaaaggtattttcagaaaaattcgattttcatgtttcggggctagtgcactgacttcaaagagctgttcctacctggaagttttgtaataaaccgggataattaagtcgttttaagataataaacattttcgccagttttgcttgaaattttgaagcaacaatctcagaaggagtaaaataacaaataactcaaaacgaaaatatcaaggccagtttaaaaaaattttcggtcccagaaaaattaaacgcaatcgaggaaagtgatttaaaatgtttctttattgccccggatgattaccttatttgctaaacaattagtttggtttattcttagccaaatatcgatggaccaatatttgattgctcgcagtctttatgtcgctttcaatttgcgttccaattaggctagcattcgattgagattcaacaaatagaaaagcaaactcgaggactgattggtgttggttttggttcaaaatagttttgctgtaatattcagtaattgctgagggtgcacacatttctccaattcgttacacaactaactaaggctatgattaaaattatgttcagtgtaaaactaaggcgttatgataaaattgattaaatagactacgcacttatacaatggcccggtgcttatctatatttacaattcatattaaatatacattcgttaatataaatatccaaactgcacgacctacgcattcgatgcctgagataatctatttacattatccgatctgagggagcacttcttcgaatgcgagtccgcttgaaactcttgctaattttgatttagtctaaaataccagagctagacctatctacg

SEQ ID NO: 12854 - DNA, 1667 bp, DROSOPHILA
gtgcagccacactacttttggccgtctttgccgacactattccaaattaatttatttgttattgtcgctccgtttggacttgtttcccaagctatccacgatgtccatctacgccgacgttccaaaaggacccgccatcgaggtcttcgccctgacgcaggccttcaaggacgacagcaatcccaacaaggtcaatttgtcggtgggcgcttacaggacagatgctggagttccttgggttttgcctgtggtgcgcaagacggaaatcagcattgccagcgatgagcaggttaaccacgagtatttgccagtgactggactcgaaacattcaccaatgcggccactgaattggttctgggtgccgattccccagccatcaaggagaatcgcgcctttggagtgcagaccatttcgggcacgggtgccctgcgcgttgccgccgatttcctgcacacacaactgaatcgcaatgtggtttactactcgaaccccacctgggagaatcaccacaagatcttttgcgatgccggctttacgaccgttaaatcgtaccgctactgggaccaaaataaacgcgagttggacttcaagaacatgctggccgatctgaacgatgctccgcccggtgctgtgatcattctgcacgcctgtgcccacaatcccaccggcattgatcccacccaggagcagtggactgagctggccgatctgatggagaagaagaagttgttcccgctgttcgactcggcttaccagggctttgccagtggtgatcccgatcgcgatgcctgggccgctaggtacttcgtgcagcgtggcttcgagctcttcatctgccagtcgttcgccaagaactttggcctctactgcgaacgtaccggcaatctggctgtggtgcaaaagaatggtgctaccaaggcagcggttcactctcagctgacgctgctcattcgtggacagtactcgaatccgcccgcgtatggagctcgcatcgtttccaaagtcctaaacacaccggagttgcgcaaggagtggatggcctccatccaggcaatgtcgagccgcatccgcgagatgcgtacagctttgcgggacaagctggttgccttgggcacccccggcacctgggatcacattgtcaaccagatcggcatgttctcctacaccggtctgaacgagagccatgttcgtgtgctgatcgaccagtaccacatttacctgctgaagacgggacgcatcagcatgagtggcctgaataagggcaacgttgaatatgtggccaaggcgatccatgccgctgtcaccggatcaggagaaagtgcatcatgtccttgcgaaaacaaattgtaatcgtaccattggatcgcaccattggatagatacgtacaacgactagctatgtacatatattgggcatgcgatttagaaatcccaaagctggatcacagatgtctgcaccattggcatttaaatcaaaccaacaacaattgcaattactaaacgtttatacgcggcttttagatggatatacacatattatacaccggaaacgaatgttccacattaaagtaaaaactttacaaaaattacgcactattgaaagccgtcgaagattggttaaataatttaagcttacaacgtttattgacctgtgtgtagtaactaa

SEQ ID NO: 12855 - protein, 416 aa, DROSOPHILA
MSIYADVPKGPAIEVFALTQAFKDDSNPNKVNLSVGAYRTDAGVPWVLPVVRKTEISIASDEQVNHEYLPVTGLETFTNAATELVLGADSPAIKENRAFGVQTISGTGALRVAADFLHTQLNRNVVYYSNPTWENHHKIFCDAGFTTVKSYRYWDQNKRELDFKNMLADLNDAPPGAVIILHACAHNPTGIDPTQEQWTELADLMEKKKLFPLFDSAYQGFASGDPDRDAWAARYFVQRGFELFICQSFAKNFGLYCERTGNLAVVQKNGATKAAVHSQLTLLIRGQYSNPPAYGARIVSKVLNTPELRKEWMASIQAMSSRIREMRTALRDKLVALGTPGTWDHIVNQIGMFSYTGLNESHVRVLIDQYHIYLLKTGRISMSGLNKGNVEYVAKAIHAAVTGSGESASCPCENKL

SEQ ID NO: 12856 - DNA, 6413 bp, DROSOPHILA
cgtctgggaaatttgcgcccgtatttatactcagtcgccgggaggggaaaattcgagatttccctgcgagaaagggtcagaacattccagtcagttcgtgtgtgtgcgagcgagtcaactagtgtgcacttcgcaggggaaattgtcagttgaaaggactgaaagttcaggaaatttcgagaaatatattttttttattgacataggtcatcattccaagtggtcattaaactaaattcgtatgcaagctatttttggctgatttgcggattgatacgttaagccattcatatttttagattctgtttttggtttatatctcttttattatatgtgcaatacatatgtgtgtatttttcttctgattggaatatttcctctgcagaatatgacatacaattaccttaaaagttgaacacacttttcaaaacttaattattccaattaattatttccaaaaatttaaagaatcgtactgctctatatccaggatacataaatatatagatacatatataggatgtacatagataggatgtatatagaatacttcgtagatcgatacaatctttaatgtgtttataaatagggaattttaagatgcaagagcaaatgaaaaaaatctcagcttgcattatgaatatacatatgaaaatgtatagataattgtacatattaatatatatatagttctgatttccatgaccttttgaagggtattatgaaaagatcctgaaatgaagaacaagccattggaaaatctacagtgatgattgttttaaaccgaaaatgccttcggttcgcataagcccaagattataaattattcattagttttaaaatgtttttgtttacaaattgtattttgtaaacaaagacgaccgatagtaatcgatagtggttaatttgaaatgaaaattgtactatcgctgatgtatcccatcgatagtttgttttctacgccttgccatctctagcgtctgatattgatggcgttagccggatacggtcatactgtcataagagaaaaaaaattatttcgcgctcatattgttatttttcttggatatttgttgcaatcgagcgtgtgaatgaccgaagaggacgacgatgtggcccaaagggtggcgacggcgcccgtccgcaagccggacgacgagacggccttcctggagtacatcgaaatggagaacttcaagtcctaccgcggtcacatagttgtgggtcctctgaagcaattcaacgctgttattgggcccaacggatcaggcaagtcaaacttcatggatgccatcagtttcgtgatgggcgagaagaccagcagtttgcgagtaaagcgcctgaacgacctcatccatggctcctccattggcaagcccgtttcccgcagttgctacgtgaccgccaaatttgtgctgaacgaggagcgccacatggacttccagagggcggttatcggcggctcctcggaatatcgtatcaatggagaggttcgtattgacaaccaatcctcttattagccaattaatcatatcccccatttagagcgtatcgagcagcacgtacttgaacaagctggagaaaattggcatcaatgttaaggccaagaactttttagtattccagggagctgttgagaacatagccatgaagacacccaaggaacgcactgctctatttgaggaaattagcgggtaaattttaattttttacctaaaatccggattttttgacccgtgttcacttttccagttctggcctgcttaaggacgactataatcgacttaaacaagaaatgattgttgccgaggaggagacccagtttacttaccaaaagaagaagggcatcgcggcggaaagaaaagaagccaagcacgagaagatggaagctgatcgctacactcgcctgcaaaatgaatacgtatgactctttattctgccaactctatccaattagctacatctttttattctaatagaatgaaaaacaagtggagtatcaattatttaggctattccacgtggagagggacatccggaagtttacgagcgatttggaagtgaggcaacaggaagttaaagcagtcgaacagcgaaaagaagctgccgatgaaatcctgcgcgaaaagaagaaagacgccggaaaaatcacccgagacctggccaaaatcgatcaggaaatcagagagtttgaaacccagatgaacaaacgcaggcccctttacatcaaggccaaagagaaagttacccactgcaagaagaagctcatttccctacagaagactctggaaacagccagggaggcggacaatgcccatcagtcggacatacggaaactggagaagcagctggctgatgtggaggccctgaaaaaacgtttcgaggacgagatcgagaacgagtcgcagcgccgcggcaaaagcgttaacatggaagagggccttgtgcaagagtacgatcgcctgaagcaggaggcggaagccacagctacgcagtaccgttcagagctggactcagtaaaccgggagcaaaaatccgaacaggacacgcttgatggggagacaaatcgtcgcgcctccgtagaggagtccttcaagaagctcacattacagcgcgaggaagctgtaaagcgtcgagacaaactgatggatcacatcaaatcatcacaggctgccttggaggaacagaaccggatcaaggacgagctccggcgagatgttggcacatccaaggagaagatagccgaaaagcaacgcgaattggaggacgtacgcgatcaactgggcgatgccaagagcgacaagcacgaggatgctcgtaggaaaaagaagcaggaggtggtggagctcttcaaaaaacaggttcccggagtgtacgaccgtatgattaacatgtgtcagccgacgcataaacgctacaatgtggccgtcaccaaagttttgggcaagttcatggaagccattattgtggacaccgaaaagacggctagacactgtattcaggtgggtttcagttgatcaactgggatttacatgtaagcattgacgattttatatgttctatagatcttgaaggagcaaatgctggaagtggaaaccttcttgcccttggactatctgcaagttaagcctctgaaggaacgacttcgtaacatcagcgacccgcggaacgtgcgattggttttcgatgtactaaagtttgagcctcaagagatcgaacgggctgtgctcttcgccacaggcaatgctctcgtttgcgagactcccgaggacgccatgaaagtggcttacgagatagaccgatcacgtttcgatgctctggccctggacggaacattctaccagaaatcgggtctcatatctggcggtagtcacgatctggctcgcaaagctaagcgatgggacgagaagcacatggctcagctgaaaatgcagaaggagcgccttcaagaagagctcaaggagctggtgaaaaagtcacgtaagcagagtgagctcgccactgtggagtcgcagatcaagggtcttgaaaacaggcttaaatatagtatggtcgatttggagtcctccaagaagtcaattagtcagtatgacaatcagttgcagcaagtccaatcgcagttggacgaatttggagtgagtttccctttcaagttacaaaattaaacctaatttataatcttgtctatcccaattttgcagcccaagatccttgagatcgagcgtcgtatgcaaaaccgcgaggagcacatccaggaaatcaaagaaaacatgaacaatgtggaggacaaagtatatgcctctttctgccgtcgcttgggcgtgaagaacatacgacaatacgaggagcgtgagctcgtcatgcagcaagagcgagcgcgtaaacgggctgagttcgagcagcagattgattccataaactcgcagctggacttcgagaaacagaaagacactaaaagtaagtatacaaaatactatgcttttaaaatgccaaacaaatgcctgccttcacagaaaacgttgagcgctgggagcgcagcgtgcaggatgaggaagatgccctagagggactcaaattggctgaggcacgctatttaaaggaaatcgacgaggataaggagaaaatggaaaaattcaagcaggacaagcaggccaagaagcaagccgtggatgacatggaagaggacatatctaaagctcgcaaggatgtggcaaatttggccaaggagatccataacgtgggcagtcatttatctgcggtagagtctaagatcgaggccaagaaaaacgaacgtcagaacatactgttgcaagcaaaagtaagttaaagtaattatatgataactattactctgtcttataatgtattattcactctgtagaccgattgcatcgtggtaccactgttgcgcggctcgctggacgacgcagtgcgacaaagcgatccggatgtcccatccacctctgcagcgatggaaaatatgtaagtttatttaatcacagcatcaaaaacaactgaactaaagtacgttattgattcattttcagtattgaagtggattattcatctctaccacgagagtataccaagctgaaggatgactccgctttcaaaaagacccacgaaatgcttcaaaaggacctgcaaagcaagctggacgtcttggagcgcatacagacacccaacatgaaagcactgcagaaactcgatgctgtaacggaaaaagtgcaatccaccaatgaggagtttgagaatgcgcgcaagaaagcaaagagggccaaggcggcatttgaacgggttaagaacgaacgctcctcgcgattcgttgcgtgttgccagcacatatcggacgccattgacggcatctacaagaaattggctcgcaacgaggcagcccaggcttatatcggtcccgacaatcctgaggaaccatatctggatggtattaactataattgtgtggcgccaggcaaacgtttccaacccatgaacaacttgagtggtggcgaaaaaacaatagcagccttggctctgctcttctcgacccacaggtatgcagatataatatttttccacattttgagagtaaatattaatatatttttatgcagctttcatccagcgccgttctttgtccttgacgagattgatgccgccttggacaacacgaatattggcaaagtcgcttcgtatataagggatcacacaaccaacctgcaaaccatcgtcatttccctgaaggaagagttctatggtcatgctgatgctcttgtgggcattacgcctggggtacgtactcaactggtgtaagtttaggcaagcctaattttggtttactcttgacttccaggaaggcgactgtctcgtatcaaatgtttacataatggacttgacaacgttcgaggacacgtaaagttcatatgtcggatgtatattaagtattagatgtaactttaaagtaaatctcgggatttccaattaataaagccagtaaatgtgtagacgtacaatttttcaaactattccattacacactctagtaattcgaaaattatacttacttcaaagaaagataggaaccacttagatgttttgaaaatatgttctgcaactttaatagtttcctttatttaggcttgcgttggttgtactgtaccggagaaagttaaatgtgtttggatgtgtgaaattatggtttgatggatggatgcttttggtatatgtaaaacaactgggtttttgcttttagtttcaatttttagtttttctcttttttttttcttcacgtaaaaaactttttgtatttcatcaagaacaaaaacaaacaatttgattattcagtttcggtttgtatcattaatttaaaataatcattgcaaacagataaatattgcatcggctagttagtgtgtcagtttcattgattcattattatcttttgtgtgttggctgcctgccggctatggcgataatcgataaggctacgatacaagggcacgcctgtgggagattgagataaggtttggtaaactaaaaaaaaaaaaaataaaatagtatcgattaagccagattcgagaggcttcaggcttcgatttctgtgcaattagtgggactctgattttctttaatagggaatgcctaatttatactttatacatacgaactaaaatgtttatggcgtttcatatatacacacacttgtaaatacaaagatttgtctcattagcgcttaaatattaatttgcctttctgtggatttgatcttcgggttgtcctcgttctcgatgcggcattcatggttggtgttttgattccgttgggtatgatgttcttctattgtgtccaggatggttcattgtgcttgctgttggtgtaactcttgtcctgtgctgtcgatgaactgttgtggctgt

SEQ ID NO: 12857 - DNA, 3808 bp, DROSOPHILA
cggatacggtcatactgtcataagagaaaaaaaattatttcgcgctcatattgttatttttcttggatatttgttgcaatcgagcgtgtgaatgaccgaagaggacgacgatgtggcccaaagggtggcgacggcgcccgtccgcaagccggacgacgagacggccttcctggagtacatcgaaatggagaacttcaagtcctaccgcggtcacatagttgtgggtcctctgaagcaattcaacgctgttattgggcccaacggatcaggcaagtcaaacttcatggatgccatcagtttcgtgatgggcgagaagaccagcagtttgcgagtaaagcgcctgaacgacctcatccatggctcctccattggcaagcccgtttcccgcagttgctacgtgaccgccaaatttgtgctgaacgaggagcgccacatggacttccagagggcggttatcggcggctcctcggaatatcgtatcaatggagagagcgtatcgagcagcacgtacttgaacaagctggagaaaattggcatcaatgttaaggccaagaactttttagtattccagggagctgttgagaacatagccatgaagacacccaaggaacgcactgctctatttgaggaaattagcggttctggcctgcttaaggacgactataatcgacttaaacaagaaatgattgttgccgaggaggagacccagtttacttaccaaaagaagaagggcatcgcggcggaaagaaaagaagccaagcacgagaagatggaagctgatcgctacactcgcctgcaaaatgaatacaatgaaaaacaagtggagtatcaattatttaggctattccacgtggagagggacatccggaagtttacgagcgatttggaagtgaggcaacaggaagttaaagcagtcgaacagcgaaaagaagctgccgatgaaatcctgcgcgaaaagaagaaagacgccggaaaaatcacccgagacctggccaaaatcgatcaggaaatcagagagtttgaaacccagatgaacaaacgcaggcccctttacatcaaggccaaagagaaagttacccactgcaagaagaagctcatttccctacagaagactctggaaacagccagggaggcggacaatgcccatcagtcggacatacggaaactggagaagcagctggctgatgtggaggccctgaaaaaacgtttcgaggacgagatcgagaacgagtcgcagcgccgcggcaaaagcgttaacatggaagagggccttgtgcaagagtacgatcgcctgaagcaggaggcggaagccacagctacgcagtaccgttcagagctggactcagtaaaccgggagcaaaaatccgaacaggacacgcttgatggggagacaaatcgtcgcgcctccgtagaggagtccttcaagaagctcacattacagcgcgaggaagctgtaaagcgtcgagacaaactgatggatcacatcaaatcatcacaggctgccttggaggaacagaaccggatcaaggacgagctccggcgagatgttggcacatccaaggagaagatagccgaaaagcaacgcgaattggaggacgtacgcgatcaactgggcgatgccaagagcgacaagcacgaggatgctcgtaggaaaaagaagcaggaggtggtggagctcttcaaaaaacaggttcccggagtgtacgaccgtatgattaacatgtgtcagccgacgcataaacgctacaatgtggccgtcaccaaagttttgggcaagttcatggaagccattattgtggacaccgaaaagacggctagacactgtattcagatcttgaaggagcaaatgctggaagtggaaaccttcttgcccttggactatctgcaagttaagcctctgaaggaacgacttcgtaacatcagcgacccgcggaacgtgcgattggttttcgatgtactaaagtttgagcctcaagagatcgaacgggctgtgctcttcgccacaggcaatgctctcgtttgcgagactcccgaggacgccatgaaagtggcttacgagatagaccgatcacgtttcgatgctctggccctggacggaacattctaccagaaatcgggtctcatatctggcggtagtcacgatctggctcgcaaagctaagcgatgggacgagaagcacatggctcagctgaaaatgcagaaggagcgccttcaagaagagctcaaggagctggtgaaaaagtcacgtaagcagagtgagctcgccactgtggagtcgcagatcaagggtcttgaaaacaggcttaaatatagtatggtcgatttggagtcctccaagaagtcaattagtcagtatgacaatcagttgcagcaagtccaatcgcagttggacgaatttggacccaagatccttgagatcgagcgtcgtatgcaaaaccgcgaggagcacatccaggaaatcaaagaaaacatgaacaatgtggaggacaaagtatatgcctctttctgccgtcgcttgggcgtgaagaacatacgacaatacgaggagcgtgagctcgtcatgcagcaagagcgagcgcgtaaacgggctgagttcgagcagcagattgattccataaactcgcagctggacttcgagaaacagaaagacactaaaaaaaacgttgagcgctgggagcgcagcgtgcaggatgaggaagatgccctagagggactcaaattggctgaggcacgctatttaaaggaaatcgacgaggataaggagaaaatggaaaaattcaagcaggacaagcaggccaagaagcaagccgtggatgacatggaagaggacatatctaaagctcgcaaggatgtggcaaatttggccaaggagatccataacgtgggcagtcatttatctgcggtagagtctaagatcgaggccaagaaaaacgaacgtcagaacatactgttgcaagcaaaaaccgattgcatcgtggtaccactgttgcgcggctcgctggacgacgcagtgcgacaaagcgatccggatgtcccatccacctctgcagcgatggaaaatattattgaagtggattattcatctctaccacgagagtataccaagctgaaggatgactccgctttcaaaaagacccacgaaatgcttcaaaaggacctgcaaagcaagctggacgtcttggagcgcatacagacacccaacatgaaagcactgcagaaactcgatgctgtaacggaaaaagtgcaatccaccaatgaggagtttgagaatgcgcgcaagaaagcaaagagggccaaggcggcatttgaacgggttaagaacgaacgctcctcgcgattcgttgcgtgttgccagcacatatcggacgccattgacggcatctacaagaaattggctcgcaacgaggcagcccaggcttatatcggtcccgacaatcctgaggaaccatatctggatggtattaactataattgtgtggcgccaggcaaacgtttccaacccatgaacaacttgagtggtggcgaaaaaacaatagcagccttggctctgctcttctcgacccacagctttcatccagcgccgttctttgtccttgacgagattgatgccgccttggacaacacgaatattggcaaagtcgcttcgtatataagggatcacacaaccaacctgcaaaccatcgtcatttccctgaaggaagagttctatggtcatgctgatgctcttgtgggcattacgcctggggaaggcgactgtctcgtatcaaatgtttacataatggacttgacaacgttcgaggacacgtaa

SEQ ID NO: 12858 - protein, 1238 aa, DROSOPHILA
MTEEDDDVAQRVATAPVRKPDDETAFLEYIEMENFKSYRGHIVVGPLKQFNAVIGPNGSGKSNFMDAISFVMGEKTSSLRVKRLNDLIHGSSIGKPVSRSCYVTAKFVLNEERHMDFQRAVIGGSSEYRINGESVSSSTYLNKLEKIGINVKAKNFLVFQGAVENIAMKTPKERTALFEEISGSGLLKDDYNRLKQEMIVAEEETQFTYQKKKGIAAERKEAKHEKMEADRYTRLQNEYNEKQVEYQLFRLFHVERDIRKFTSDLEVRQQEVKAVEQRKEAADEILREKKKDAGKITRDLAKIDQEIREFETQMNKRRPLYIKAKEKVTHCKKKLISLQKTLETAREADNAHQSDIRKLEKQLADVEALKKRFEDEIENESQRRGKSVNMEEGLVQEYDRLKQEAEATATQYRSELDSVNREQKSEQDTLDGETNRRASVEESFKKLTLQREEAVKRRDKLMDHIKSSQAALEEQNRIKDELRRDVGTSKEKIAEKQRELEDVRDQLGDAKSDKHEDARRKKKQEVVELFKKQVPGVYDRMINMCQPTHKRYNVAVTKVLGKFMEAIIVDTEKTARHCIQILKEQMLEVETFLPLDYLQVKPLKERLRNISDPRNVRLVFDVLKFEPQEIERAVLFATGNALVCETPEDAMKVAYEIDRSRFDALALDGTFYQKSGLISGGSHDLARKAKRWDEKHMAQLKMQKERLQEELKELVKKSRKQSELATVESQIKGLENRLKYSMVDLESSKKSISQYDNQLQQVQSQLDEFGPKILEIERRMQNREEHIQEIKENMNNVEDKVYASFCRRLGVKNIRQYEERELVMQQERARKRAEFEQQIDSINSQLDFEKQKDTKKNVERWERSVQDEEDALEGLKLAEARYLKEIDEDKEKMEKFKQDKQAKKQAVDDMEEDISKARKDVANLAKEIHNVGSHLSAVESKIEAKKNERQNILLQAKTDCIVVPLLRGSLDDAVRQSDPDVPSTSAAMENIIEVDYSSLPREYTKLKDDSAFKKTHEMLQKDLQSKLDVLERIQTPNMKALQKLDAVTEKVQSTNEEFENARKKAKRAKAAFERVKNERSSRFVACCQHISDAIDGIYKKLARNEAAQAYIGPDNPEEPYLDGINYNCVAPGKRFQPMNNLSGGEKTIAALALLFSTHSFHPAPFFVLDEIDAALDNTNIGKVASYIRDHTTNLQTIVISLKEEFYGHADALVGITPGEGDCLVSNVYIMDLTTFEDT

SEQ ID NO: 12859 - DNA, 5142 bp, DROSOPHILA
aaaaaaattcaaaatcaacaaaaaaaattgttgtgtaatcagtgtgacgttctagtgtaatacattttattcagcattgccccattccaaaattgatttgaaaaatgaatttgtttggtttttatttaagcataaaattgcgtatatttcttaaactcaatttacagatttttcgtttgttacattctttttacaagtttgaatcagaaaatatatatgtatatatgtgtttatctttagtgttaatatatagttgttattattgttgaaattcaatttaaggatttcatcttgccacatacatctacgcacttatttattccagctaggtcaaatagaaacgaattaacataagcgaattaatacatataaaattacgataaatcacaaaaaatgtttcgcaaaaatttctgctacagttaacgcctactaaatcagcttgatcgcgcaatgatactcgacgctagaaaaatatacacacatttatctacacctctaactgccatttagtaaggccttggctagtgacaaaggatcttgcaaagttaaagcttacggataaaaaactcttgtccactctaaaaggtgcttccctacgtcccgaaacaaaacgaagaacagaaaacataatgtgatatttataaaatgcgagccgaacttaaagctggcgctatcttctgatatgaacaaatatcttttagtttagtctagtttagtttagttcgaagctttattgtagactcgtttgatagacgctcagttggtcattggtttggaaataaaaaatatatagctagggtaatatatatatttaagatatatatgatctatatacgcgggccctggctgtggtcatgtggccccatcgcatgggattaggattacgtataaaataaagaaaacaatgtttgcggaacaattgcgattcacagtttgcttttcctccatcgcggccacatttttggtcgtcagctgcgccttctagcgccattggccagtcctaagaggcgctggcctgaacgctctgaacactctgcacaccctggacacccatgccggagcgcacctcgcgcacatagcagtcccggcagacgcgtaccgccttggtcagtccgtacttgggcagcggagccgaggcgttggaacagacgccgcaaaagacgccaccgcagttgcgacaatgatgacgccgccggaaggcagtgaagggcgtctggcaggccatgcatcgcggtgccttgccatcgggtatccacgctggcggagaaagcgttgctgatgtgctcgttgccgatgacggcatctgggtttcgttgttgctttgcaatcgtcggcgactgccgctcctggcgctcaccggggagttctgctcagagctggagctagtggaggaagcgcttgagggcgtgttactgcccacggaattgttgcgctgtcgctgcaattggatttgcaattgctgctgctgctgctgctgctccagctgacgcaattgtgcagtgctgctagtggccgagctggctgcctcctgatcccccaggcttcgactgcgcgtcacatgcgagcgactggtggccgtcgttgctccactgggactaccctcgccaggctgactcgccaaatcaatggtattatttcgctgcatactggcgccggcggaatggcgctgaccagtggcttggttgccaccgccggcgctgaacacgttgtccagctcgggatttacttcctcggctgagtaaatgctttggttggagccggcgctctcctgtatcacatcgttctcggaggcccggaactcgaacagctccgactcctttgtcttttccggtatgtcaatctcctcctgggcggtcgacatgttcatgaggaacacgctgcgcaggatctggcgcaaatcggatgcgaagttcgtttgcagctgatcggccaccccggcgatgcagacaaacaggcggtgcagcaggttctcggtgcttctattgatgaaacaaaatggattagttctggggttaatcaaaaccgcatatattgcgacaaattttactaacttgaacttgagccgagccgttgtgttgcgcatggccagtgatacatcgtcggacagcgaggaggcggcactggtatcgccgctggctaggttctgctcacgatcgggctgaattctttccggatccgccgcctccaggctgcaacgcttgcgaccactgcgcgtcgtgcgatgcggatgtggctgccgatgttgatgctgatgagggtgacggtggtgatggtgatgatggtggcgctggtgatgtcggtgactgtgactgtcgcgatggcgaccgcttggctgctgcatatgctcctcgctcgctttgattgtcgtgggctctgctaggggttcgttgtcgctgctgggcaggcgcagccgctgcaaggtgcgggtggccgccagcatggcagcactggtgctgggctcatcctcctcgagtccctgatgaccctgctgttccgccgttccgtactcgtcatcttcgctggccacgaagttgtccgtgagaggaacctcctgcggctgcagcagattgcccagattggtgttaggtatgaggtagccggaggcacagtccgccgacacgatgtctttgagcaactgctcttcgtccgtgccatcgtcgctgctttctatatcctcttcatctacgtcaatatcgtcgtcgtcttcgtcctcatcgtcgccatcgctccagtccgctggtggattggtggagcttgtcgccgccgatgatgtcgaggctatcgagtgcgagggtgtcggcgagggggctggcgaggcggtgggcgtgctggtggccgatagcgacaacatggacggagaacgcagcgtagctgcctccactgttggattagtgctactgttgctgttgctattatggttgttgtttcgctgatccaccagccgctccacagtcctgtgcgtatttgttgtccccgcggtggtggtggtggtgctagtggtgttggtgctactgctgctatggttgttgttactgctgttgttattgttttggctactgctcgtcgtaggatgggaactgtgctccggactgggcgcttcaatgctgctcgagccaagtggcacctggaatacataaagaggattcattacacttcagattgtaccttttgattttaagccaagggttactcaccttagtgttgatgtcctcgttggtgcatagaagcttctccagctgatacaattcctggttgttgagattgcgcaggagatcgcggatcttgatgaggattgtgcggaagggacggaacatctccgacagctgatcacccggcatgtccatgttgagcggccccttggcatagaccaccaagccagcaacaatggccagccgtggaatggagaacatcaggccgggatcaaaggcatcaaccatctcctggtcgagcaggccaatcttcagagctcgctgcagcgtctccgagaagagcactcctatccactgctgcatctcgtactcatggcgagacttcacctgcaccatggcgctcacatagctcaactcgaactcggcgaacagccggtcgaagatcttcagactctcgtatagctgctctgtggtggaatcgttcaagtccagatgcagtgtcttgctgttcggcacattgttcttcaaacactgatccctcaataggacgcgcacattgcccaaactcttggtcaccgcttgggccagtggacgcatctccttgctctccgtctctcggttcataatcgaggagcccgccgccaggcactcagcgccgaaccacagttgcccggccaagttctcttgaagcacctcctcggggaacttggcgcgaaaggcacgaggatcacgatcttcgccgagtagttcctccattatcaagttcgtgatggccagcactttgtcctgcgaacagaaatgcaattatttttggtccagttactattccagtcttccagaaactcacctgattctgccgcagtctgctgaccagtctggtgcatcgatccggctccgcgcgtccatcgaagctgtccaactcgctggccaccgctgtgagggaacgatccgcatggaagaagcgggccagcagcgatttgtcatcagcctgttaaaataaaatggagatgcaatttggatgagtaattggtcgtagataagcagtgccccgctttcccgctttttgccccaactgaaatcaatgccagcttatcgctctccaagtgcaacaaattataatgggcaatcgctgaacttgagggatcgtgtgacaattgcaatgggcaatgattggaggagtggggttgggttggaggtggtacacgacacacgatggccgaatggcgataaggatgactcaataagccactaaacaacacgtagacgctatcatccagctatacatacgaccggcttaattagcaccgctaattttcgttgatttcacaacagatccacaaatcacgtatgctaatattgggctctaacaatgcggctcaaaataataaatcacactttgcattgcgaaaatgttcttttaatatttgcatgaaaaatcactcatacgcagagttggcttactaaaggaatttaacttattttagtaattttattggtagttaggagcggatgtaaaaaccaagttgtgatacttttagtttgatggccgctgtaagatcagagccatcgattttgcaaccggtgctgtaagccgatgccacgaataacaattatgtgcttcatgtgaggggcagagcaacaggggcacagcctgcccactgggatgatgcaatcttggatgagcgcttctttcttcccatccaacatgcaacaagtgggcttagccgcgccgtgtctgaaatctcaatgatccattaaatcacgtggctctacttaagcggggctgccaaccccaaaacaaatcgcacgagatgtacccagctggagagtacggggtatgcaaaggtgccgtagggaggggagcagagcgagagagactgacgatagagcaagttatcggcggttggttgaacttgttttcaccggcctttgtgtgagttgctcgactgctacactcgtccagtgttttcgcatatgtgctccgcttaaatat

SEQ ID NO: 12860 - DNA, 2939 bp, DROSOPHILA
aacaggctgatgacaaatcgctgctggcccgcttcttccatgcggatcgttccctcacagcggtggccagcgagttggacagcttcgatggacgcgcggagccggatcgatgcaccagactggtcagcagactgcggcagaatcaggacaaagtgctggccatcacgaacttgataatggaggaactactcggcgaagatcgtgatcctcgtgcctttcgcgccaagttccccgaggaggtgcttcaagagaacttggccgggcaactgtggttcggcgctgagtgcctggcggcgggctcctcgattatgaaccgagagacggagagcaaggagatgcgtccactggcccaagcggtgaccaagagtttgggcaatgtgcgcgtcctattgagggatcagtgtttgaagaacaatgtgccgaacagcaagacactgcatctggacttgaacgattccaccacagagcagctatacgagagtctgaagatcttcgaccggctgttcgccgagttcgagttgagctatgtgagcgccatggtgcaggtgaagtctcgccatgagtacgagatgcagcagtggataggagtgctcttctcggagacgctgcagcgagctctgaagattggcctgctcgaccaggagatggttgatgcctttgatcccggcctgatgttctccattccacggctggccattgttgctggcttggtggtctatgccaaggggccgctcaacatggacatgccgggtgatcagctgtcggagatgttccgtcccttccgcacaatcctcatcaagatccgcgatctcctgcgcaatctcaacaaccaggaattgtatcagctggagaagcttctatgcaccaacgaggacatcaacactaaggtgccacttggctcgagcagcattgaagcgcccagtccggagcacagttcccatcctacgacgagcagtagccaaaacaataacaacagcagtaacaacaaccatagcagcagtagcaccaacaccactagcaccaccaccaccaccgcggggacaacaaatacgcacaggactgtggagcggctggtggatcagcgaaacaacaaccataatagcaacagcaacagtagcactaatccaacagtggaggcagctacgctgcgttctccgtccatgttgtcgctatcggccaccagcacgcccaccgcctcgccagccccctcgccgacaccctcgcactcgatagcctcgacatcatcggcggcgacaagctccaccaatccaccagcggactggagcgatggcgacgatgaggacgaagacgacgacgatattgacgtagatgaagaggatatagaaagcagcgacgatggcacggacgaagagcagttgctcaaagacatcgtgtcggcggactgtgcctccggctacctcatacctaacaccaatctgggcaatctgctgcagccgcaggaggttcctctcacggacaacttcgtggccagcgaagatgacgagtacggaacggcggaacagcagggtcatcagggactcgaggaggatgagcccagcaccagtgctgccatgctggcggccacccgcaccttgcagcggctgcgcctgcccagcagcgacaacgaacccctagcagagcccacgacaatcaaagcgagcgaggagcatatgcagcagccaagcggtcgccatcgcgacagtcacagtcaccgacatcaccagcgccaccatcatcaccatcaccaccgtcaccctcatcagcatcaacatcggcagccacatccgcatcgcacgacgcgcagtggtcgcaagcgttgcagcctggaggcggcggatccggaaagaattcagcccgatcgtgagcagaacctagccagcggcgataccagtgccgcctcctcgctgtccgacgatgtatcactggccatgcgcaacacaacggctcggctcaagttcaaaagcaccgagaacctgctgcaccgcctgtttgtctgcatcgccggggtggccgatcagctgcaaacgaacttcgcatccgatttgcgccagatcctgcgcagcgtgttcctcatgaacatgtcgaccgcccaggaggagattgacataccggaaaagacaaaggagtcggagctgttcgagttccgggcctccgagaacgatgtgatacaggagagcgccggctccaaccaaagcatttactcagccgaggaagtaaatcccgagctggacaacgtgttcagcgccggcggtggcaaccaagccactggtcagcgccattccgccggcgccagtatgcagcgaaataataccattgatttggcgagtcagcctggcgagggtagtcccagtggagcaacgacggccaccagtcgctcgcatgtgacgcgcagtcgaagcctgggggatcaggaggcagccagctcggccactagcagcactgcacaattgcgtcagctggagcagcagcagcagcagcagcaattgcaaatccaattgcagcgacagcgcaacaattccgtgggcagtaacacgccctcaagcgcttcctccactagctccagctctgagcagaactccccggtgagcgccaggagcggcagtcgccgacgattgcaaagcaacaacgaaacccagatgccgtcatcggcaacgagcacatcagcaacgctttctccgccagcgtggatacccgatggcaaggcaccgcgatgcatggcctgccagacgcccttcactgccttccggcggcgtcatcattgtcgcaactgcggtggcgtcttttgcggcgtctgttccaacgcctcggctccgctgcccaagtacggactgaccaaggcggtacgcgtctgccgggactgctatgtgcgcgaggtgcgctccggcatgggtgtccagggtgtgcagagtgttcagagcgttcaggccagcgcctcttag

SEQ ID NO: 12861 - protein, 920 aa, DROSOPHILA
MEELLGEDRDPRAFRAKFPEEVLQENLAGQLWFGAECLAAGSSIMNRETESKEMRPLAQAVTKSLGNVRVLLRDQCLKNNVPNSKTLHLDLNDSTTEQLYESLKIFDRLFAEFELSYVSAMVQVKSRHEYEMQQWIGVLFSETLQRALKIGLLDQEMVDAFDPGLMFSIPRLAIVAGLVVYAKGPLNMDMPGDQLSEMFRPFRTILIKIRDLLRNLNNQELYQLEKLLCTNEDINTKVPLGSSSIEAPSPEHSSHPTTSSSQNNNNSSNNNHSSSSTNTTSTTTTTAGTTNTHRTVERLVDQRNNNHNSNSNSSTNPTVEAATLRSPSMLSLSATSTPTASPAPSPTPSHSIASTSSAATSSTNPPADWSDGDDEDEDDDDIDVDEEDIESSDDGTDEEQLLKDIVSADCASGYLIPNTNLGNLLQPQEVPLTDNFVASEDDEYGTAEQQGHQGLEEDEPSTSAAMLAATRTLQRLRLPSSDNEPLAEPTTIKASEEHMQQPSGRHRDSHSHRHHQRHHHHHHHRHPHQHQHRQPHPHRTTRSGRKRCSLEAADPERIQPDREQNLASGDTSAASSLSDDVSLAMRNTTARLKFKSTENLLHRLFVCIAGVADQLQTNFASDLRQILRSVFLMNMSTAQEEIDIPEKTKESELFEFRASENDVIQESAGSNQSIYSAEEVNPELDNVFSAGGGNQATGQRHSAGASMQRNNTIDLASQPGEGSPSGATTATSRSHVTRSRSLGDQEAASSATSSTAQLRQLEQQQQQQQLQIQLQRQRNNSVGSNTPSSASSTSSSSEQNSPVSARSGSRRRLQSNNETQMPSSATSTSATLSPPAWIPDGKAPRCMACQTPFTAFRRRHHCRNCGGVFCGVCSNASAPLPKYGLTKAVRVCRDCYVREVRSGMGVQGVQSVQSVQASAS

SEQ ID NO: 12862 - DNA, 5248 bp, DROSOPHILA
aaattgtttgaattgttgaattgtttctccatcgaacatattcaatcctttcttctgcactcatcatttagttgttctctaaaataatgttataatataataaacttgcaaaaatgtcacgtactacatatatataacatgttttgaaagtgtaatcgttcatctttttttttttggttattttttgtaatgcttgctttgcttagctctcgaaactaaggtaaaaataaacaaatctgccaaacttttccagcaatctgcttcgtattttttttttttgtagtaacgtgtagccaaggtccaaccaaacgccttagtaggcgtggttggccacgaacagggatccagatccggcaccagcgctgccggcaacgtacttgccctgagcagcatcaccgttggcctgggggagggtaaagaaagcggggaaaattgattaatttcgttgtgagaaatgcctactcctaattattacttagttgtaacttggcgagccgcagcaaaaaagtttttcggccagcatgaaaaagttttcacactgatttttgctgcgctcgaagaacttccgccactttttccacctgcggcaattttctaaaaactttccacgcatccaagcgcacgaatacatgctgcgtactgcggaaagttttggaaaatttaatcttgcaagttctttggaggaaaattatgattcgattaaatatatgtaacagctctccgaacgaattttacgttgttttcaacttaactgtcaggtacagatattccgaattattattctaattaacagtaggaagtttgcaaagggctttcatgaataaagttagacaagacatttttaattaaaatgtatttaaattaaattaaaaggtaaaataaaatcgaatttttgtttaaagctaactaaagtaaacaaaatcataagcaaggtattattagaaatatataatttatttctgttcgccaaaaatattttctttaaggtctagtcagtttattcggtaaaatgtaaaaatgtataaaaggaatatatttgcagttccattgttggaggaatataaatgttgcccgtctcactccagctgggcctcgatcagtaactcttgcggattatctggattcggcttgggatatagcttcgctcgattgtgactcgggattagtgcgtggcatttaggacttagtatttgtgctgggcgacaaagaggttggcattgccggcaaacgacggaattgagccgggcacgtaaataccctgacaggcctgggaattggcctgtggaagcgggaggagagcgggattttggttgggattaatcagattttgggcttttgtggattaggtttagagcaagcgaagcatgagtggcacgaggacagtatgttaaaggcgtttgcgataagtcggatttggtgaaaggcggctatgattcttaagttaccccatgaaagcttgttcatcgccatcttaaggcagcaattcttcaatcctttgatcaatacctgtggtcatccacatgcaaagtatcttttccagcgaaccccttaaccgatccagctgtatagttaccacaagccgcctctccgttagcctaggcatgattaatgtgtggttattgatgatgaaattaatgtctcacgtacaaaagcaaaaaaaggttacaaataatggtagggaaatgaaagggataagattagaggattagaagaacattgtggtcatttgggattggaaatggaatcaatggctgggaatatgctgtatgttatattatacatgtataatatttcttagcccaaggaatacttccgaagcatatacctgacactcttaatacattcaccacttaaattgctaactgcaatcaatcgtgcatagatacaactatccaaggactcaccttggcgcgcttaagcagctcgttctggccggcagcaatgttctccttcttgccagcccaggcacgcaggacggaggcctgcagggcacgaccgtacgagaaggtgagggcccatgggcggatcaagggaacgttgttgatggcactcaggttgacggtggcctcctcctcggactgacctccagacaggaaggtcacgcctgtagacaaacaatcgattagataggattcattgcaaaaacaaggtgaatgcattccaatccagagattacagttggatttgatgactcaccagtaacggcggcgggaacggtgcggcgcagagcctgcacggtggccagggcgatctcctcgggggtgttcttcttggccgactgaccggcggtgaccatgttgggcttcagcagagtaccctccaggtagacgtggtggtcgctcagggccttgtagacggcggccaggacggtctcggtgaccttctgggcgcggtccagatcgtgatcgccatcgggcagaacctcgggctccacaattgggacgatgcgctgcgactggcagatggaggcgtagcgggccaggacattggcgttctccaggatcgactggtaggatggggtgttcttgccgatcttcaggacgcaacgccacttggcgaagtcgcaaccgtccttcttgtactgggcgcaacgggcggccaggtcatccagaccctgggtggtgacctcatcctcagagccgaacagtgggacaacacccttgtcgaccttgatgcccagaatgattcccttcttcttcaggatctcggcgaagggggtgccatcatcggccttctggtagagggtctcgtggaacaggatcactccagagatgttctcggccagcttggggtcagtgctgaacaacagctgacggtaggcacggcggttgtcctcggtgttctccacgccgatgtcctgcagacgcttgcccatggttgggccggactcatcggcggcgaggattcccttgccgggggcaacgattttctgggcgatttcgcgcagctcatcctgcagctccttgctggggtagttgaagtaggtcgtcatttttgagattcgagtgtagttctgcagcacgaagatccatttacgtttgatttggtgtggtgttattttgttggatgaaaaagagtagcggacattgtgttttaataagctagctatcgaattccgcagcggcgcggatgattggaaaccattgcgtaagcacagaattttgaaatatttcgaggtaaaaaataaaactaaaaatttggactaaaatttcgtatacgatccgcacagtctgacaaccaaaatcaagtaactcaaagttacatatgttcctactgaaaaagataacaacggctacagagatagctatcaatcaagtgttggattattttactgaactgacctaattattatttccataaaataaaaagaatatttgtaaaggtcaagttatttaaagtggaactctgagttaaccgattagagccattgagtcatatgctgttgtttaatgatgcggtattatataattttgttttcagtgtcaggtcaatgtcactggtgttttttccaatttaaaaatatttttccattgaagataataaatgctttgcatggtagtgtatttcacagctgattcgatggcaaagagcgggtgattgaatgagattaaaggcgcatgcacggaaaacgtgcttttctctatatctgcagctcttcgctctctctctctcacatttttttttttctaggtttgtcctacactctcaacattcacatataaaatgttgccttttaatagagcttttttagaggttctcacaaacatcaatgaaaattcacattttagaaaaatcctcttggattgtactatacaaagttggaaaagtatcactgcactttttggaatgaaatattatatagtgtcttattttatagtgtctgtaatttgctaaaaactatttgcaaaaaccgaacaattgttttaagcttagatcacaaagaaaaatccgaaccaacctcgacgatgatgtttttgtaactgagcaaagtcacggaaacctcggcaataattccctctgatgtaatcaaagtcatggaatcttgtgtctcactctaaccgaatgcagctgtcttcttcacacccgcataatgcgtgacgtggtaactttcacttttattgccgctgctgctgcgctgttcctgcaggcagcgacgccaacgcagggcgcatgaattttcgcttgacattgaacaaggtcaagcaacaagccttagcaacaaatgttgccagcgaaatttgttgcttacgaaatgcgaatagaaattgttgaaaaccgaaagtcgtgtggcgcgtgtgaagtgcgatagagatagctagtgtccagcaatatgtagatacagatacgaagtcatctgcgatgactaaaaacccattttatacttgtttgacattgacagtgagccaaggactgggaatggcataaatgtcaggttaagagattagacctccgcaacttatcgcgaaatattgtttaccacatcgaccccacatttcccacgccatatatttaacactttgtacacgcgtgaatagcttgtggttcctaagaacagatagatattataaaagcttgatatatgcatatattaaaaatactgcacagtttaagaatatattaatatatctctagaatacaaatcattttttcatctattaatttctaaacagttatctaaacacacttcacagaacgacactagatatgtatgtacacccttatctatagaattatctatagatgttgcggattcactcagcagacaacacccacctacacttgccggcaatcaatcgaagactgaaatgtttcgaaaactaggcgaaatatatacgatgacaaaaaagaaagaggaacgaagagcagccaacgcatgacaacaaaaaacaatcaaaataaatttacgttcctatcaagagaccgtttataaaaataaaccgccacatgtccgtctatatgtattcgtgagcttgctatcagtgaaaattttgaatcgaaaacgacgaaaaaacgagcccccagttgcgttttagttccaaaggttttgcattatcataacgagattttaggtccggcctccttgaacgcagacagtgggtcaaaagaacatccaacagttgagataatactactactactactacgaactgacgtcaactgattagccgtaaacatgggtggtaataattgtatacttgtctgaaaataggaaacttcgagcactcccatacttctatctatgccctta

SEQ ID NO: 12863 - DNA, 1654 bp, DROSOPHILA
taagcaacaaatttcgctggcaacatttgttgctaaggcttgttgcttgaccttgttcaatgtcaagcgaaaattcatgcgccctgcgttggcgtcgctgcctgcaggaacagcgcagcagcagcggcaataaaagtgaaagttaccacgtcacgcattatgcgggtgtgaagaagacagctgcattcggttagagtgagacacaagattccatgactttgattacatcagagggaattattgccgaggtttccgtgactttgctcagttacaaaaacatcatcgtcgagatgacgacctacttcaactaccccagcaaggagctgcaggatgagctgcgcgaaatcgcccagaaaatcgttgcccccggcaagggaatcctcgccgccgatgagtccggcccaaccatgggcaagcgtctgcaggacatcggcgtggagaacaccgaggacaaccgccgtgcctaccgtcagctgttgttcagcactgaccccaagctggccgagaacatctctggagtgatcctgttccacgagaccctctaccagaaggccgatgatggcacccccttcgccgagatcctgaagaagaagggaatcattctgggcatcaaggtcgacaagggtgttgtcccactgttcggctctgaggatgaggtcaccacccagggtctggatgacctggccgcccgttgcgcccagtacaagaaggacggttgcgacttcgccaagtggcgttgcgtcctgaagatcggcaagaacaccccatcctaccagtcgatcctggagaacgccaatgtcctggcccgctacgcctccatctgccagtcgcagcgcatcgtcccaattgtggagcccgaggttctgcccgatggcgatcacgatctggaccgcgcccagaaggtcaccgagaccgtcctggccgccgtctacaaggccctgagcgaccaccacgtctacctggagggtactctgctgaagcccaacatggtcaccgccggtcagtcggccaagaagaacacccccgaggagatcgccctggccaccgtgcaggctctgcgccgcaccgttcccgccgccgttactggcgtgaccttcctgtctggaggtcagtccgaggaggaggccaccgtcaacctgagtgccatcaacaacgttcccttgatccgcccatgggccctcaccttctcgtacggtcgtgccctgcaggcctccgtcctgcgtgcctgggctggcaagaaggagaacattgctgccggccagaacgagctgcttaagcgcgccaaggctaacggagaggcggcttgtggtaactatacagctggatcggttaaggggttcgctggaaaagatactttgcatgtggatgaccacaggccaattcccaggcctgtcagggtatttacgtgcccggctcaattccgtcgtttgccggcaatgccaacctctttgtcgcccagcacaaatactaagtcctaaatgccacgcactaatcccgagtcacaatcgagcgaagctatatcccaagccgaatccagataatccgcaagagttactgatcgaggcccagctggagtgagacgggcaacatttatattcctccaacaatggaactgcaaatatattccttttatacatttttacattttaccgaa

SEQ ID NO: 12864 - protein, 395 aa, DROSOPHILA
MTTYFNYPSKELQDELREIAQKIVAPGKGILAADESGPTMGKRLQDIGVENTEDNRRAYRQLLFSTDPKLAENISGVILFHETLYQKADDGTPFAEILKKKGIILGIKVDKGVVPLFGSEDEVTTQGLDDLAARCAQYKKDGCDFAKWRCVLKIGKNTPSYQSILENANVLARYASICQSQRIVPIVEPEVLPDGDHDLDRAQKVTETVLAAVYKALSDHHVYLEGTLLKPNMVTAGQSAKKNTPEEIALATVQALRRTVPAAVTGVTFLSGGQSEEEATVNLSAINNVPLIRPWALTFSYGRALQASVLRAWAGKKENIAAGQNELLKRAKANGEAACGNYTAGSVKGFAGKDTLHVDDHRPIPRPVRVFTCPAQFRRLPAMPTSLSPSTNTKS

SEQ ID NO: 12865 - DNA, 7414 bp, DROSOPHILA
aattgcttacttctatagaagcatattctatttattaaaaattattaaatattaacttccgtaaatatcctgtgaaataccggggaaaggtatcaagaaaaacatcttttcctttccattcccaaaatcatcaaattcgtttcactagtttctgcactttaaaatacactttccttaaacctcagttctactcgtttcgtgggtatttccccaaagtagcaaaagtgtttcgtcattaagaagacactcactcgtatcctgtgggccggctcctcgtgctccttgtggtgatgataacgctgatgggagtggctgtgggcgcgatgctgcttccgcttgtgcgtcaacgggcggctcctgctccacttattgtcctcgtggtcgtccttgtcgcacctgcgattctcgcagagccgcaaattgctcagttgatggcagcccgcgtgggtggtggtgtgccgcgtggcggtgccaaggccgcagctcctgctgcaggccgtccaattgccgctggtggtgctgttgtggcaggtggcgtaaactgcaacgagtgggaagttggagaggattactaatgagccagctcatgatcggggtgctcattaatcaccgccagaaacgcagttaggaaacatgattcttagtgcaataagaaccaaaccttattggtcacaatgtttgtcctgaacatattttgaatatttaaaaatgctaaacaaatatatatatagtgcttagaaaattatatcaaaaaatcaaaaaaattaatcaaaccttgagcgaattatatgaattcttctgcataatgaagtccgagagagaatcattttcaaccagtgaaatatacgctgttggagattgggataagctaaagctgcttatgtggaagaattggattcttcagtggaaccaaaaaatgcaaattgtatttgccctggtcctgccagttttgtttctttgtcttattctagtacttcgcataatagttttgcccgaaaagatggatgagatccgctacccaaccgtatccatatcggacctaaacctttatatgaggatggtaccacttggaaataggatattgcacgagaatggatcccttaatatacctcgaaacttcctttgctatactccaaataaccctatcaatagtgccattgtgggtgccactgcgataagactaagacttctgggcactagagcctatgacaccgctttgcacatggaacaggatatggtattgcacaacttcttggcaggagttcagtttgaagacaacgagaacgtgaacaccaatgatgcagggtatccacttaatcttaattactcgctccgatttcccagtgagctgcgaaccatgcaaggcccaatcatagacacctggcgtacttctcgtttatttctgtcctacgacacaagtggatcccgtaatagattggataacgatggaggagttccggtcggatatattagggagggctttctgccaattcagcatgccctaaccatgtcctggctggcattggcatcgggagttacggatacaggtattccagccatacaccttcagcgctttccctatagggcctatacctatgaccaattgctgagtggcctgcgtcaactactgcccttcgtaatcctgctgagcttcatctatcccgcctcgactgtgaccaagtatgtgaccagcgaaaaggaacttcagctcaaggagataatgaaattgatcggcgtacacaactggcttcactgggtggcgtggttcgttaagagttacataatgctcatgctggtggtatttcttatcatgagcctgataatggtgaagttttacgcttccgtagccgtacttacattttccagctgggttccggttctattatttctacacacctatgttgttacgagcgtatgtctatgctttatgctagccgttttattttcaaaagccagcacagcttcggcagtggctgccattttctggtttctcacctatataccctattcttttggctactattattacgaacgtcttagcctcatgagtaagctgctcatttcgctgatattttcgaactcggccttgggatttggcatccacgtcatagtaatgtgggaaggaaccggagagggaatcacttggaggaatatgtttcaccccgtctcaacagatgatagtcttacgctgttttatataatcatgacaatgagtttcggatcaataatgttcatatctatttgcctgtatgtggagcaggtgtttcctggagaatacggtgtaccccgtaggtggaacttcatgtgccacaaaaattactggcgacaatacgtgccaagtttgaatattgttcccagtttccaaaccatcctacatggatccgcaaaagcaaagagctgtcgacgtgcaagggaggtgggaatacaattgtttaacctgcaaaaaaactatggcaaactaaaagcggtcaagggtataagtttaaagatgcatcgtaacgaaataaccgtgttactcggccacaatggtgctggtaagaccacaacgatcaatatgataactggtatagttaagcccacaagtggaacggccatagtaaacgggtatgatatacgaacccatttggcaaaagctcgtgaatctttaggaatttgtcctcagaataatatactctttaaagaaatgagcgtacgggatcatattatattctttagtaagctgaaaggaattcgaggtaccaaggccgtggaaaatgaggtgggtaagtatatgaccatgctgaaattgcaggataaatcatatgtggctgccaaaaatctatctggtggcatgaagcgtaagttgtccctttgttgtgctctatgtggaaatgccaaggtggtcctatgtgatgaacccagttcaggaatcgatgcagccggtcgcaggagtctttgggatctattgcaaagcgaaaaggatggacgcaccatactcttaaccactcactatatggatgaagccgatgtcctgggcgatcgcatagctatcctatctgaaggaaaactgcagtgccagggcacctccttttatttgaaaaagagatttggcaccggctacctattggtctgtataatgcagagtggctgtgatgtaggagccgtaacccagttgatacgaaagtacgttcctcccataaaaccggagcgagtgttgggaactgagctaacctatcgcctgcccaccgagtactcaaagaagtttgcagaattactgcaggacttggatgaaaagtgtgcccaactgcagttggtgggttacggcttgagcggagccactttggaagatgtttttatggcagtcaacaccgataaaagggttcaaggtggagcagaagggcctccggtagacggaagtattgattttaaagaactagtttttgatagcaaaacgagagagaaaagacgtatccgccgttgttttatgttttggcaggctctttttcttaagaagttttataccacgactaggaattactggctgctgggtattcagctagttctgcccatagcagtcatggctttgacaatactcaattcacgaggtggtagaatttactacgaactacctgctatgcccatatcaatcaatcagtatagttccgcctatgtcgtattggaggataatacaactgataaaacttcgtccttggccgatgcttactcgaaacacttggagcactacgccagaaggtgcacgttgctaagaacaggcgatctgaagtttgaggactacatactgagccatgacgttaaccatagccggcgaattgatttccatttcctagcaggactcactgtatcggaaaataattttatcgtgtggctaaataataagcccctgcatacggctcctttgacgctcaatttattgcacaacgccttggctattaaattgctcggccaggatgcctctacttacgtaacaaatgagccgttgccatatagcgatgatacaaggactttgagactgaataaaggacaagtgttgggcgctgagatatctataaatttatccctaaccatgtgcttcatcacggccttctatgcgattcccatcataagggaacgagaaactcgagccaaacttttgcaatttttaagtggagttgatgtgtgtgcctactggacaagtcacattgtttgggattacttagtatttgttctctcagctttatcctccatactcaccattgccgcattcaaggagattggctacataacaccactagacctaagtcgttacttctatatgctgctgatatttggatttcccggcattatgctaagttacgctgcatcaggatgcttctccgatgctgccacagggtttactcgcatatccattattaataccttgatgggaactggtctctttttgatgttcatgaccctgaattttgaggcctttcagctgaaggatgtggcggaaaaactagcctggtactttcggttatctccacactacagcttggccagttccactcacagcattcatataggatataatattcgacgcggttgcagtataggtggcatcagaaaattaccaaaacaactgcgctgccgaaatgttcccatatgctgtgatattccaggctattatggctggcgaaagcctggtgttttggtagaaatcacatatatgattatgcttggttctacattatttttactaatagtcatgcacgacgccaaggtatgcaatcttattgccgaaaaattgggaaattgtttttcgaagcgaaaacgtgttgaaggaggaacttctatcgaaaacgatagtgtagtcgccgaacaacgtgtggtccgagaaatgataaactcaggacgaaaagatgtacctcttttggtctacaaaataagcaaacgctatagaagcaaacttgcagttaaggccatttcgtttcatgtaccccatgccgaatgtttcggacttctgggtatcaatggagctggtaagacgtcaacctttaagatgctagctggggatgagaaaataacctctggagaagcctatatagatggcaccaacatatccactcataaggtttatcggaaaatcggttattgtccgcagtttgatgcactgtttgaggacttgactggtcgcgaaaccttaaatatctattgtctgttgcgaggtgtgcaacgacgacatgtaacgcccatatgttggggactggccatatccttcggattcgccaagcacatggataagcaaacgaagcattacagtggcggaaataggcgaaagttgagcaccgccatatcggtacttggaaatccatcggttttatatctggatgagcccaccagtggcatggatcctgcggcaagacgacaactatggcaaataataggcctgattcgaactgctggaaaatccattgtcctaacctcgcacagtatggatgagtgcgaggctctgtgcagccgattggccataatggtcgatggcgaattcaagtgcttgggttcggtgcaaagcttaaagaatcagttctcaaagggcctgattcttaaagttaaagtcaagcacaaaaagaaaacttttcagcgtgttgtagaagattcttcttcctcaaatgacaaaaaatccatttcagaaactgatttaaagtttcttcaaatggcttctgttatggagagttctcaagcagatcgaattttaaaggtgaatcgatttatatcaaaagagatacctgacgcagagctcaaagaggaatataatggactgattacatactatataccacactcaaaaacattgtcgaaaatatttcaactccttgaaactaactcgcataaactgaatatcgaagattacctaattatgcaaacacggctggaggaaatctttttggattttgcttcaaaacgagatagttcagatatctttactaaacggtgggtgcttatacatacatatttcagtcaggttttaaatatatcttatttcaggaaacgttggtgttgctaaataattttttgcgttgttagttggtttttgtaaattcaaatacatttttttatacatttttcatatttggacgtgttttgattattagaagcccctaagctaccttctacatttgcctgtctgtgaaaacattcttcaatgccatgtgtactaattgccgcccaggactgactcctcaggtcctgccaaccgctccgtagatgtctcaaatgctcgatttcccagttaattcgccagaggctattccttgcagctgctggcaggagcgcttaatatcttgtttatttattgcattctgcgcgtttaattaacacttaatccctgtgtaagtaattacgcttttgctccagcatttactcctgctcgtggcctccagtctcgtgatggaataattcatcttcataaatatgcgctgcattctccactcggtttttgggtaggatgtggtttcccgggcgcttaaaaagcattaagttgcgcatcggacacagcacgacacgcccctcagcgccattaactcaggccagtgggcggtgggtgggtcagaaagtggacacaatgggatggccacagccataaacacacttataaaacaataacaaggcattggcagtggaaataaggatgcacttaaaacaaaaatcttgcacattttttctaagctgtaaagttattcacctaatcaccatgaacatttaaactatcttatgttcataaacaaaaatgtaatgtaatgtatgtaaaaacaaaaattaccaaataaaaacgatgaagatatgctttattctgttttctccaagtgtacaggacaacttaccatcagctgttggattctcacatagccacatcttgcaacagtggccgggaacttcgacgaggcgcggcgatcggcatgaaatcgtgtcctccggcgccgggagctgctcattggggcagagcgtggagcaggcgtggcggccattctgcaatgccacattaaaatacattaaatgtggcccattgttgctgctgtggggttgtttatttagctttggccgggcagccgaaaataaagtcataatgtaaagaaaatattggcccaatcgcacaaggacgaccgaaagttggcagggtcctcgacttgggcacgaacttttgcttggtgtttgtttccttatgtgtactttggtatatggtaaaattaacatttcgtgcagaccctcacagctttgtttgtaatccacttttcgtctctaagcggtcacacagcccgatgatacttttttatacccattccgagtctttcgcatcgtcacgaaattgcattgcataaattgcaagtgctcgtgtttgtattatgccacatgataaactaccagcgcagctggaaataaggtgcaaaaaccaaaccag

SEQ ID NO: 12866 - DNA, 4991 bp, DROSOPHILA
atggatgagatccgctacccaaccgtatccatatcggacctaaacctttatatgaggatggtaccacttggaaataggatattgcacgagaatggatcccttaatatacctcgaaacttcctttgctatactccaaataaccctatcaatagtgccattgtgggtgccactgcgataagactaagacttctgggcactagagcctatgacaccgctttgcacatggaacaggatatggtattgcacaacttcttggcaggagttcagtttgaagacaacgagaacgtgaacaccaatgatgcagggtatccacttaatcttaattactcgctccgatttcccagtgagctgcgaaccatgcaaggcccaatcatagacacctggcgtacttctcgtttatttctgtcctacgacacaagtggatcccgtaatagattggataacgatggaggagttccggtcggatatattagggagggctttctgccaattcagcatgccctaaccatgtcctggctggcattggcatcgggagttacggatacaggtattccagccatacaccttcagcgctttccctatagggcctatacctatgaccaattgctgagtggcctgcgtcaactactgcccttcgtaatcctgctgagcttcatctatcccgcctcgactgtgaccaagtatgtgaccagcgaaaaggaacttcagctcaaggagataatgaaattgatcggcgtacacaactggcttcactgggtggcgtggttcgttaagagttacataatgctcatgctggtggtatttcttatcatgagcctgataatggtgaagttttacgcttccgtagccgtacttacattttccagctgggttccggttctattatttctacacacctatgttgttacgagcgtatgtctatgctttatgctagccgttttattttcaaaagccagcacagcttcggcagtggctgccattttctggtttctcacctatataccctattcttttggctactattattacgaacgtcttagcctcatgagtaagctgctcatttcgctgatattttcgaactcggccttgggatttggcatccacgtcatagtaatgtgggaaggaaccggagagggaatcacttggaggaatatgtttcaccccgtctcaacagatgatagtcttacgctgttttatataatcatgacaatgagtttcggatcaataatgttcatatctatttgcctgtatgtggagcaggtgtttcctggagaatacggtgtaccccgtaggtggaacttcatgtgccacaaaaattactggcgacaatacgtgccaagtttgaatattgttcccagtttccaaaccatcctacatggatccgcaaaagcaaagagctgtcgacgtgcaagggaggtgggaatacaattgtttaacctgcaaaaaaactatggcaaactaaaagcggtcaagggtataagtttaaagatgcatcgtaacgaaataaccgtgttactcggccacaatggtgctggtaagaccacaacgatcaatatgataactggtatagttaagcccacaagtggaacggccatagtaaacgggtatgatatacgaacccatttggcaaaagctcgtgaatctttaggaatttgtcctcagaataatatactctttaaagaaatgagcgtacgggatcatattatattctttagtaagctgaaaggaattcgaggtaccaaggccgtggaaaatgaggtgggtaagtatatgaccatgctgaaattgcaggataaatcatatgtggctgccaaaaatctatctggtggcatgaagcgtaagttgtccctttgttgtgctctatgtggaaatgccaaggtggtcctatgtgatgaacccagttcaggaatcgatgcagccggtcgcaggagtctttgggatctattgcaaagcgaaaaggatggacgcaccatactcttaaccactcactatatggatgaagccgatgtcctgggcgatcgcatagctatcctatctgaaggaaaactgcagtgccagggcacctccttttatttgaaaaagagatttggcaccggctacctattggtctgtataatgcagagtggctgtgatgtaggagccgtaacccagttgatacgaaagtacgttcctcccataaaaccggagcgagtgttgggaactgagctaacctatcgcctgcccaccgagtactcaaagaagtttgcagaattactgcaggacttggatgaaaagtgtgcccaactgcagttggtgggttacggcttgagcggagccactttggaagatgtttttatggcagtcaacaccgataaaagggttcaaggtggagcagaagggcctccggtagacggaagtattgattttaaagaactagtttttgatagcaaaacgagagagaaaagacgtatccgccgttgttttatgttttggcaggctctttttcttaagaagttttataccacgactaggaattactggctgctgggtattcagctagttctgcccatagcagtcatggctttgacaatactcaattcacgaggtggtagaatttactacgaactacctgctatgcccatatcaatcaatcagtatagttccgcctatgtcgtattggaggataatacaactgataaaacttcgtccttggccgatgcttactcgaaacacttggagcactacgccagaaggtgcacgttgctaagaacaggcgatctgaagtttgaggactacatactgagccatgacgttaaccatagccggcgaattgatttccatttcctagcaggactcactgtatcggaaaataattttatcgtgtggctaaataataagcccctgcatacggctcctttgacgctcaatttattgcacaacgccttggctattaaattgctcggccaggatgcctctacttacgtaacaaatgagccgttgccatatagcgatgatacaaggactttgagactgaataaaggacaagtgttgggcgctgagatatctataaatttatccctaaccatgtgcttcatcacggccttctatgcgattcccatcataagggaacgagaaactcgagccaaacttttgcaatttttaagtggagttgatgtgtgtgcctactggacaagtcacattgtttgggattacttagtatttgttctctcagctttatcctccatactcaccattgccgcattcaaggagattggctacataacaccactagacctaagtcgttacttctatatgctgctgatatttggatttcccggcattatgctaagttacgctgcatcaggatgcttctccgatgctgccacagggtttactcgcatatccattattaataccttgatgggaactggtctctttttgatgttcatgaccctgaattttgaggcctttcagctgaaggatgtggcggaaaaactagcctggtactttcggttatctccacactacagcttggccagttccactcacagcattcatataggatataatattcgacgcggttgcagtataggtggcatcagaaaattaccaaaacaactgcgctgccgaaatgttcccatatgctgtgatattccaggctattatggctggcgaaagcctggtgttttggtagaaatcacatatatgattatgcttggttctacattatttttactaatagtcatgcacgacgccaaggtatgcaatcttattgccgaaaaattgggaaattgtttttcgaagcgaaaacgtgttgaaggaggaacttctatcgaaaacgatagtgtagtcgccgaacaacgtgtggtccgagaaatgataaactcaggacgaaaagatgtacctcttttggtctacaaaataagcaaacgctatagaagcaaacttgcagttaaggccatttcgtttcatgtaccccatgccgaatgtttcggacttctgggtatcaatggagctggtaagacgtcaacctttaagatgctagctggggatgagaaaataacctctggagaagcctatatagatggcaccaacatatccactcataaggtttatcggaaaatcggttattgtccgcagtttgatgcactgtttgaggacttgactggtcgcgaaaccttaaatatctattgtctgttgcgaggtgtgcaacgacgacatgtaacgcccatatgttggggactggccatatccttcggattcgccaagcacatggataagcaaacgaagcattacagtggcggaaataggcgaaagttgagcaccgccatatcggtacttggaaatccatcggttttatatctggatgagcccaccagtggcatggatcctgcggcaagacgacaactatggcaaataataggcctgattcgaactgctggaaaatccattgtcctaacctcgcacagtatggatgagtgcgaggctctgtgcagccgattggccataatggtcgatggcgaattcaagtgcttgggttcggtgcaaagcttaaagaatcagttctcaaagggcctgattcttaaagttaaagtcaagcacaaaaagaaaacttttcagcgtgttgtagaagattcttcttcctcaaatgacaaaaaatccatttcagaaactgatttaaagtttcttcaaatggcttctgttatggagagttctcaagcagatcgaattttaaaggtgaatcgatttatatcaaaagagatacctgacgcagagctcaaagaggaatataatggactgattacatactatataccacactcaaaaacattgtcgaaaatatttcaactccttgaaactaactcgcataaactgaatatcgaagattacctaattatgcaaacacggctggaggaaatctttttggattttgcttcaaaacgagatagttcagatatctttactaaacgcatttactcctgctcgtggcctccagtctcgtgatggaataa

SEQ ID NO: 12867 - protein, 1660 aa, DROSOPHILA
MDEIRYPTVSISDLNLYMRMVPLGNRILHENGSLNIPRNFLCYTPNNPINSAIVGATAIRLRLLGTRAYDTALHMEQDMVLHNFLAGVQFEDNENVNTNDAGYPLNLNYSLRFPSELRTMQGPIIDTWRTSRLFLSYDTSGSRNRLDNDGGVPVGYIREGFLPIQHALTMSWLALASGVTDTGIPAIHLQRFPYRAYTYDQLLSGLRQLLPFVILLSFIYPASTVTKYVTSEKELQLKEIMKLIGVHNWLHWVAWFVKSYIMLMLVVFLIMSLIMVKFYASVAVLTFSSWVPVLLFLHTYVVTSVCLCFMLAVLFSKASTASAVAAIFWFLTYIPYSFGYYYYERLSLMSKLLISLIFSNSALGFGIHVIVMWEGTGEGITWRNMFHPVSTDDSLTLFYIIMTMSFGSIMFISICLYVEQVFPGEYGVPRRWNFMCHKNYWRQYVPSLNIVPSFQTILHGSAKAKSCRRAREVGIQLFNLQKNYGKLKAVKGISLKMHRNEITVLLGHNGAGKTTTINMITGIVKPTSGTAIVNGYDIRTHLAKARESLGICPQNNILFKEMSVRDHIIFFSKLKGIRGTKAVENEVGKYMTMLKLQDKSYVAAKNLSGGMKRKLSLCCALCGNAKVVLCDEPSSGIDAAGRRSLWDLLQSEKDGRTILLTTHYMDEADVLGDRIAILSEGKLQCQGTSFYLKKRFGTGYLLVCIMQSGCDVGAVTQLIRKYVPPIKPERVLGTELTYRLPTEYSKKFAELLQDLDEKCAQLQLVGYGLSGATLEDVFMAVNTDKRVQGGAEGPPVDGSIDFKELVFDSKTREKRRIRRCFMFWQALFLKKFYTTTRNYWLLGIQLVLPIAVMALTILNSRGGRIYYELPAMPISINQYSSAYVVLEDNTTDKTSSLADAYSKHLEHYARRCTLLRTGDLKFEDYILSHDVNHSRRIDFHFLAGLTVSENNFIVWLNNKPLHTAPLTLNLLHNALAIKLLGQDASTYVTNEPLPYSDDTRTLRLNKGQVLGAEISINLSLTMCFITAFYAIPIIRERETRAKLLQFLSGVDVCAYWTSHIVWDYLVFVLSALSSILTIAAFKEIGYITPLDLSRYFYMLLIFGFPGIMLSYAASGCFSDAATGFTRISIINTLMGTGLFLMFMTLNFEAFQLKDVAEKLAWYFRLSPHYSLASSTHSIHIGYNIRRGCSIGGIRKLPKQLRCRNVPICCDIPGYYGWRKPGVLVEITYMIMLGSTLFLLIVMHDAKVCNLIAEKLGNCFSKRKRVEGGTSIENDSVVAEQRVVREMINSGRKDVPLLVYKISKRYRSKLAVKAISFHVPHAECFGLLGINGAGKTSTFKMLAGDEKITSGEAYIDGTNISTHKVYRKIGYCPQFDALFEDLTGRETLNIYCLLRGVQRRHVTPICWGLAISFGFAKHMDKQTKHYSGGNRRKLSTAISVLGNPSVLYLDEPTSGMDPAARRQLWQIIGLIRTAGKSIVLTSHSMDECEALCSRLAIMVDGEFKCLGSVQSLKNQFSKGLILKVKVKHKKKTFQRVVEDSSSSNDKKSISETDLKFLQMASVMESSQADRILKVNRFISKEIPDAELKEEYNGLITYYIPHSKTLSKIFQLLETNSHKLNIEDYLIMQTRLEEIFLDFASKRDSSDIFTKRIYSCSWPPVS

SEQ ID NO: 12868 - DNA, 3926 bp, DROSOPHILA
gtatttaggacacgcaaaacgaactgccacaaaacgagaataagcgaatattttttgtcaaactgattattgcaaaacgtgtatcgagaaactatttttaatgtacaccagtatgtataattaccgatttgttcattttttgagacaaaacgagaaatacacttttatgaatgacttttgagcgatctattgtagcggttaagtctagtttctttaacgtttatcagctgcttttggtgctaaatcgtattataagttacaatcaaacgaaatcaaatcaaaccagctcttgtagttacccaagtccgattcgatctgtagtcctcccgagtgaaagatgtagcgtggggaaaatcatgtgatgttgcaggaagcaaagctagaaacgaatacacctacctaaagataacaaatctttaagcgatttgtcgcaaagcaatgctatacatatacaaaaactagagatcgtcgccagtataagagtaattttatggtatgccgtaccagccagcagagtaatcctcttacccaacagaccgattggaagccaagttattttccaaaatcaaaccaaactctctttattggccgactaaatatagatattgttaacgtgtatagatgcccattagtagagaccccgatccaagcctaaagatttccctgtaaaataccagtttgatcacattaattttactataactattactattgtaagtacgaaagttttagcattctcaatcatttgtttgcaaacatttctacgcgaaataagtctctcattttatgtttaaaataaaaattgcaaataattgtggaatactttgattgtttaatttggtaaaaggaataaaataaaaagccatatgcttgtgtctgcttatccgtaaggccgtcgattgcgacatttctattgaccaagcagtcagttgccatggataaaatcaatggttcactataggttctcaacatttgcctcatatcattggctgtgaaatagaagagcagtcaaatattttgctaagtttccgattgaaatggaatatatattcaagaaggagcgacgctcctttggagcccgtgttcacttcgaggacaaagatgaggtggtgttcaccgagaactcgaatccggagctagtcaagagctacattctcaaaaaccccgtggaccgggtgacgcaatacgccggacaaacctcactgagtgtggccaatacggaaagggcaacgtacaagagtacgggaatcacccacaatgagggcggatggccaaaggacatcaacatgcatgacccggagcagacggtgcgatacaagcggaaaatcgagaaagacgagaattatatcacccaggtgatgaatctgaccaagcccatggagcactacatccaccaaaacaatgcggtcaacatctatgagaactacttcgaaaatctcgatccagctccactgcccgagccttgtaagtcgcgcacggtcaatgtgtacagggatcccaatcccataaaggtgccagtgaagcatttgtcctggtcaccggatggcggcatcaaaatggccgtcagtcattgcgacatgcggttccagggcgacaagtccaaccagaagtgcaactcgtacatatgggaggtggagaatcccaacgaacccttcctcaccctggaaccgaaggtgccgtgcgtgtgtctcgagtacaaccagaaggatccaaccagtctcgtgagtggcatgtacaatggtcaggtggccgcctgggacacgcgacatggcaaactaccagttatgatcagcgaacgggaggtgtgccatcgggatccggttaactcggtgctttggaacaattccaagagtggcacagagttcttctccggcggttccgatggtcaggtgctgtggtgggataccaggaagcttaccgaaccgctggaccgcctgctcatggatccggtgaagagtgacgatcaggatctctccagatcctatggaatatcagtgctagagtacgagaccaccatacctacaagattcatggcgggaactgagatgggcatgctcttctcctgcaatcgaaagggcaagacgcccacggagaagattcagatacgggtatgctctttggctttaatcacaggacatttcctattgattgtgttgcaatcccgcagatgatgtgccacctcggcccggtgtatgccattacccgaaatccggcgtttgttaagaatttcctaactgtgggcgactggtgtgcccgaatctggtcggaggattgcagagagagctccatcatctggaccaagagcagcagctcgatgctgaccgatggcgcttggagttacacgaagtgagtattcattcaagctaaggttattcaacgtaatctacataatcaattctagagtctcccagttctttatcactcgcatggatggcgtcttggacacctgggatctgctgcagcagcagaacgagcccgttctcacggtcaaggtgtgcgatgaacctctttattgtgtccggaccaacgagaacgggaaattcgtgagctgtggcagccagctgggagccacttttctcgtcgaagtctccgacaacatggtcatgtcagccaagaacgacaaacccctactaacagccgtaagactccattgggaatccagcattctagaatcttgagtcacattttccatatgcagatgttcgagcgcgagaaccgtcgcgagaagatcctggaggccaagtcccgggaaagcaagctgaaagtcaaggccaaccatggccaggatcagggggacacaatgatggtcaacggaaagatcaacatggctccgtttgaagcagcttgcgagcaagctgcctcggaatactttgcggccgtggaacaggaacgccaaaggcggctgccaggcggaaagcgtaggtgaacgaaggcggtttagaaatgtatacccctattacgggagtatccactaatttgtgttctttaatcttccatttcagaggatgcggaggaggctgatgtgtccgaggcggagagttcgaagctgtaaatcccaaacggaactatgtcctttttttgttaaatctaaagtacaagttaaagggaatttgtataggaaataaaaatatagtaaccactttttaaaaaactaattaattcagcataagaggtaaaatttaaaacgtcgtgtgcttttcaacactttttagtttcagtgttggataaaactgcttctagttctttgctcatctcggagtcagttccagctggggctcacaagttcacgagccaattggttcaatcagctgttgtcattcgacattcgcacgcgggattggaaagaaataactaaaacgtttttaaagcacgcttaaagatcaaaaattgtaagtaacttataagacacacagaagcatattcaaacacaaatcaatagacggtgctattgagaacggcaacggcgaagcaacaatttcgcatcagctgtgcgagtaacgtgccagaaatacacttggctacaagttcaagggccgaagaccaaccataatctgtgccaagtgatataatagttgtttccgagtgcgaattaacaaatccagcgctagagtttatgtcagctacttgcaagcgaggtactttctaaaaattcaaagttctgcaattggcggggatcaggtagccaaagtaacccgttgcgtgttgcatggtgtgcggcctacgtgactcagaaacagttatcaatggcgcaacacatacggaaagttcagtgaccaaaatttgtgcagcagccaaacggcaaacgcaacccctgaaactcagacggcgtctaacgtccaactgataaaggtatcgaacgatccgagttctactattaaatattagtgtttatttaactaaacaaatacaacgggtaagacaaaggc

SEQ ID NO: 12869 - DNA, 1753 bp, DROSOPHILA
aagagcagtcaaatattttgctaagtttccgattgaaatggaatatatattcaagaaggagcgacgctcctttggagcccgtgttcacttcgaggacaaagatgaggtggtgttcaccgagaactcgaatccggagctagtcaagagctacattctcaaaaaccccgtggaccgggtgacgcaatacgccggacaaacctcactgagtgtggccaatacggaaagggcaacgtacaagagtacgggaatcacccacaatgagggcggatggccaaaggacatcaacatgcatgacccggagcagacggtgcgatacaagcggaaaatcgagaaagacgagaattatatcacccaggtgatgaatctgaccaagcccatggagcactacatccaccaaaacaatgcggtcaacatctatgagaactacttcgaaaatctcgatccagctccactgcccgagccttgtaagtcgcgcacggtcaatgtgtacagggatcccaatcccataaaggtgccagtgaagcatttgtcctggtcaccggatggcggcatcaaaatggccgtcagtcattgcgacatgcggttccagggcgacaagtccaaccagaagtgcaactcgtacatatgggaggtggagaatcccaacgaacccttcctcaccctggaaccgaaggtgccgtgcgtgtgtctcgagtacaaccagaaggatccaaccagtctcgtgagtggcatgtacaatggtcaggtggccgcctgggacacgcgacatggcaaactaccagttatgatcagcgaacgggaggtgtgccatcgggatccggttaactcggtgctttggaacaattccaagagtggcacagagttcttctccggcggttccgatggtcaggtgctgtggtgggataccaggaagcttaccgaaccgctggaccgcctgctcatggatccggtgaagagtgacgatcaggatctctccagatcctatggaatatcagtgctagagtacgagaccaccatacctacaagattcatggcgggaactgagatgggcatgctcttctcctgcaatcgaaagggcaagacgcccacggagaagattcagatacggatgatgtgccacctcggcccggtgtatgccattacccgaaatccggcgtttgttaagaatttcctaactgtgggcgactggtgtgcccgaatctggtcggaggattgcagagagagctccatcatctggaccaagagcagcagctcgatgctgaccgatggcgcttggagttacacgaaagtctcccagttctttatcactcgcatggatggcgtcttggacacctgggatctgctgcagcagcagaacgagcccgttctcacggtcaaggtgtgcgatgaacctctttattgtgtccggaccaacgagaacgggaaattcgtgagctgtggcagccagctgggagccacttttctcgtcgaagtctccgacaacatggtcatgtcagccaagaacgacaaacccctactaacagccatgttcgagcgcgagaaccgtcgcgagaagatcctggaggccaagtcccgggaaagcaagctgaaagtcaaggccaaccatggccaggatcagggggacacaatgatggtcaacggaaagatcaacatggctccgtttgaagcagcttgcgagcaagctgcctcggaatactttgcggccgtggaacaggaacgccaaaggcggctgccaggcggaaagcgtaggtga

SEQ ID NO: 12870 - protein, 571 aa, DROSOPHILA
MEYIFKKERRSFGARVHFEDKDEVVFTENSNPELVKSYILKNPVDRVTQYAGQTSLSVANTERATYKSTGITHNEGGWPKDINMHDPEQTVRYKRKIEKDENYITQVMNLTKPMEHYIHQNNAVNIYENYFENLDPAPLPEPCKSRTVNVYRDPNPIKVPVKHLSWSPDGGIKMAVSHCDMRFQGDKSNQKCNSYIWEVENPNEPFLTLEPKVPCVCLEYNQKDPTSLVSGMYNGQVAAWDTRHGKLPVMISEREVCHRDPVNSVLWNNSKSGTEFFSGGSDGQVLWWDTRKLTEPLDRLLMDPVKSDDQDLSRSYGISVLEYETTIPTRFMAGTEMGMLFSCNRKGKTPTEKIQIRMMCHLGPVYAITRNPAFVKNFLTVGDWCARIWSEDCRESSIIWTKSSSSMLTDGAWSYTKVSQFFITRMDGVLDTWDLLQQQNEPVLTVKVCDEPLYCVRTNENGKFVSCGSQLGATFLVEVSDNMVMSAKNDKPLLTAMFERENRREKILEAKSRESKLKVKANHGQDQGDTMMVNGKINMAPFEAACEQAASEYFAAVEQERQRRLPGGKRR

SEQ ID NO: 12871 - DNA, 3632 bp, DROSOPHILA
cagtgactaaccgcctcgcgaccgtttcgttcgcccgcgacgccctttgagttcaacgcattcacatttcccagtgtgcagattttctttttgttttgtccgcagtcaccgcgcactgcattcaaaacagcgcccaacacacaatacgcgaaccacagcggcacagcatacacaatacacacccagcatggacacgagtggcggaaatttgggtaaggatctggtcatttcgtatttcaaattgaattttcaacctctggtacagcgtgtactcgccatggcagttgggccattcgctggcgcgcaaattgatctcctcgatttgcggctcccccttcgcttgtctacccccctgccacaacaccggcaagctaacttatgagtgcgtattgcattgcggtgtgcatatatctggcaatgggtctgaatttagatttttcgtaagtttgtgcactctgctgacgaaacgaaaaagtgcttttaacgatctgggaacatcccatggcgctgcgttgccagacagcttgttacacacatgggcatttgtatgcttgtgttggtgtttttagtggggtacagtcttgggggcaaatgtttttacactgtaaaaagtatgctaacgtgcaattagagaattggcaagcacataaatttaattagcaagttatatttggcattggtgtgtcctatgagtttagacgagttgttgagatgggtggttaatgggtggaaaaaaacgcgcacaaaataataacgtcaacaaggggctgccacccctttcaatgttcttatgcaaaagtagcagtcaaatatattactctatttcaaagtaaatatttaaagtagtagcctgttttaattaatgttaatgttttataattattttaccattataaatttttttttttttaaataatttaacgtatcgataagtgggtggcctatcggacaacctccaccatgtggcaactctggcgcacagcacatttcagggtttacgcaatttcgagccgtaagattttcttcgacctgtgaaaaggctttttaccccctgccaggatagctaaatcttcactcgtaagtgcagcaggagctatccatcgcgtagctcatattctaatccacacatttagttaaaagcgccaataggaagcccagaaccatgtcacatgcatttgccgccgccgtctgccggtccaccgcatccatgtcattggccctgcgctgcagccggcgcgccatgagctctgccagaatgctgcgtatggcgggtgccactgccacctccacggcctgcaaggattggcagagaaacggactacttgctgcgcccagaaccggcaacatgcagcagtacctgcgcgagtacgccaacgagaagaaggtgttcgagcgaaccaagccccattgcaatgtgggcaccattggccatgtggatcacggcaagaccacgctcacggcggccattaccaaggtcctggccgacaagcagctggccgagagcaagaagtacaatgaaatcgacaatgcgcccgaggagaaggctcgtggtattaccatcaatgtagcccacgtggagtaccagacggagacgcgtcactacggccacacagattgtccgggacatgccgattatattaagaacatgatcaccggcacagcccagatggatggcgccattctcgttgtggccgccaccgatggcgccatgccccaaactcgcgagcatatgctgctagccaagcagatcggcattgatcacatcgtggtgttcatcaacaaggtggacgccgccgatgaggagatggtcgacctggtggagatggagatccgagagctgcttaccgagatgggctatgatggtgacaagatccctgtggtaaagggctcggcgctgtgcgccctcgaggacaagagtcccgagatcggcaaggaggcgatcctgaaactgctccaggaggtggatagcttcatccccacgcctgtgcgcgagctggacaagcccttcctgctgcctgttgagaatgtgtattcgattcccggacgcggcaccgtcgtcactggtcgcctggagcgcggagtggtcaagaagggcatggagtgcgagttcgtgggctataacaaggtgctgaagtcgacggtgacgggcgtggagatgttccaccagattctggaggaggcgcaagccggtgatcagctgggagctctggtgcgcggcgttaagcgagatgacatcaagcgcggcatggtcatgtgcaagccgggcagtgtgaaggcactcgatcagctggaggcccaggtgtacatcctgtccaaggatgaaggcggtcgcacaaagcccttcatgtccttcatccaactgcagatgttctcccgcacctgggactgtgccgtgcaggtgcagattcccgataaggagatggtcatgcccggcgaagacaccaagctcattctgcgcctcatccggccaatggtcctggagcagggacaacgcttcacgctgcgtgacggaaacctgaccctgggcactggtgtcgtcaccagcactctgcccccattgactgaatcgcagcgatccgagttgacggagggcaagaaggcgcgcgagaagaaggtggcggctaagaagtagatccccggaacgccgtcagtcattaactaaaatcatattcttaagcgatttttatgcatattgtataagttgttggcgctccaatcacaatcgagtaaaatataaacaaacacctatggacaacgaagttttaaaacttggaatattagtagggatcttaaaattgatttaaaatagtacggcttttaagtattactgttgttgcctgacatttcggcatttcaaaggactatttgttatataaagttatgtaagtaagcattgatcattgataaagggcaatatttaatttaggcgccactcatcgattgcttatcgctctatgttaacggcatccgaaatagagtggtatcgaaatggagccgataaaatcaaacaaggccgataataacctgactacgacattttacaacactgctgcaaccgccttgaacgcagctgatgataaagaacattttgaaattgatttgaaaattggcaaaaatgagtacctaccgcgtagactacttgaccggtagattcaagcaccgtaaacgtttgtttgcaaagtaattaataacttattttgtccgcagattccctagacgacacggaaccattgccggagctgagttttgaagactttttggagccaacgtcggagaagagttcccagcacatggaaatcgaagctctggactcagaggaagacaatatcggcggtgaagatctggccgatccggccaacgattccctgaacacgccgcagtttaagaagaacgtggtccacatactggaggacaagaggttaaactcgtccggactaaccgttttgaagtcgcacgccattaagatggtgactgccggaggtactcctccggccaaggcgcaagttacagacgtaaagatactaaacaaattgaaaccaatacccagcagtacgctaaagatcggtagcacgaccatagcgaccaaatccacaccgggcagcataaccaagactttgggcaacttgacccag

SEQ ID NO: 12872 - DNA, 1576 bp, DROSOPHILA
caatttcgagccgtaagattttcttcgacctgtgaaaaggctttttaccccctgccaggatagctaaatcttcactcttaaaagcgccaataggaagcccagaaccatgtcacatgcatttgccgccgccgtctgccggtccaccgcatccatgtcattggccctgcgctgcagccggcgcgccatgagctctgccagaatgctgcgtatggcgggtgccactgccacctccacggcctgcaaggattggcagagaaacggactacttgctgcgcccagaaccggcaacatgcagcagtacctgcgcgagtacgccaacgagaagaaggtgttcgagcgaaccaagccccattgcaatgtgggcaccattggccatgtggatcacggcaagaccacgctcacggcggccattaccaaggtcctggccgacaagcagctggccgagagcaagaagtacaatgaaatcgacaatgcgcccgaggagaaggctcgtggtattaccatcaatgtagcccacgtggagtaccagacggagacgcgtcactacggccacacagattgtccgggacatgccgattatattaagaacatgatcaccggcacagcccagatggatggcgccattctcgttgtggccgccaccgatggcgccatgccccaaactcgcgagcatatgctgctagccaagcagatcggcattgatcacatcgtggtgttcatcaacaaggtggacgccgccgatgaggagatggtcgacctggtggagatggagatccgagagctgcttaccgagatgggctatgatggtgacaagatccctgtggtaaagggctcggcgctgtgcgccctcgaggacaagagtcccgagatcggcaaggaggcgatcctgaaactgctccaggaggtggatagcttcatccccacgcctgtgcgcgagctggacaagcccttcctgctgcctgttgagaatgtgtattcgattcccggacgcggcaccgtcgtcactggtcgcctggagcgcggagtggtcaagaagggcatggagtgcgagttcgtgggctataacaaggtgctgaagtcgacggtgacgggcgtggagatgttccaccagattctggaggaggcgcaagccggtgatcagctgggagctctggtgcgcggcgttaagcgagatgacatcaagcgcggcatggtcatgtgcaagccgggcagtgtgaaggcactcgatcagctggaggcccaggtgtacatcctgtccaaggatgaaggcggtcgcacaaagcccttcatgtccttcatccaactgcagatgttctcccgcacctgggactgtgccgtgcaggtgcagattcccgataaggagatggtcatgcccggcgaagacaccaagctcattctgcgcctcatccggccaatggtcctggagcagggacaacgcttcacgctgcgtgacggaaacctgaccctgggcactggtgtcgtcaccagcactctgcccccattgactgaatcgcagcgatccgagttgacggagggcaagaaggcgcgcgagaagaaggtggcggctaagaagtag

SEQ ID NO: 12873 - protein, 489 aa, DROSOPHILA
MSHAFAAAVCRSTASMSLALRCSRRAMSSARMLRMAGATATSTACKDWQRNGLLAAPRTGNMQQYLREYANEKKVFERTKPHCNVGTIGHVDHGKTTLTAAITKVLADKQLAESKKYNEIDNAPEEKARGITINVAHVEYQTETRHYGHTDCPGHADYIKNMITGTAQMDGAILVVAATDGAMPQTREHMLLAKQIGIDHIVVFINKVDAADEEMVDLVEMEIRELLTEMGYDGDKIPVVKGSALCALEDKSPEIGKEAILKLLQEVDSFIPTPVRELDKPFLLPVENVYSIPGRGTVVTGRLERGVVKKGMECEFVGYNKVLKSTVTGVEMFHQILEEAQAGDQLGALVRGVKRDDIKRGMVMCKPGSVKALDQLEAQVYILSKDEGGRTKPFMSFIQLQMFSRTWDCAVQVQIPDKEMVMPGEDTKLILRLIRPMVLEQGQRFTLRDGNLTLGTGVVTSTLPPLTESQRSELTEGKKAREKKVAAKK

SEQ ID NO: 12874 - DNA, 4733 bp, DROSOPHILA
cgaattattatcattattttgtagctatgaagtttggcgagagtttcctgatcacattgttggctttcccagtcgaattcatgtttgggaaaatgttacgatgcgctggcactacgaatcggagtggacgaaccaaatatcaatggttcttaccggcgctgctttccatcacaagtactggagtcacatgtacacacatgccatgccgggtgatatcaaggattgggtggatgagcacatgaattgcgaggacattgccatgaattttctggtggccaacatcaccaacaatccgcccattaaggttactcctcgaaagaagtttaagtgcccggagtgcaccaatacggaaatgctctccgctgatctgaatcacatgcgtgaacgttcggcttgcattgatcgcttctccaaaatctacggccgcatgccacttcgcacggtggagttcagagcggaccctgtgttattccgggacaatttcccggacaagttgaagcgttacaatgatattggtagcttataagggtccttagctttgaggccaacattccagaggaacctatgcagatataccaaagacttctgagaataccgctcaactctaatggaaatctaatgttcgtttatatcatagcaataccttcttaacggataaagaggccaacttatctggatctcgcttagaaaatcaatttcgtcattgggatgtgatagagatgactattgtaggcaggtccggttgtattcttttgacttctcattggtactcaaaaatccaattattccgtttggattctcacgtatttgtcaaaatagtttaaatatgctttagaacaattaattgaattaacgtccgttctttggacttattataagttattattattgtagttgtaggtcgtaatattggcagcttttatctagactttattttgattttaaatcaataatttaaaaaactgaaactggcctgtaaataagaattaaaataatcatatcatagaaaaattattttattagatggattgcttcaagctgggaactgaaatctcttgcattaactaaatggtacgttttcaggattttaaatcggataaatgctaatatcattaacatggtggctctgatcttaggtctcaggctttctcaattgatgccaaatactcattgtaacgctgttcctgctgctgttggagtttctgcagcttcttgatctgtcctttactgacttctttgccctccttgtcgtgagtgggaaggccctacaaaaaatgttttaaaatagtagcatattttgaacataggttttaatattgcgtgtcttacattttcgtcgaacgctgagtacttttcggtttcggccaggaacatttccttgggattcacacgtcgctgggcttctttcgcagctgcagcctccgcagccgcctgcttcttgcgctccttttctgctgccttctccgcttcggcggccagctttgcctcccgttctcgtaaaagtgagtcgcggtcgactagctttacggcatactttccaatatccttgtcctccagtcgcacgcccaaattgggcagcacattgtcgcgtagatcatcgcagagcttcaggatgtcgaaggccttcagagttttggcttgctcccgcaccaagtagcggaattcagccagcgattgaacgtaaggcaaaaccgtagtttctaaatccgcgccggcagcttgtgctcccgagccaccactaacggggaagccaatgccaccgcgaggaccagatattgcgccaaacacgtgcaacagatcggtgatatatgtggctacgtttcggagcagcagactgttgagtctagtcttattgtcgcgaatgtagacattggacacggataccagctctcgaatggcgtcaagggcgctgcgagtatcaatgttgtctgcgggcatagatagagcaatattatatatttaagggcgatttaatcttttgattactcaccacacaagctggcgtgtacttggacctgagcatttgagaatttcttctgcaaagccgcctcaacttctgtccaggcatcaaactgccggcggggctcttcggagagcacatgccgcgtcagatccttgacattcaggaagaactcctgcaataaataaaggtaaaatcaaaaacataactaaactcaagattacttcgtcttacattgaggaacttttcgtattgggtggccatttccatggtgttttctgagtagtcaagagtatccttccacgagtgtagcaggaacgccagtcgcagctgggtggcggaatgctttttaagagcttcctggatggtgacaaagttcttcagcgacttggacatcttgcagccagctatggtgaggtgacccgtgtgcaggaagtacttaacccactccgactcattaaaagcggcctccgattgggcaagctcgttgtcgtgatgagggaactttaagtccacaccgccagtgtgtatatcaaacgtgggcccaaagatatccgaggccatggccgagcattcaatgtgccagcctggacggcccttgccccaagggctatcccaccagggttcgccggctttgctcgccttccacaaggcaaagtcattggcagaacgcttctcggagagacgatcctctgcgatggacagatcgccttcaccttcttgcagggacttggtgtcgccatatgcttctggcaccagcttagcataatgatgcttttccctcttgtcgaagccatttacatcgaaataaacggagttgttggctgcataggccaagccattgtcgataatcttttgaataaaggtgacgatttgtggcacgtactccgaaacgcgagttaaaacatctggcgggagaatctgtaaacatgaaattagcaaatgattcaactttcttagtactgcgataacttacatttagcgatttcatgtcgttgtggaactggtcttcccagtaccgcggcagtgcctcaaatactgcattatcattgatctgagcaccctttagcgagtccaaccagtcggaaattggatccttggcttcgtttaggtaaagcagccgcttctcggatatctcccgctcatcacccttgccaacggccttggtcagcgcctccacagcatcgttcatccgctgcagtgtcttgtcgagcataatcttcttgtcgggatctgtattcttggcgcatgtatcctgaaaccgctgcagtacctccttttgctgacccagcagctcatccagtggcagcttttgcgcctcagcagcgtactcgtcgaagagatgattctgccgcgcacgccttatgatcttgtcgtcgatgtccgtaatgttcatcacatagtgaatgttgtagccaaagtagtcggacagaatgcgccgcagaatgtcgaaggaaatgtaagatctgtgtagtacgtaaaaagggaagataagattaaatgcacagatggtgatgtggcgcccaaacctacctagcatgccccatgtgtgaggcatcgtagacggtgggtccgcagctataccacgttacattattgccgtccagcggcacgaagtcctccttctgtcgcgtcaggctgttgaacagcttcagtttcggccgatccaccgcctcgggagcttgccacgccggttgcccacgtttcgacattatctatccgttctataatatgcgcacgtataaacagccagtcgcttctgcacttgcaaatgcggcaaagtttcatcagcttgtgagcaacagctggttgtcggcaggtggcagcgctgcagggagttgccacactggctatgtattgaatggcttgataacggtttttatttttattttaaataacccaggcatgctctgctacgtcagtttaaggaggagattgctggtcctcacaagcagacgtttaaggatgtgcaggatgagcaaaaaagatggtatcaataagaatatcagaataaattgaacacgatatttaatagcaattttggctgtactgaaacaccttttgagaacattgtatttgtaaagatttaataaactaacataatcatactccctcctattttccgttcttctttttggaacctcctccggtggctttttgagtgcgccccaactgcatttcctttaacttagcatccagacgcttttttgcattcttcacatcctcctcctgcctgatggttttcgccggcttcgggtgcagaaacttcttgcgctcgtcccgcttgatctcctcgccacacccgtgcacctctggcagtccgtgcttgaagcagaatctcttcttgcaatgctggcagtcttggcccatcaggctggttttggtcttgcagcgcggatagtcgcagaggttatccacttccttgacggctgtcagcacatcgtccagcttgagatccaccacctggctgggaatccgctccagtagctccaatgtgttgtttgtcccatagtcaactctttttcctggttttgcgggcgggaacagcggagcatcttcagttttcgacgaggtagagggcttgtttggatcgtctgcagaaaatcatttcattaatgaccaaaacttaaacatttcttgagacaattcgcacctgccattgaaaaatatctaaaattcgactaatatttatgatgttttgctaatttcgttaaatttacatttcaagcctagaggtgaaagttgcaagacgtaaacagctgactgttaatcg

SEQ ID NO: 12875 - DNA, 2426 bp, DROSOPHILA
atttgcaagtgcagaagcgactggctgtttatacgtgcgcatattatagaacggatagataatgtcgaaacgtgggcaaccggcgtggcaagctcccgaggcggtggatcggccgaaactgaagctgttcaacagcctgacgcgacagaaggaggacttcgtgccgctggacggcaataatgtaacgtggtatagctgcggacccaccgtctacgatgcctcacacatggggcatgctagatcttacatttccttcgacattctgcggcgcattctgtccgactactttggctacaacattcactatgtgatgaacattacggacatcgacgacaagatcataaggcgtgcgcggcagaatcatctcttcgacgagtacgctgctgaggcgcaaaagctgccactggatgagctgctgggtcagcaaaaggaggtactgcagcggtttcaggatacatgcgccaagaatacagatcccgacaagaagattatgctcgacaagacactgcagcggatgaacgatgctgtggaggcgctgaccaaggccgttggcaagggtgatgagcgggagatatccgagaagcggctgctttacctaaacgaagccaaggatccaatttccgactggttggactcgctaaagggtgctcagatcaatgataatgcagtatttgaggcactgccgcggtactgggaagaccagttccacaacgacatgaaatcgctaaatattctcccgccagatgttttaactcgcgtttcggagtacgtgccacaaatcgtcacctttattcaaaagattatcgacaatggcttggcctatgcagccaacaactccgtttatttcgatgtaaatggcttcgacaagagggaaaagcatcattatgctaagctggtgccagaagcatatggcgacaccaagtccctgcaagaaggtgaaggcgatctgtccatcgcagaggatcgtctctccgagaagcgttctgccaatgactttgccttgtggaaggcgagcaaagccggcgaaccctggtgggatagcccttggggcaagggccgtccaggctggcacattgaatgctcggccatggcctcggatatctttgggcccacgtttgatatacacactggcggtgtggacttaaagttccctcatcacgacaacgagcttgcccaatcggaggccgcttttaatgagtcggagtgggttaagtacttcctgcacacgggtcacctcaccatagctggctgcaagatgtccaagtcgctgaagaactttgtcaccatccaggaagctcttaaaaagcattccgccacccagctgcgactggcgttcctgctacactcgtggaaggatactcttgactactcagaaaacaccatggaaatggccacccaatacgaaaagttcctcaatgagttcttcctgaatgtcaaggatctgacgcggcatgtgctctccgaagagccccgccggcagtttgatgcctggacagaagttgaggcggctttgcagaagaaattctcaaatgctcaggtccaagtacacgccagcttgtgtgacaacattgatactcgcagcgcccttgacgccattcgagagctggtatccgtgtccaatgtctacattcgcgacaataagactagactcaacagtctgctgctccgaaacgtagccacatatatcaccgatctgttgcacgtgtttggcgcaatatctggtcctcgcggtggcattggcttccccgttagtggtggctcgggagcacaagctgccggcgcggatttagaaactacggttttgccttacgttcaatcgctggctgaattccgctacttggtgcgggagcaagccaaaactctgaaggccttcgacatcctgaagctctgcgatgatctacgcgacaatgtgctgcccaatttgggcgtgcgactggaggacaaggatattggaaagtatgccgtaaagctagtcgaccgcgactcacttttacgagaacgggaggcaaagctggccgccgaagcggagaaggcagcagaaaaggagcgcaagaagcaggcggctgcggaggctgcagctgcgaaagaagcccagcgacgtgtgaatcccaaggaaatgttcctggccgaaaccgaaaagtactcagcgttcgacgaaaatggccttcccactcacgacaaggagggcaaagaagtcagtaaaggacagatcaagaagctgcagaaactccaacagcagcaggaacagcgttacaatgagtatttggcatcaattgagaaagcctgagacctaagatcagagccaccatgttaatgatattagcatttatccgatttaaaatcctgaaaacgtaccatttagttaatgcaagagatttcagttcccagcttgaagcaatccatctaataaaataatttttctatga

SEQ ID NO: 12876 - protein, 741 aa, DROSOPHILA
MSKRGQPAWQAPEAVDRPKLKLFNSLTRQKEDFVPLDGNNVTWYSCGPTVYDASHMGHARSYISFDILRRILSDYFGYNIHYVMNITDIDDKIIRRARQNHLFDEYAAEAQKLPLDELLGQQKEVLQRFQDTCAKNTDPDKKIMLDKTLQRMNDAVEALTKAVGKGDEREISEKRLLYLNEAKDPISDWLDSLKGAQINDNAVFEALPRYWEDQFHNDMKSLNILPPDVLTRVSEYVPQIVTFIQKIIDNGLAYAANNSVYFDVNGFDKREKHHYAKLVPEAYGDTKSLQEGEGDLSIAEDRLSEKRSANDFALWKASKAGEPWWDSPWGKGRPGWHIECSAMASDIFGPTFDIHTGGVDLKFPHHDNELAQSEAAFNESEWVKYFLHTGHLTIAGCKMSKSLKNFVTIQEALKKHSATQLRLAFLLHSWKDTLDYSENTMEMATQYEKFLNEFFLNVKDLTRHVLSEEPRRQFDAWTEVEAALQKKFSNAQVQVHASLCDNIDTRSALDAIRELVSVSNVYIRDNKTRLNSLLLRNVATYITDLLHVFGAISGPRGGIGFPVSGGSGAQAAGADLETTVLPYVQSLAEFRYLVREQAKTLKAFDILKLCDDLRDNVLPNLGVRLEDKDIGKYAVKLVDRDSLLREREAKLAAEAEKAAEKERKKQAAAEAAAAKEAQRRVNPKEMFLAETEKYSAFDENGLPTHDKEGKEVSKGQIKKLQKLQQQQEQRYNEYLASIEKA

SEQ ID NO: 12877 - DNA, 6225 bp, DROSOPHILA
ggagaagtgtccttggcgagcaggcgctccacaatgggcagtgctgcgttacgaaagtgagtgactgtgaagggttcggccggtgtggccacgtccagtagatgatgtcgtgcccgggactgctcctccttggttgccttggcggtggcgatgtccaggtgggtgtaaacctgcatggagtcagcgctgattatttctcctccgaagcgttcggccagttgcaaagacagtttcgtctttccggtgcccgtggagcccaggactacaattagcggcacctttcgaatcatttccacttattgcgagtgaatttaagtcaattaaggcaaataaaacccacacgttttgagcacgtgtattccgatggggaccgaaccacttgttgccgtcagctgttttttgtgcttacaagtaattggtattctgtttgcaattggcgtatattaagttaattatttgctaaaaaataaacctattttgatgcataaagtgattgtttaaacttacaaatcgaaaaataatggtagagttttaaagggaaatagtggaaccacacaaaattctgccggaatatacaagcaccgcgttgccaactactctgttgataagcgagccaatgttgccctaagaaattcataatgggcgggaattttaaactgattttaggttgtaaggaattgtatataaaaaccaagttttttaaacttttaagattacaaaataagaatcaaattagaattatattttagtacaaattcggaactcagataaattaagataaaaacggaactcaaaagtttaattaaaggcactgcatgatttgcttaagaatatgcaattattatattttttatataaatataatgaataattctttatttttaatttgttgtttttagatatcctcgcgatacatcgcatcaatgattgcacaaaatttgggccatccctatgcgctcgtgtcatctctaacgcgtacgcggtagtgtggccgaagcagcgcccagtttcaatcctgcacgggcagctagtatcgtatatctttcgtgcatttctttaatttacctgcagttccgttccgaataacaaaactggatcaatcagtttgattaaatttggagtactcgctgtcacagcggaacacagggcaggcagaaacctctggtgctcgtacacttttattatttgccgcaccgtgcgactttcactttttacaattcgcacaagaagaacaacaacaccagaaacaaaaacagcaacaacaagggcggccagcagcaacaacaaaaaaagaagaaacgaaggcaaagacgaagacgaagagcgatgagtgtgaaaaataccagagcggacaacatcaggccacagagtgcagcgagaattgtttaagaatcggtgggttgcacggcaaatgcaaagcaaaataacaataacaaaccagcacaacagggccgcctgtgtgtgtgtgcgtgagcggtagagggtgtgtgtgtgtgtgcgtgtgcgtgtgcccgtgcgtgtgtgctccagcgagagtgcgagtgtgtgcgtgagtacattgagtacatttcggtgcccccaaaaactttgtgtgtgtacgtggtttggattgaattcgctgtcgaattgggtcaattcgcagaaatccaccatggagagcaggacccaaatgaatcagtcgaaccagcaacagcagcagcagaggaatcgcctgccctcctcgccaagtccaccgctgagtgtggtcagtctcactggcggtccgaatgccaacacaaccttgatgggccttgagcacgatgcagtgccctcgtcgcagctgggcaggaacaacaacaacggaggtggccaccatcggagtcacagcattaccaatgcagcgaccacatcactggcgaatcttctggacggatttacagcgcgcgtctccacagcggtgagtgtggcaggtggtactaacatgctaatggaccggagcagccaaagcgccgccagcacaccaggatcaacccattcaatagccagcctcaccagcatgggctcactgggcaccacggccaatgccctgtactcctccatcggcagtgcactgaactccatcacctcacccatacaggcagctgctgcggcggccacggctacaaccacagaggtggtggtggcggccgcctctgtgatcaccaaccacctcagctcacccaccagcggcactccgccccacggcctggatgtagatgagggcgacgacgagtgcgacgactgtgaggaggacgaagacgatccggtggacaacgatggacacattgccgcccccacgccgaacaaaagctgggccgagaacaagcaagtggtgcaggagatacgcaagaagatgtgcaacctgtcctccatggtgcccaccaatgtgcagttccgccacttgtcagatggacgtgccaggtgctacttcctcggcactccgccgcaaagctgggagactacgctgctctttgccgacattaacctaacgcagtcggaggagcagcagttattggtgcagcgactggaggggattgcatctgatgagtggagtcccactatgaatgcaggatcccccaccagtagcggccaccagccagcgtttcttttcaattccctgcccaggcctaggtatgttaacaatcgttgtatgcttgagacagtactaaggaatttcccaacttggatagactcccatggagtccactattacagcaacccattcaaagtagtgggggcagcggaggcagtggatcggccagtccctatgctcgggagtatcaactactgcaggagcgcaaacgcctctcaacctggggcattaccagctacgagttacacaagccctcgggaaaactggtattcccctgcttcaacgacctatatcaatgcctggacacaggatacaatgtaagcattacaaaaaattccattgttccttacttacttcctttctatcgacagtctgggctgctgtttcccacgcagctacgcacctgcccccaatggacggctctggatccgcagatttgtccacagaactccgacatgatagcctacatcagtgattgcgatctgtttgtcactcacacgctcagtgggcacgaaaagcgcctcacttacacgtccaccgggcggcattcgtatgtggacgatgcattgagtgccggtgtgccctcttacgtgatgcaggaggagtttagccgctaccaaggcttctggtggcagccacattccaatgacggtatctaccgcattgtctacgaggaggtggatgaatctgaggtctccgtgtacacgtttccatcatcaacggcaatgcacggcagggtagacgagtaccgctttccccgcaccggtagcccaaacgccaagtccaagctcaagctggttcagttcgtactgaacgaggcactgcaggtcagcgaaattgccatcaaggatctgccctactccctgttggctgtttttagctggttagagtacattgtacgtgtcggctggacaccggatgctaaatagtaagtatacccctgaatgtgaaacatgttgcaaccaaataattctgaaatatctaataataagaaaaagttctttcgcctctatggaagcttgccagaagttaaattataattgactgtgcattcttttcacttgccagcgtatgggttcaaggactggatcgaaagcagcagcggctggacgtaatccttattccactggacaacttctgcgagtcctacagcagtcaggtttcaacgccgaccgactcaataggcgaccacagctggcgcagcctgtacagtcgcacaatcacgccactgcaggttatatacacggaacgctcggatagctggattaatgtgcatgatatgcttcacttcctggatctgacggaaacaagcgtcaccttcttgtgggcatctgaggagactggttttcgtcacctttatttggtgaccgccagcttgttgttgagccaagcaaatggacagccagatcccggatccgttggcgcgcagcccagtttcgtggatctatcggcactgcaaccgcgcatcctcaacaaggtggccttgaccagcggagagtgggaggtgctggccaggaatctctgggtggacaaggccaacaagctggtgtactttgtgggacttcgagatacgccgctagaaaaacacctgtacgttgtgagtctggagcggcccgaacacattcgcctgctaacggagccaggttactcatacctcgtggaattcgatgatgtacgtatgatcactgtcattatctagctaaagtgaaaatataatattgtgcccaaataagtatgctataatttagcattttaacgatcttttcccaattttctcacagcaatgcaagttgatgctgctcgtttactgcaacatacagcggctgcccagttgcaaggtgatgcgcgttaaccagacatgctcgaacggtggagtcaacggcattcagatttcacttgttggctatctccacgaaggcggaaagccggagccgcagtactgtccgcaaattttctcgccgcagttgccgtcgggagatatcgtgtatgccatggttttcaagccgcacaattttgagttgggtgtcaagtatcccacggtgctcaatgtttacggaggacccgaggtgcagaccgtgaacaacacatttaaggtaggtttcacaaaatacagagttctttgtctaacttcgatgtaattctgtattttcttagggaaaacatcaattgcggatgcatatgctggccgcgcagggatattgtgtcatctgcatcgactctcgaggatcgcggcatcgaggcaagcgattcgaaagtcacatccgtggtcggatgggtcaggtggagctgacggatcaggtggatgcgctgcggagcttgtctgaccagttgggctacattgacatggatcgcgtggccattcacgggtggtcatacggtaagttatctcgagataggtgattgacattgttatagtggggtatttcccacaactctgcatactatttaatctaatcaacaagcaagtcattctgaacttgcaagtacacagacagaatgaagatgccttatcggtttatgaacgttaaattaatgcactataatggttactttcaattgagggaactgggtaaaggtaaaggcattgcaataatttccatatggttgtcatttcaacagggggctatcttagcctgatgggcctggttcagtatccgaaaatctttaaagtggccattgccggagcgccggtcaccaactgggagtattacgatacgggctacacggaacgatacatggatatgccgcaaaataacgaggccggttactcagccggttcggtgctcgaatacgtaaactcttttcccgaagagtgagttcttaagctggttcttaaattgtcaaattttcgaaacattcatgttttcttttgttcagggacaaacgcctgctgctcatacacggcctgatcgacgagaacgtgcacttctgccacacctcgcgtctgatcagtgctttgaacaaggcaaacaagccgtacgaggtgcatctgttccccgaggagcggcattcgttgcgtaatctggaatcgaataaaaactacgaaactaaattactgtcattcttgcaaaacttatgagattcgtaaatgtcaacagccgaaacaagatcgcctgcttaggcagtaaaactagacccgccccacgccctcgtccctttgcaatagttttttacatcattgtctttgtttttatttgaatttttgttgttcgaactattgtttttattcgataaagaaaatgagagaaaacgaaatttgtatcatatttttagcatacttaatttataaacgtacgcagttgtaagtataatggaaagttgaatgaatgaaagtttacctgccacccaatattagacttcagatcaagaccaagcagcttattgtaattaatttatacttaatgttctacaacacacgtcatatactcttaactatgttttaattgtgtttgatatccgcaaatgtacatttttcctatcagtaattataagttgtgttttagtgcgtatgtacgagtatgagtgacctgtatgcgtgttttccacagaaacggaaaaaaaaaaccttaaacttgtcatgcctttggggcaggccatcaattaatgttagttct

SEQ ID NO: 12878 - DNA, 3713 bp, DROSOPHILA
cgcccagtttcaatcctgcacgggcagctagtatcgtatatctttcgtgcatttctttaatttacctgcagttccgttccgaataacaaaactggatcaatcagtttgattaaatttggagtactcgctgtcacagcggaacacagggcaggcagaaacctctggtgctcgtacacttttattatttgccgcaccgtgcgactttcactttttacaattcgcacaagaagaacaacaacaccagaaacaaaaacagcaacaacaagggcggccagcagcaacaacaaaaaaagaagaaacgaaggcaaagacgaagacgaagagcgatgagtgtgaaaaataccagagcggacaacatcaggccacagagtgcagcgagaattgtttaagaatcgaaatccaccatggagagcaggacccaaatgaatcagtcgaaccagcaacagcagcagcagaggaatcgcctgccctcctcgccaagtccaccgctgagtgtggtcagtctcactggcggtccgaatgccaacacaaccttgatgggccttgagcacgatgcagtgccctcgtcgcagctgggcaggaacaacaacaacggaggtggccaccatcggagtcacagcattaccaatgcagcgaccacatcactggcgaatcttctggacggatttacagcgcgcgtctccacagcggtgagtgtggcaggtggtactaacatgctaatggaccggagcagccaaagcgccgccagcacaccaggatcaacccattcaatagccagcctcaccagcatgggctcactgggcaccacggccaatgccctgtactcctccatcggcagtgcactgaactccatcacctcacccatacaggcagctgctgcggcggccacggctacaaccacagaggtggtggtggcggccgcctctgtgatcaccaaccacctcagctcacccaccagcggcactccgccccacggcctggatgtagatgagggcgacgacgagtgcgacgactgtgaggaggacgaagacgatccggtggacaacgatggacacattgccgcccccacgccgaacaaaagctgggccgagaacaagcaagtggtgcaggagatacgcaagaagatgtgcaacctgtcctccatggtgcccaccaatgtgcagttccgccacttgtcagatggacgtgccaggtgctacttcctcggcactccgccgcaaagctgggagactacgctgctctttgccgacattaacctaacgcagtcggaggagcagcagttattggtgcagcgactggaggggattgcatctgatgagtggagtcccactatgaatgcaggatcccccaccagtagcggccaccagccagcgtttcttttcaattccctgcccaggcctagactcccatggagtccactattacagcaacccattcaaagtagtgggggcagcggaggcagtggatcggccagtccctatgctcgggagtatcaactactgcaggagcgcaaacgcctctcaacctggggcattaccagctacgagttacacaagccctcgggaaaactggtattcccctgcttcaacgacctatatcaatgcctggacacaggatacaattctgggctgctgtttcccacgcagctacgcacctgcccccaatggacggctctggatccgcagatttgtccacagaactccgacatgatagcctacatcagtgattgcgatctgtttgtcactcacacgctcagtgggcacgaaaagcgcctcacttacacgtccaccgggcggcattcgtatgtggacgatgcattgagtgccggtgtgccctcttacgtgatgcaggaggagtttagccgctaccaaggcttctggtggcagccacattccaatgacggtatctaccgcattgtctacgaggaggtggatgaatctgaggtctccgtgtacacgtttccatcatcaacggcaatgcacggcagggtagacgagtaccgctttccccgcaccggtagcccaaacgccaagtccaagctcaagctggttcagttcgtactgaacgaggcactgcaggtcagcgaaattgccatcaaggatctgccctactccctgttggctgtttttagctggttagagtacattgtacgtgtcggctggacaccggatgctaaatacgtatgggttcaaggactggatcgaaagcagcagcggctggacgtaatccttattccactggacaacttctgcgagtcctacagcagtcaggtttcaacgccgaccgactcaataggcgaccacagctggcgcagcctgtacagtcgcacaatcacgccactgcaggttatatacacggaacgctcggatagctggattaatgtgcatgatatgcttcacttcctggatctgacggaaacaagcgtcaccttcttgtgggcatctgaggagactggttttcgtcacctttatttggtgaccgccagcttgttgttgagccaagcaaatggacagccagatcccggatccgttggcgcgcagcccagtttcgtggatctatcggcactgcaaccgcgcatcctcaacaaggtggccttgaccagcggagagtgggaggtgctggccaggaatctctgggtggacaaggccaacaagctggtgtactttgtgggacttcgagatacgccgctagaaaaacacctgtacgttgtgagtctggagcggcccgaacacattcgcctgctaacggagccaggttactcatacctcgtggaattcgatgatcaatgcaagttgatgctgctcgtttactgcaacatacagcggctgcccagttgcaaggtgatgcgcgttaaccagacatgctcgaacggtggagtcaacggcattcagatttcacttgttggctatctccacgaaggcggaaagccggagccgcagtactgtccgcaaattttctcgccgcagttgccgtcgggagatatcgtgtatgccatggttttcaagccgcacaattttgagttgggtgtcaagtatcccacggtgctcaatgtttacggaggacccgaggtgcagaccgtgaacaacacatttaagggaaaacatcaattgcggatgcatatgctggccgcgcagggatattgtgtcatctgcatcgactctcgaggatcgcggcatcgaggcaagcgattcgaaagtcacatccgtggtcggatgggtcaggtggagctgacggatcaggtggatgcgctgcggagcttgtctgaccagttgggctacattgacatggatcgcgtggccattcacgggtggtcatacgggggctatcttagcctgatgggcctggttcagtatccgaaaatctttaaagtggccattgccggagcgccggtcaccaactgggagtattacgatacgggctacacggaacgatacatggatatgccgcaaaataacgaggccggttactcagccggttcggtgctcgaatacgtaaactcttttcccgaagaggacaaacgcctgctgctcatacacggcctgatcgacgagaacgtgcacttctgccacacctcgcgtctgatcagtgctttgaacaaggcaaacaagccgtacgaggtgcatctgttccccgaggagcggcattcgttgcgtaatctggaatcgaataaaaactacgaaactaaattactgtcattcttgcaaaacttatga

SEQ ID NO: 12879 - protein, 1102 aa, DROSOPHILA
MESRTQMNQSNQQQQQQRNRLPSSPSPPLSVVSLTGGPNANTTLMGLEHDAVPSSQLGRNNNNGGGHHRSHSITNAATTSLANLLDGFTARVSTAVSVAGGTNMLMDRSSQSAASTPGSTHSIASLTSMGSLGTTANALYSSIGSALNSITSPIQAAAAAATATTTEVVVAAASVITNHLSSPTSGTPPHGLDVDEGDDECDDCEEDEDDPVDNDGHIAAPTPNKSWAENKQVVQEIRKKMCNLSSMVPTNVQFRHLSDGRARCYFLGTPPQSWETTLLFADINLTQSEEQQLLVQRLEGIASDEWSPTMNAGSPTSSGHQPAFLFNSLPRPRLPWSPLLQQPIQSSGGSGGSGSASPYAREYQLLQERKRLSTWGITSYELHKPSGKLVFPCFNDLYQCLDTGYNSGLLFPTQLRTCPQWTALDPQICPQNSDMIAYISDCDLFVTHTLSGHEKRLTYTSTGRHSYVDDALSAGVPSYVMQEEFSRYQGFWWQPHSNDGIYRIVYEEVDESEVSVYTFPSSTAMHGRVDEYRFPRTGSPNAKSKLKLVQFVLNEALQVSEIAIKDLPYSLLAVFSWLEYIVRVGWTPDAKYVWVQGLDRKQQRLDVILIPLDNFCESYSSQVSTPTDSIGDHSWRSLYSRTITPLQVIYTERSDSWINVHDMLHFLDLTETSVTFLWASEETGFRHLYLVTASLLLSQANGQPDPGSVGAQPSFVDLSALQPRILNKVALTSGEWEVLARNLWVDKANKLVYFVGLRDTPLEKHLYVVSLERPEHIRLLTEPGYSYLVEFDDQCKLMLLVYCNIQRLPSCKVMRVNQTCSNGGVNGIQISLVGYLHEGGKPEPQYCPQIFSPQLPSGDIVYAMVFKPHNFELGVKYPTVLNVYGGPEVQTVNNTFKGKHQLRMHMLAAQGYCVICIDSRGSRHRGKRFESHIRGRMGQVELTDQVDALRSLSDQLGYIDMDRVAIHGWSYGGYLSLMGLVQYPKIFKVAIAGAPVTNWEYYDTGYTERYMDMPQNNEAGYSAGSVLEYVNSFPEEDKRLLLIHGLIDENVHFCHTSRLISALNKANKPYEVHLFPEERHSLRNLESNKNYETKLLSFLQNL

SEQ ID NO: 12880 - DNA, 7645 bp, DROSOPHILA
taaagtatgctcgagatgcaatttgaagatgagctggaggtgcgtgagaggacacttggaacaaatcagaagctgattcgccttgtaggggtgaacttgagcagctgcagcattggagctgcttactgggataaataccaacgtcattaagcaatattattgggtcgagcacaatgaaaattaatgaattatattcctatgctctcattaggcaaatcaagaaatcccattaatcaaattgagtaggcccacaaaggcagctgaaattcatttttaacaatttaaacatattttagtttgtgtttatttttccatttttcgttatctttgcgctgcccattttgctcgcttcttcaacaccttttggctaatgatgagcaaattgtgccggaagcaatttaagctctattgattttattgacaccgttttgctttgtatcgaagagtaaaaatatatacaattgttacataaatataaaaaaaaagcttataaaaatgtaacccgaaggcaattcggctgagcggaagacaattaaaataaaatcaaacataaatgcataatcatttcactaaacaaagcttgtaacggtcatcaaattttgcaaaatatgaaaaacaaaagactcaagcagcgaacttgctgctgcaacatgttcgaagcagcaagatgcactcgacactccaagttatagacctccaaccagtagcacactgacacatttatggcagcagtagctgcaactaactcaattagccatcgaatgcattccaagctcgtctccggctaaaaagaccccgctgtttaggccaattttgttggtgtctgtttttttgcccccacggagcactcgatcactcgtttaagccaagcctccatcccggtttgaagcacgctcgaacatcgaaccgacgaccgtttttgctcgttttggtttgttttggctttttggggccaagctataaaccctggcaagatcgtcactgcgttcagttggtataagtgaatcgttgcgtgcggttgttcccacaacaacattttaagcttggatatctgtgctgttcgcttatcgagttttgagccccgctttgtgtcgttcgtttcaatctaaaggtgattatcgctcatcacatgccatatcctttaaggacaagtgacgtcagagaagtgttaacttattttagagatatttggttttaatattggtggtcagaactaattgagatttacattaaaaaaggaaattaggagtacaaggaagagtactttaagctttacattgagtttgggattaatggaacgtaaagattttatttctctaaatcctagtttatgataaatataattacttcgtgttaaattatgagaattgagcttggaagtgaatggaacaacacaacaattagttttttggcttagaaccagcgatgacaaatcaaattttgtttaaattctgtgccgacctaccacaactaattctgtcacttcgtattctgtcagtttaaagaacattgcaaatagtgtgaaaaaggctgttagttaacccaacaatgagtgagttgtttttcatacattctggcctcatttcggcctgtttttagctgacaaccacccacacccaggtccatgcattgaagcagaagattacgcaatatgttggcagtgcaaatgagtggaaaatctaattttccagcagcatgcaaaaattcgggtagtaattgccaaaatgtcaggctgcgccagctgtaagctactgctgctactgcacagagtatgggggtcgtaaagtctaaagccaacatgccaataatattttatggctagcagtaacaaaagcttgataagaggcgctttgacatttttacagctgcaattggagatgacctcacttgtatagctatttaaagtcggctttgacaggtcaacggtttaacaatttcaatgccgtgaattttcccatcatccgcaattgcggaggaggactagcagctgtcctcttttggtctgcaatctccgaaaattccacagtagaaatcaccagtcacgattccgtctccaattgacaatgaaataattcatctctgcggaatgcgggaaagtcttggcaaaaaaatctcctcttgtcactttgtgaaatggattctgcctaaaggaaagtttttcggcagtgggcgtatcttttcggctcttttccggtttttcatatgcgaattcaaaaggaatgacaatttttttgatctcaatgggtcccaatttactcactgcaatggttgtgcgtacttaatatagggtctgtaaaaataaatgatgtggcagtcattagggtttggttatccacattcatttccatcacacataaaaaaaagtctgttattgaaaaagtctggcatattttgaagaccagggaaattctatctctaaaatctaaatctaaaatcaaaaatctaaaaactagtttgaacttgtaaggtataagtcgtaacttaaaattgacaaagtacacgtttttctaggcttggattctaagaaaagactctctcattttgtagttttttcagtaccttcactagcatgtttatttatctgaccatggcaaaaatttgtgctactcattagcgcctgctccgaagatgaaagtgaagatgatagctgacaattgagaagattccacttgaacctctcactatccaccaccattccctgctcctaattcaacttgacgcgctgtcaatatttatcgatatggcctgcacatataaatacgattttatgtgatgaccaaaaactgaaagaagaaacatgaccattttcactatcatttcgcttcattgttattgtttttgagcgctgcactgtctgtggaatttcagtgttttgctcatcattcgcgaaaaccagtaagctgcaggtgctgtcgcctcttgaccagtaaaagtaacgctccttcagcctgtctggctgtctgttggtctggtggtccgaaactggccgcagttgacagactttcttctacagtctgtccagtttttctgcatattgtttgctgttggccagcggcttcttcttcgggccaagacgagagcagccagatctggccaagaccagaccgcgaccaggcaattaagtagtcgcatccgcctgcaactttcataacggcagcatcctgctcccttttctgcggtaactccgtgaaaagaggtcaaagcgattgacccacggcacaggtggcgcaacagcagacgcaaacattctaattagcactaaaaagagacctcgacgccatcaaaagcgagttatctagatacacaaaggtgggatgttgttgcaacaagccatcaagtgggttttgcatgtggaaaatccgtcttctttataattactgtcatcgcagcgcaacaaggtggtgctcaaaaagctgaaactcgtcttgtcttcggcttcgttctacaaacaacctgcaagtgcaagtttctcgaagttttctctggagaaacgtcttcttgtcgattgatttctaattaacaggaaatggcagaggcagatcttggcagtttaaattaagttaaaggggttttaagatggcagaggaatctggtaaaattaaatctaatctttacaacatataataatacaaacaaaagaggtaaataatgaaagagcttagctaaaactcttttttgtcttatcttacataagggtttattcaagatttagagttaataggaaatcctgcaatcatatttatcggcacataacttttaactagtttttctttaacaatttaatatatatataccctgcgcagcatgtaacttagacacctgtctcgctattagaaactaatgacaattttttacgattttatgctgcctaagaaaatgcttaaggctcgtgatacataaataaaatttgcttgccatctgagaagaaaaatccagtaaaaaaccagttgcttcgagacatgcagagactgctgtaaaatgtaatgtataagccggagattaattgccatgtttggggggggggggggggggtggtgagtacagcaggtgggaggggcttggcaaaaaaacaaaaaaaatgtttggaagatgcaaccacgaagtcagcacaagtggcttggaattaattatctaacaattcggattctgaatgttgcacagatgtgcttaggaaaacatcttgcaaagatttcgactgctttttgccgcagtattttgtaatatttatttggttattgagcacgttttgaaggttgctttttgcacgtcgcacaggtgaattatataaataaataaccatttgaagagcctaaaattatcattgatcattaggccgcaaaaaaaaaaaacaaaaaaaaacgcgcctttctcccacaatttttatttacaagtgcctttgttgaaatgttcaataaagcaagtattgcataagaaatgaaaacaagctcgaaatacaaaagccaggtcgaaaaaattaaaagccaaacaaaagtgagacaaaataagagctacttgggagcaagtgccccgaaaaaaaagagaggcgaagacaatcggttcggaaatattccagcagctgccaatgcccttacccacggcaattagccacagaaacaacctgtcatgtagcaaataaaccaaacatattgggtagtgcttcaaataggaagagcaaatgaggcaacggaaatttaaattacaaaatttacaagccgtgaaaagggggaaaaaaaacatgcaattgcacgtggccaagacaaaaggcctgagcaaaagtcttatcatgcggaagagtttcgaatattggcctggtcaactgaaagacccaagctatatgtgtaatgcataaccatgaacgggcctcggagccccgaactcgggcaactttctccattaactgcgagtatttattagtttggtattcatgggacaaactctgggcttcagttgagccagaaatgctggagtactggaatgtcactgactaatgtgcatatacgtacgttccggactgtatgaacagtgggacggacagtttgtagagtttggacaggtcagtttttttgggctaggtcagttacggttcagaaatttgttttaagggttttttgcttccaaataaattcacttttcggaaaaacatactccgggccattttttctttaattattttagccctttcagtcggactttatttattttaactaattatcagtcttattgaatttgttgaagctaattagtttttttttttgcgaagaatagacaacgtttagcacgcgttttagccattgccagtaaaatggtatctcagcttggccaacttatttaaatacggatctagtggcaagcaaatagtttatttaccatgtaatttcgagttaccaagttggtcataatcactaccagtcgcacatcaataaaccaataaaaatttgcatacaattttcatggtttttatgtatgcatattaaacaataagcccatttgcatacactgttgctgggtaaaataaaagtcacttgttctcacgttacgaaatagaaaccacgttgaaggcccctggccgaaatggaaaactacttaattagacgaaatggaattaaattgtgctaaatgacaattgtaagcgacaaattccatatacaaaatacagtcaaaattgatcaaaatcaatgcaaagcatttccaatcagtgattttgcataaaacccatcgagtcatccaagcggaaatgaaacaggtggggcaaatcagattcaagcctagtcagaatcaaattctgaatcagttttcggctgaactttgtggtttaggctactctagatttgactgagtagttctaaagtcagcaatgtggtaaaattaaatttaatatgagtcatcttaaaagtcatacatctataaataaaatcattgaatgtgaaaatggataaataaataatcaattgttttatatttatctatatctttagctatccaaatatgtctgtgctgcgtgcactgatgtttctggcctttggtgccaccgtggcgctggcccaacgtcgcctggctctgcccgatccgaggagttgcgccaaccgggtgcgccatgccagctatcgggatgccaggggcgtgtcccactcgtacttcttcagctgggagcatgctcctacccgcagcctggaggtggattggctggatgcgaggaacatctgccgcaggcactgcatggatgccgtttccctggagacgccacaggagaatgactttgtgaagcagaggattgccaggggcaatgtgcgatacatttggacctcgggcaggaagtgcaacttcgctggctgcgacaggcccgatctgcagcctcccaatgagaacggttggttctggtcgggatcgggggcaaagattggacccacttcgcagaggaacaccggcgattggtcttcaacgggcggataccaacagccgcagcccgataaccgggaggccgcgcagggcaacgacgagagctgcctgtccatcctgaacaacttctacaacgatggcatcaagtggcacgacgtggcctgccatcacatcaagccatttgtgtgcgaggactccgatgagctgttgaacttcgtccgctcccggaaccccaatgtccgcttgtaattctaactagcctaagcctgagggagatgattaaaatttacatatttatgtagccttaaacggaacattaattggttgattgattgattgattgtttgattcaaattcattgactattcaatccaacattgatgacttccaaaacgcgtaacattcgtttgttcggttagttcgcagcaaaagttctataagcaaaatttgtaataacatttctgtgtcgatccgcgcatcataaacaaaattgttaaataattttaaaaattgttaataaatacaaattgaacccataaatgaaagactttgatttaacattcaatgcgtatatttgtatttagttcattatacgatttcactagaaaatgcatgtatgtaaatatatatccgtagatctgttaaataggtttttcctttatctgaatactttggtaagttctgttgcttgcgggaacttatttgtctaacactaaaactaatttcatttacgtttaggaataattcaattatcaaacgattccttagccatttggagttctgaagaagacacaaagttagcagatttgatctaataaagtaactggtataggttgcgtaaagtgcatcattagccgatagctcaataaaattaatttaaggactcaaattaaaataataataataatatacaagttttaagcctaaatttaaaactattttcaggctcctctcgatttcttgcatgctatgaaaaaatgtacacatattttttgtaattataattgtccaacataaaaatctaacaacaataaagtgggaatctaaatcatagtcgcttaagcatagtcaaattaacaagtaatatgtaatatcggttaactggaacttatggaactggtcgtttagcacagaatatattgttcggttatcggttatgaatggtgtgtggagttctgtgtgtttatgtgggaactgtggtggtgggtgctgttgctggtattttgatcaacaaaatacggtcctaaaa

SEQ ID NO: 12881 - DNA, 781 bp, DROSOPHILA
gtgaatcgttgcgtgcggttgttcccacaacaacattttaagcttggatatctgtgctgttcgcttatcgagttttgagccccgctttgtgtcgttcgtttcaatctaaagctatccaaatatgtctgtgctgcgtgcactgatgtttctggcctttggtgccaccgtggcgctggcccaacgtcgcctggctctgcccgatccgaggagttgcgccaaccgggtgcgccatgccagctatcgggatgccaggggcgtgtcccactcgtacttcttcagctgggagcatgctcctacccgcagcctggaggtggattggctggatgcgaggaacatctgccgcaggcactgcatggatgccgtttccctggagacgccacaggagaatgactttgtgaagcagaggattgccaggggcaatgtgcgatacatttggacctcgggcaggaagtgcaacttcgctggctgcgacaggcccgatctgcagcctcccaatgagaacggttggttctggtcgggatcgggggcaaagattggacccacttcgcagaggaacaccggcgattggtcttcaacgggcggataccaacagccgcagcccgataaccgggaggccgcgcagggcaacgacgagagctgcctgtccatcctgaacaacttctacaacgatggcatcaagtggcacgacgtggcctgccatcacatcaagccatttgtgtgcgaggactccgatgagctgttgaacttcgtccgctcccggaaccccaatgtccgcttgtaa

SEQ ID NO: 12882 - protein, 219 aa, DROSOPHILA
MSVLRALMFLAFGATVALAQRRLALPDPRSCANRVRHASYRDARGVSHSYFFSWEHAPTRSLEVDWLDARNICRRHCMDAVSLETPQENDFVKQRIARGNVRYIWTSGRKCNFAGCDRPDLQPPNENGWFWSGSGAKIGPTSQRNTGDWSSTGGYQQPQPDNREAAQGNDESCLSILNNFYNDGIKWHDVACHHIKPFVCEDSDELLNFVRSRNPNVRL

SEQ ID NO: 12883 - DNA, 2982 bp, DROSOPHILA
cgatttgctcctttatatgccaccacccgcctgctggcttccttccggccttgattttcttttcgcttttcgattaaaagtttagcaaattaaaattgtataatgacggtgattaggccaacaacaaacgacctgctgcagcacaatgtggaccaatcgcgttgaaggcggctttaaagagcattgaatgcgaaattgtgtcgccaacaaataattaacgtgtgaaaattcatttcagatgccagctgccactgcccaaaaatttgcataatgagtgagagaggagaaatggattgttattactcgtgttcagtgttttctttttttattgtttctctgcgtttttttttatattataaattaaacaactttatttactcaattatgttacggtagtgaattatttacatttttgggtcgattttcggtttgtgtctgttttgcttacatttaaatatgcatttcaatttggtatatatttatttatgcttaacagtgggaagcagcaacaacatttaacatagagttttccttacatggaatattatataatttttgaattatttttataggcttgcagttgaaagtgctgaaagaaaattgaataccaaacattcaagactgaccaattttttggtcaaattattcaaacttgaaaattacaatttataatgtcacttaagtgttcgaataaccattgaattggcaaaagtccccgactttgctataacctcaagcacttttccaccatttttatggttacatgtcgtcaatgcatcaaaccaacaaatggggacaaccaaaacccgaactaaactaaactaaactagagatactttcaccatttatcagctaggcgtttcatttgcagtgtctgtgtttttctttttcatagagtatcacattttcttggtatcggttcgattcaagcaaaactattttgccgcaccagaacttaaatgtaattttgtgctaccagttgatcgatttcctccattagctactgctgctgctccgtctccatgttcttggcacgcagatacttcagcagcatctgcagcgaatcgtaggtatcgaagtcgtcgagattccgccgcgaagatgacatgttggtgggacgtggcatggccagtgggacgggcagcagttcgggcatcaccgaatggtgggtgatcagggccttcaggctggagaactccttgcggaaaccctggaaatacgccgaagaattccagtttgatggaatgtaaatatattaatagattaatgagaaaatttcagctatctcaccttgattttgtagccccttggggaacgtaggattatgtagttagctattttcggcccaggtggcgagggtacgcgcagtgtcagtgcatagcatcctggtttggagctgctcttccgcacgagaaacgcacctgggctcttgctttgcaggacttcaacggctatgtccctggatatgcccgcctggtaccagcaggcatccttcagctcgagatcctcctcatcggatcccacattaccgaatgcgttggccaaactgctgcatcgctggccaacggcaccctggttcatccgcaggcgattggcaaagattttcggactggaatttgctagaagaataaaaggaaattttgtaaagggtttaacaatcatattatgttaatcttttcaaacaaaaactttatccacaaatctagagatgtagatgctagatataaacacttaccgctgctcgtttctcttaagtagcgcttcttcaggttgaactcgttattgtcgttcaggttaacattgtccagcatcgggatggctgtcaaggattggcggcacgagtcaccgaacttgctgtcgatgtaggagtcctcgttgatgtagccattcgagtacaccggctggatgtccagcggcgcgctcaaaggagtcatgtcgcccaccaatgggcgtgactcctcgttttggcgcagcaagcccattgtcaagcgtttgacctacagagaaagaaatcatagatataggaatcaaattcgtttttatttcagcattctaacatttctttatttctatttacatttattcttcactaaatacaagctcatatgttttttcaagtgtagacccaattcaacttaaagtttaacgaaatccgccgaaaaaagggatcaaagacgatggcaaagcgttcaagtggcaacaaaattaactacaatttaaacaccttgtaagccgacaaggatcagcaaaggatgctgcagtcaagggcaacggctgggtggcatggtcgtgggcgtcgaccgtgtgaggtgggtggaaagggcgtggcccgcagccacagacggaggcggtgcagaaaaaaggcaagaatttattaccgagaaccgcagcgagacaaaatgctggcaaaatgcgccgcgccacaaaaggcggactgcgaactgcaggcgaaacttttttcgggtgtgcacttaaacaggaaacggatgcttggactaggcattaccggtgggtgaaatgcgagatggttgggaggaggtggcggggctctggaaaaaagcgaagaaagagtgcaaagtgcacaaggaacagagagaggcgcataaattcgtggcagactctcgtgtcggctactttgcccccactacgagtccttttatggtacattgccaccgtctaaaatgttgcatagcaaatggcggccctggcattctaagcggaaatgtgccgcaggactcgggactaaggaccagtagcaatggcagtggctggaaaaagaatggcgaactatagcatgaagagcaagtgttgagttgtggtcgggaaaataccaatcgactgcgtaatgcccttgtaaatgaaaacttcaagagtgaagtgagtaaaaatacataataaaaatgttacagggagtgaatcgtttcataaacataacacatattgaaatacctgaaatatctgggttaaacaaaaggtattttc

SEQ ID NO: 12884 - DNA, 786 bp, DROSOPHILA
atgggcttgctgcgccaaaacgaggagtcacgcccattggtgggcgacatgactcctttgagcgcgccgctggacatccagccggtgtactcgaatggctacatcaacgaggactcctacatcgacagcaagttcggtgactcgtgccgccaatccttgacagccatcccgatgctggacaatgttaacctgaacgacaataacgagttcaacctgaagaagcgctacttaagagaaacgagcagcgcaaattccagtccgaaaatctttgccaatcgcctgcggatgaaccagggtgccgttggccagcgatgcagcagtttggccaacgcattcggtaatgtgggatccgatgaggaggatctcgagctgaaggatgcctgctggtaccaggcgggcatatccagggacatagccgttgaagtcctgcaaagcaagagcccaggtgcgtttctcgtgcggaagagcagctccaaaccaggatgctatgcactgacactgcgcgtaccctcgccacctgggccgaaaatagctaactacataatcctacgttccccaaggggctacaaaatcaagggtttccgcaaggagttctccagcctgaaggccctgatcacccaccattcggtgatgcccgaactgctgcccgtcccactggccatgccacgtcccaccaacatgtcatcttcgcggcggaatctcgacgacttcgatacctacgattcgctgcagatgctgctgaagtatctgcgtgccaagaacatggagacggagcagcagcagtag

SEQ ID NO: 12885 - protein, 261 aa, DROSOPHILA
MGLLRQNEESRPLVGDMTPLSAPLDIQPVYSNGYINEDSYIDSKFGDSCRQSLTAIPMLDNVNLNDNNEFNLKKRYLRETSSANSSPKIFANRLRMNQGAVGQRCSSLANAFGNVGSDEEDLELKDACWYQAGISRDIAVEVLQSKSPGAFLVRKSSSKPGCYALTLRVPSPPGPKIANYIILRSPRGYKIKGFRKEFSSLKALITHHSVMPELLPVPLAMPRPTNMSSSRRNLDDFDTYDSLQMLLKYLRAKNMETEQQQ

SEQ ID NO: 12886 - DNA, 2597 bp, DROSOPHILA
gactttatacatatgcagattccgatgagagtttcgaacgcgcttttcatcgcctcgcccgtgggcactacattgaaatccagctgaaacacacagttttggttatggtttctcgattgggtcggttgttaggtccgagtgtgtattttgtttttagcaaatggtctgtttttttggagttgccaacgagggcaaaagggagtggagtggggctgctcgataatgaatgggaatgaaacgtagcagaaatgacgtcgcagaaaaaataaaagaaactattttcgaaggccagaaaaggaagtggaagcccagtcactgttttaactccagataactgcgcataattacgtgtgacgacttactattccggattcacagatgacattttctggctttttcacaagattatatatttgccacgaacaaatattcgatttctggccctggactggctgctgttcagagtgtttttatttgatttgcgcgttccgaaatactggaaatcgacacgcactcggcttgtgttgtgttttgcagttcgctattgtaattattgcagcgaatttaaatgggaaatacgtttatttccacaaattcgacggccgagaacgagaacaatggcgactgaaaaaatgacgaagtggcattagcggcagtgttggaaaatgcgcggggccctcttccaaccagggctacacattatcttgtctacggaggtgagtgggcggaaccagagaagaaaatatatggattatcgccaaatgacccctaacacaccccatataaaaacaaaaatacttaacttttgcatacaatctcttatggtacatcatttgtttctaaacacggcctttaacatttgagtgtttgcatagagaacacattaaagataataataataatacgcgtaatagtatatgaaagaagattcgataggcgggtgtagcgcctgggggaatgcatctggcagatccgatatacatatgtatgaattgggccgctactccagcgaatttagcgtgagcagctgcttgagcaccttcgtctgcgaggtctcccggatctcgcccgccaggaacatctcgtccaccacactgtacaccttgtagaagttgaagaccagatccagctcgcacacattatggaagtattcgttgagcacctccacgaagttgtgaatggcctccagatagcacaggttgttgtcgtttacgtccacgcagatgcagaagtacagacccgcatagcgtcggtagacgatcttgaagttgcggaactacaaaggcaaaagtgtgataaaagggtgattcaaaagaacatatggactcgatcccacctccacaaagttggtgtgcttggcatcgcgcactgtgaccacggcatgcacctcctcaatcagtttctgcttctcgtcgtcatcgaagttcatataccacttggccaggcgagtttttccagctcggttttgtataagtatgaatcgtatctgggcgaatggaaggtcaaataggggtctaagcttatagctggctagttgcttaccatttttcgggaaattggttaaaccgtttcctgcttatttacaactttttttgtttcgagaatgggggcgaaaaactgattatgagcaaattgtgtatcactgggaccagggctaccactactgttccggaacagctgttacctcgtcagtgttgcaaacagttcgcgcagaaagcaaacgagttggcagacccgcgcgctgtattacgaagtttcactttcatatttgttttggccaccactccaaactagtcatttaccaaaaatgttggcctctcgcttgaatctcctgttgccccgcgtatcctggctgcgcggttgctcaacgacagcggtgggccagaaacatcagcgccaggtgcccacggagttcgccgtacacgatcctctgcaggctcacgctctaaaggaacagtgcatcctggttgacgccaacgaccaagccattggggccgcctctaaggcagactgccaccgtgtgcatccagagacgaatgatgttaagctccatcgcgccttcagtgtttttctcttcaattctcagggagagatgctagtgcagaagcgatcgtctcacaaggtgaaattaaagggtaatccccttattacaaggtccataatcctctgtatccttagataaccttcccaaacacctacaccaacgcgtgctgcagccatccgctttacgaaatcgaacaggaacgtcaggagcgcaacgcacagggcatccgtgtggccgctcaacgacgtctcaactacgaactgggcattcccacagaggaactgcagccacaggactttcgctacctgacccgcatccactacgcagacacgggcgacggcgtgtggggcgagcacgagatagactacatcctgttcctgcaaaaagacgtgacgctgcgtccaaatagcaacgaggtcagtgaggtgcgctacttgcgccgcgataagatcgacgaggcggtggcgaagtttagtgccccgctgacaccctggttctctctgattctgcagcatcgattgaaactctggtgggacaatttgcaccagctgga

SEQ ID NO: 12887 - DNA, 469 bp, DROSOPHILA
aacaaaaaaagttgtaaataagcaggaaacggtttaaccaatgatacgattcatacttatacaaaaccgagctggaaaaactcgcctggccaagtggtatatgaacttcgatgacgacgagaagcagaaactgattgaggaggtgcatgccgtggtcacagtgcgcgatgccaagcacaccaactttgtggagttccgcaacttcaagatcgtctaccgacgctatgcgggtctgtacttctgcatctgcgtggacgtaaacgacaacaacctgtgctatctggaggccattcacaacttcgtggaggtgctcaacgaatacttccataatgtgtgcgagctggatctggtcttcaacttctacaaggtgtacagtgtggtggacgagatgttcctggcgggcgagatccgggagacctcgcagacgaaggtgctcaagcagctgctcacgctaaattcgctggagtag

SEQ ID NO: 12888 - protein, 142 aa, DROSOPHILA
MIRFILIQNRAGKTRLAKWYMNFDDDEKQKLIEEVHAVVTVRDAKHTNFVEFRNFKIVYRRYAGLYFCICVDVNDNNLCYLEAIHNFVEVLNEYFHNVCELDLVFNFYKVYSVVDEMFLAGEIRETSQTKVLKQLLTLNSLE

SEQ ID NO: 12889 - DNA, 3483 bp, DROSOPHILA
cgtctctgatttacctggactcgattgccctgcaaaaggtattcgttggggccaggcagaggataacagctgcagcggatgcagccgcagtggcagccggagataacacgggtgaagcgcacggcaatggaggttcggataattcggacaacgacgacgacgatggtggcgatgacggctccgacgacgaggagattgcaaccacttcagcggcggctgtcaaaatgaagctgaaactgaacaaatctctggctagtgcgcccgctacgcccacgcaatcatcgtcgaatgtgagcagcggagcggctaccacatccaagaagcagacgcgtcgcaagcgctcccaaaagaagtacactatttcagacgatgacgacgatgacatggactagctaccgttgggagtgatcttcaagcgcggatcgtcggatgtcgaaggcatgggcaattgattattaattagtttaagttttactttcaaggacgatgcttaccaaaaccctagcctacgggtttttttaaccatctaacctatcatgctatcacttttatctatactaattttctagttgtaggttctcgattaagtttcctattcaattattttcgcacacaccatttatttctcccaattctattgattgtataattatgtgctttaaaataaatgcatacctaacataaagtaaatcgaaaaacttgtcattaatggacggcggattgctccttgagagattgttcaacctagaccaggctggaattagtaacaaagatcttatttaaatcggtacctaaatgaatacatcgctgctagcgtataaaggaaatggttttaaatatatcaaaatgggaaaattatgatgtttcgtttaattaataagttgtattttaggaagtcttacagtaattaaaattagcttcagcatttctacttattacatttataactaagctccttcaaataaatgcatacttaaacatattgatatgcttggtaagactaaagcaggtagtggaagtactcgtcgcacatctcgtggacactagcggtgtgctcctcgtcgccgctatcactgcttcgcaacgtgattttgtgtgcattggcgtacaagtcgtcctcatcaacagccgcatcgtcggtttctattaattgaaattgcaaaagtgatgtggcagaaatgatagtggacgtaacttcgtgacctcacctcggtacttttgtttgcgcctcaaccgttgcttggagcttgagagcactgcttcgtcgcccagatccaattcgttttcgcgggagttccgggagtaacgaattggcggtgccaggaaccagtaggattgcatgatgcctttgagacccggcatttgacgcagttcggccaatttgagcggctgcctggacaatgcttggaaagatcgcagctgcagtgtgactggttgcgaagtgcagttgatcagcctaattacggacttcgcggctgtggagcagaccatgggatatattttgacatccggatccgtcgggacattggtgtaggccactcccagcgatctgcggttcaaatagaactccaagtgcccacgcgttcgatccaaacagacaccaatcaagcagccctgcgagaacttctggccgtagggcagtaactcgccacagtgctgaatccttccggaatacgaaaagccccaggactgggcattggtgcccagggccgagacaaagtgaaacttgaactgccctagattaacgctttccgtgccgatgccgaacatctaggaaaagttataagaaaagaaaggcaattataaagagaacattatttacattgaactttagctggcttatcatctagttggggtgtctgctgagatttcctcctcccgctgcgtctgttatcttatcgccgcgttgtaatctgtaatccataatacaacgaagcgaacaatcaagtcgtctccaatggaaacgagcacaccagatgcctggttagttgtgttctattttaaggcggcgactttgagtgacattcatcatgctgagcatcccaactagttgccaagccggcctgataactaaccacatccgtgccggccagagtcgtgatgacgcgcatctcccaaaagtgcaccatgtttgtttttagggcctgttcccctctcacaatcgccgtgccctgactgtaggtgggatggaagatgatgtcccggtcggtgaccacggcatccgattcatcagtggcgtgccaccgccaggcattcacgtttccggactcatcctcgccgcattggcacctgaccaggtcgggtatatggcccttgtggttggtaacctcaatggagttgggaaacgggcaatcacagaagccgggattgcaggcttcttggtacgggggcagcagcatgctggcacttgttcctcttcactggtttaccttcgattgctttgtaatgaattgtgtcagccgtgtacaatgatctcgagcagtcgacggaccacaaatgtttccagttaaaccagctgcagcctcatatataagcacattactctgatctgactgaacaataaacaaaacgatgcgttgtaaatagacgtcggcatcgctgccgacgtcgccgccagtgtgaccgaagccgcagttcggaacttaaaatatactagatatatctcaattatgagaattatggtcaaatttatagcaatttcttttgtggattgctagtgcgtaggaaattttggtgtttacaaaagctaaaaaaccagtattcaaattttaaatagaatgttgatgggctacatttttaaaaacttagatgcgcgcgctaacgataggtttcctacaaatggcagccctgatatcgattttcagttggcttcgcacatatggcatctctttagccttttgacaatctggcagcacgcgtagccacaaacagcggcttttcactacgatatttccgcaaaaagttgtaaaataggttaataaaagtgcttaatacttataaaaacaactaaacagacatggcggatgccgcagcacgtcagctgcaatacgagtacaaggcggtaagtgtcaaatcccgcccgggaaaacttctcccactccatgcggcgtctcaccagaatttcacaaacacgttaaatgtattttccatttttcagaactccaatcttgtgctgcaagccgatgtccgactcatcgaacgtccgcgccgcgatgaggccactggcgaggtgtgttccctggtgggaaagctggacggaacaaggatgggagatcggtaccagcgaacgaagccggagaaaacggaggagcgcaaggtgaaacgtcagaagcgcgacgaggcccagtacgatttcgagcggatgaagggagccactctgctctccgagggcattgacgagatggtgggcattgtgtatcgacccaagacccaggaaactcgtcagacctacgaggtcctgctcagtttcatccaggaggctct

SEQ ID NO: 12890 - DNA, 1113 bp, DROSOPHILA
actgctcgagatcattgtacacggctgacacaattcattacaaagcaatcgaaggtaaaccagtgaagaggaacaagtgccagcatgctgctgcccccgtaccaagaagcctgcaatcccggcttctgtgattgcccgtttcccaactccattgaggttaccaaccacaagggccatatacccgacctggtcaggtgccaatgcggcgaggatgagtccggaaacgtgaatgcctggcggtggcacgccactgatgaatcggatgccgtggtcaccgaccgggacatcatcttccatcccacctacagtcagggcacggcgattgtgagaggggaacaggccctaaaaacaaacatggtgcacttttgggagatgcgcgtcatcacgactctggccggcacggatgtgatgttcggcatcggcacggaaagcgttaatctagggcagttcaagtttcactttgtctcggccctgggcaccaatgcccagtcctggggcttttcgtattccggaaggattcagcactgtggcgagttactgccctacggccagaagttctcgcagggctgcttgattggtgtctgtttggatcgaacgcgtgggcacttggagttctatttgaaccgcagatcgctgggagtggcctacaccaatgtcccgacggatccggatgtcaaaatatatcccatggtctgctccacagccgcgaagtccgtaattaggctgatcaactgcacttcgcaaccagtcacactgcagctgcgatctttccaagcattgtccaggcagccgctcaaattggccgaactgcgtcaaatgccgggtctcaaaggcatcatgcaatcctactggttcctggcaccgccaattcgttactcccggaactcccgcgaaaacgaattggatctgggcgacgaagcagtgctctcaagctccaagcaacggttgaggcgcaaacaaaagtaccgagaaaccgacgatgcggctgttgatgaggacgacttgtacgccaatgcacacaaaatcacgttgcgaagcagtgatagcggcgacgaggagcacaccgctagtgtccacgagatgtgcgacgagtacttccactacctgctttag

SEQ ID NO: 12891 - protein, 252 aa, DROSOPHILA
MVHFWEMRVITTLAGTDVMFGIGTESVNLGQFKFHFVSALGTNAQSWGFSYSGRIQHCGELLPYGQKFSQGCLIGVCLDRTRGHLEFYLNRRSLGVAYTNVPTDPDVKIYPMVCSTAAKSVIRLINCTSQPVTLQLRSFQALSRQPLKLAELRQMPGLKGIMQSYWFLAPPIRYSRNSRENELDLGDEAVLSSSKQRLRRKQKYRETDDAAVDEDDLYANAHKITLRSSDSGDEEHTASVHEMCDEYFHYLL

SEQ ID NO: 12892 - DNA, 12126 bp, DROSOPHILA
catcctggcgcgtcctcgcaccagcgcttaattgagctcattgatttgcagattctctttgtgaactcctctttgcataacgctcgatatctggaaaaactatcaactatcacggcatttgtatgctatatagtgcatatagccgatgtgtatatagacggcctactccacaaatcaggtcaaagttgcagtgtgacccagaaacgaacactgacgtacggcacggatacaagttgtgggcaatccagtcgtggctgggatttggattcggggattgggattgggattgggattgagatgacctggggattgggataagccagttcgatttgcatggcaacgaagtggcaagtggagaggcatttatcgatgccctcggaataaatcatttgcaagcgaaagcatttggaaaatacgtggcatacaacaaatttgaccatactccaatatatgcaaacaaatttaagaatagaataaattaattaaaatagttaatattcatttaattattaaatattcatttaattatttaatattttttctagttcattttgcctgaaaatattgtagcttaatttcaaaatataaacttttgaaactttggctaagtaatatattaaatagctgcaacttttccctagaaagaaggtaaaatcgaaatagaaagcacacagttacgaaagaacattgtcgtaattatttaatggttgtcccatcccaaatcccaagggtctgtccgttgctgcgacaattattccaaagaactttagccccacaaacatatgtatacatatacatatatgtacgtgcaacattttcgcatttcccgtgttttgttcgctccattcttgttacacattttcacgttttcccagctgatgggaaggaacaacactgaacttgagcgggatgcggtggcacaatattgacattcgctattcgggtgggttactatttcctttcagtctcctccgtgctttgttttgtttttgagcgcagaatggagagagcacggggaaagccacgggtcgaaaatcgatactgctgcccaggcagcacgcaggcttacggatacggactctccacccggaccctggaaccccggattcgggcgaaggcggtgcggagtgcattatggcaatgtggagcaggctctggacacaggagcagggcggaacacaaaagggggcgtggccggtggcgggcggctggtggaaaatccaataagcacgcgaactcgaactcgaactcaaaccaactccaaaaatagacatggagccaagctgcggaaaatgcgcacgaagcggagggcacacgaaaatgaaatacactggcaggcaaacggcaccaccaccaaacacttgagcatactctagaaaaagacccatattaactactacacagagcgaaaaactgaagtgtttaggaattttgtaccaagatttggatatatgtttggaaaaaaatatatataaatagggatttaatatagggacaaaataatagagacaaaataatagagacaaaatatatctgctttaatataaatttatttatttggtttatataaaacaattatcccaaaataaactttttgcctaaatgcaatagttatttactttaaaaatgatttctgctctcgaagcacaaatataagttttatttttgctgcaagtgcgcctcgcagtatgcaacatatttgctcgttgctcgcccgaaaacagccaaagtttctccaaaatgtagtttcatgtcgcagaaggcggtgggcggggcactgtgtgggaaaatgcactttccggaatattaatcaaattacttagcttgtaattaaacattttagcaggcagggcaaagatgtggctctgtacctgtgcgccaaattgctcttgaaagctcggttaatttaaacaatttggggacaacccaggcaaggtaaactgtttattgatttagcgactagctagatacagttgggattataagggcaatagtgaattttcagtgaagaaatctgcttgtgagacttcagataccataaatgtatagatagtcatcagcaataaaagttttaattatgataaatgaccccagaggccagtatcccttatcataatttaaagccaattataccatatgcccttaaattggtgctgccttaaaatctgtcttgaattagccaagtcataagcagaaaagtgttggctgaaggcacatatgtatacagtgatttgtaaaattatcaagccaattttcacccaaccgggacactcgcttccacttcgagtaacacaattccgaatacgccaggaccgcctacttccatttcccttctcttttttgccgctcgacgggtccttttggcaaagtcaaggaggattgtgtaacttgtagcagacggaaggaccaaggaagcccgcttgggtaatgccaactttcgagcaccaaatttgtatttgcatttgtcgcacaatcaaatctcaacaataaaaaccagacacatttgaaatggcaaagcaaataatgaatactctgaaaaaaatttaatatttaagcataagaacaataggataagttaattaaagctatctgctgacaattaattgagaaacataaagagaaagcattttaaaatcgtttctatataattacataaatcctattttcctataatgaaattcaaatgtaatttgctcagcaagttgaagttctcatccaagtttagagtaaagcattccgcatttaaaccgaccggaaatgacagagaaagctcagtcaatgtctctgccacgcccacgtgggcggcgagatgactgccttttgtttgggcgcacgtcgaaacggaaaggcagaaacgattgcgaagattggggcagagtccttaaatggcaaggatgacgtcgaaggatgaaggatgttgatgcagccaggcggacaccgacgataagcgctcctcggcggaggaggctcaccttgaggcttaggttcctcattcggaactgagctctgccgaatccgcgcatttatggcaattatattggtcctctccacaaaggggcaacatgttctctcgataagccaaactcaaagaaaagcttttccgatggcctcccttaattggccatttaagtttttatttatgcgctcgaggatgaaagcaatgggctatcgattttcgaatcgttacaaagattaatgtgatttgcatcttttcttgagtgggaaatccatattactagcagcttgctaaatgtagggatttagtctaatgatataccgcaaaaagttaatagtatgctgaccataatccattactgaattctccaggccccttaaaatcagtggctctgccctaaagtcgcgggaccaggtacttccggtccgtaatcgcgactcaaaaggcattgcacctggtggcggattaccttggcttagttagtttgcagttggaatattgtttgccttatcggcgaactttctgcagccacaacaagtcgcaaaaatggtagaatcgaggtcggaggttacggcctgcacgccaactcaacgaaagtgggccataaatctgtccggctgtggcctccatttttatttggtcatgtcgtgcggagccacgcgaaagtttcgcgtatgccacatgaggcaagactcgagaaactattgacgacgggtagtgacaaaccacagttggtaacttcccacaaattatgtaattgcaatggtttttgccggaaatgactgccaatgtttaatggggtctttaaactgctgctttttaatgctagacgtaaaaataccttttactatgttacagactttaaaccaaacaaaatattatatagcaagctatagagttatatgttacttcaaataggaacaatactattaatttcataaattacttacaagtccatatattctgagatctcttttctgagccacctttgcaaccggaaactagccaattaaccccatggtgtatcgtgttgcctcgttacaggtgaaactcgctaattgtcgggtggaaaaaggttagcaatacacagagcaaacgggatgtaaaggataagcaaagccgacaccataagcgattgaaaaacgaagcagaggagaggacgaaggactccacttttccagagcgcttcgtttcccaggaggcaaggtgaatctgttccagcacacgatgtcatcgatctcggcgcagggcgtggtcgagcgagcatccgcggagttgtcgaagcggatcaatggcctgggcctgcgctcgaagcaccatcatagcagcacatccagtggtgctggtggcgccggcgatgctgcatccccggcaggagccacgcccactccggcagcgcccagcggcaagacgtcggtgatggagcgcgtaacgaacgccctgtgcggcggtggcaactcaaattctaactcaggatcgaatagctccaatagcaacacctcttcagcgtctgccaccgctgccacatcgcccgccagcaacgccaatcctccacagacgccggacaaaccgtcgcgtggcagtagccccagtcccggcggtatcacaatgccaggtggccagtcgcaggtccagaactccacacaccacctcctgcagcagcaacaacagcaacagcagcatatgcagctgcaacaatcgcagcagcagcatctccagctgcaagcctccacgctgatcaactccaaccaccatgtgatggtgggtcctgctccgcccactggcatgcctctgggtgccccgcccacgccgacagtgaagtccattgccaagcagatgaacataaccataccgggtggcggagtaaatcccggttcgcccaccttcagcaccatgggcatggtggccgcccagaaggcggcggccagtgctggaggtacaccgttgcagttgcggaaacaactgcccaatcctcacctgcaccatccgtatggcagtatgggcatcaacgcagcatcgccgctgatcatgcaacaccagctccacccgccgcctatccacagcatcgagcagctgatgctcgacgatcgctttctgagccgcttcttccagtacttctccccctacgaacggcgcatccttgcccaggtgtgcatcaagtggcgggacacactgtaccgcagtccgcgctactggagcggcctgttgcccacgctgcagtgccgcgagctgcgccaaatgccaggctgcgatcgcggcaaactctacaactcgctcatccggcgcggattccacgctctcggactggtcggcgcctccgacgaagacgccctggatgtcgtccactccttccccctcgcatccaagcatgtccactcgctcagtctgcgctgctcctcgattagcgaccggggactggagaccctgcttgaccacctgcaggtgagcttgattctttatacttatggctttagtttttagcttttagatttttttatgtaattatatttcaatagttcgctatatattttgtctcttttcgctttaatttacctgtgaccaatttaatttcaattatttttacaattttacaaaatgaatgcgttcatttgcttgaaatgtccaattaataaaagtgcattggcaatctggcttttattaaagcataatacaatttaaaatttccatccactatgtgaatttatgcaaagagattaactctaaagttgtaattatatctctttaaaatggttattcatctcaacccagacggctcattaagatatgtcgctgataaaagtgagacagagccgactaaaaatgtttggcaaacggctttcgtatcttttcgcccttgagatacaagtgcaaactacttatgtgtgtgtaaacaaaattgccatctgcacataagctggaataatgggctgtcatttgtttaaaatgcaagacaacttggcccatgggcagacggcaatgtccggaaatctggccccaaagggcatcccattccagggcaactgctcccagctctgcagcatctctcccttttcggggcccagctggttttcatttggccccacatccgacttgatttggttttcttgttttcctgggacccccgacggagatggggtcggaaaatgtctgagaaagagagcatttttcgcctgtgggcgtttcgagttttggccagcggcagcggcaagttgacagtggtcagtcccgcttttgggccacatgcacaagcaaagtagaaataaaatgatacagattcgcacacgaatccgtatctgtgcgctgaaatgaaaactattttcattttatttcgggacttgtgccgcgcgccagagaaatgaaacgtgtcaaagctgaaaagtgtgtcatcggctggcgatattttggcgaaataaaccctccactttcgtcactcgactcgactcgccggcacataatgaattgatgcgatcaatttcagatgcaaatcacatcaaagctccgtcataaatttcatttaatttagccttttatttagttgcgctaatttgtgcgaaatgtgcgagtagctcaatcgaatacactcactgtgcattcataatttctacgcgccgccaggtgaatcatttatgagttgcgctccgatggcaggagaaaattccatattttattagaataaaagcaggaaggcgtgaactgaaatcttttgcggaatttattataaacaatttacaatttaagaactttatttttggctgaacacatttatgtgagaaccatttaaattaaccaatatgtatatataccttgattggtattcctttcacaacaatctcattcacacttctcattcataacaagctatcattttatcctcggccattccactcgctttgtcttttttactacgcttccaacgaattcatctctttcggtttgccggactgcctcaataatcccgagaaacccaatcgaatttggacgaacaagtgggcagcttaattgatggccaaactgttttggggatagtcctgggcaaactaatccattcatttcatggaccaatcccgagcaatctggcaacctaatccaccaggggcccagcatgggtcaccggaaatggaccacacagacactgggatttgagacaacaccaatacaaatacatacacacgagcggagccagtaaagtggattacgttggtgaactggctgtggccaagtcctttatgaaggagcgttctacatgaatttgcggtcctgtcagctcagtcagtcagacacccattgggttgactgcatcacttttccccacaattcagtccctttgattttcagcttgtttgattgctagggtgatcccctctctatcatatgctgatatatttacttagtagtaatattcgcaatttacaattttaatttatctaaccacaacatatgattgatttatatcagactgcacaataatcttgaatgctttagttttaaggaattcaacttttgttgtatatgaatagctaacactgcgtatgagtaatatggtctagcttcaacattcacatctttctaagctcctaagatatctttctcctagaaatgagtaccctttaagtagaagagtttcagtgacttaggtttaagttgcgactaataaggtccaccctgctgtgcatacgtcatacgtcggagtgctgatgtcagaattaatccactgcgagtgcatgtcatgtttatgagcctagttacattgccagggtctaaaattttcacatgtgtgcgtgtgtgtttatgtgtgtgcgtgtgtgtgggtgcccaggaagcgcccacaaatggtttgattgcaaattgttgtcgctggcaatgtcaacaacaatgacacactggggacaagttggatttggccatgatgcgaaaggatcacccgcaatgggctcaggaatttgaccttggggactctgcggaaagtgtgtatgggaagtgcccatatggaatttgcccaacccttttgcacactgactttccaggaaaaccgccccaaaacatgcaacgcgctaaattaatgctagttactgctgctgaatgagcggcggaaatgcggcgactttcctgcattcccatacatatttaatggcaaatgcactgcagtcgcctcgggcgagtgcaaatatagtgtatatatgcgatttccgcattgccgctccaaagttgccactccagacttttcaaaggggggtattttacaagtgagtccggaacggagctcgttgaacccaaccccattgacccagaaacttaggctacgctctggcacctctggctatttaaatgcgaattccttttcaccagcagatgcagtaataaatttattaatttatttaaagtgcatctctcgtttgagggattatatcaccaagcacccagctatttattcaaaacgaaattgaacataatcaagttttaacttgagaaaaagtagcttaataaagcaggagatacttcacttaatataatttaatacataattcattatattttatgtaagcagtaaaatttctaatttgaaagtctggcaaacgaatatattttccctcagtttgaccactcgctcataaattgccatcgtttttagcgaaaaaacctcagaaaccgaggcgaaaacacgggaaaactttttccggctaaatagtcacacatcctggcatgtgtgtgtgtgtgtgtgtgtgtgtgcttccattagcatttctatgtggaactctcctttgcgtggttgacttttcctatcgatttggattttctcctgcccgacgagaacaacacattgtaccgaaaaaagtttcccatggctacggctacgtgttttgtgttgttcggtttgaacaagccatggggcaaaagttccacaattgtccataaaaacgaaatgcggaaaatggttggcggtgaaatctaaacaactagcgagcatttaccatccataatgaagtcatgccaaaaggcttggcttccttgtttgtcgggcttccttttgctgattgttggccaagttaaccaagatgtacagaatccaattactggccatgtattcaacacatccgtaattagaccatttaatttgctaatgagttggatgactgtcctttacttgtgccatgtttcgttggtcactaattggaacatcagatgcgattaggattagaatactgagaggataaaaggatatcttaatgcatttgccacaacattcctatacaaagaaatattataaatcagaaatctataactaagcctttgatcttgtttagtaaccttttgctcttctcgctgcgaaagtaaatgaatccatggcgaatgtcgaatggattcaattttgatttattactcgaagtcacggggattcgcattaaggattcggattaaattggtatcttgctgttttagctgtttacgttttgttatttctccagttttgcgtcaacaatacaaaagtaattgttgttcagccgcggcagtgggaaaatttctcgcttaatgcgttttgtgtgtggccatccttgggattttcattcttcttttttttatatatattgtgcttccggctgcatttgctgtttatcgcctttgtttccgtgtttccggttgttcgaaggatggggtgggggttggttcaggcaaatgggttgaattcgagggatccaatggcaatggcgcctgtatcccgacacaaagtctgccactcgaatcgggtcgcctccatcgagatgttatgtgttttttccccgcttttacttcgtcgacaatgttttgctcttgaaaaggtcaaagttaatcctgttatggggacttaaattgctcgtagaacgcatggaaaaataaaaaaaagacaaattcagctaggagagaagttttcccgagtttgttgactcgtaaattttggcatcaaaagttggcagtgctgaaatttaatttcatttttaatggatacgcgtcgcacccaccaggtggcagctgtaatttgtttgaatcactctggtctatttttccaatagaaaattctttcaattttcccgcattccacgcacacaatccaacacatcgcgagattttcaaagtgcaattttccttgttttgtctacggttcaccgaatgatttatgaggtaaatgcaaaaatgcaattaggttttcctagctttgggacattccatttgcacttttgcgtttaattaagcacattgattagtttaagcttcaaaaacctcgaaatgattgcttttctattttgtttacaaagaagtacatttttattggcctcgattttcatggacgtcaaggagaattgaaagaaacgtttaattatgtggcaatattaaatgttctttagcagatacttaaaaatccaaaccacctgatgcacaagttttccatattgatatatgtatataggtgttttatgtaaaaatatatgtgccgaggtattttcgttttgctatttttcactcgcctccgattggcctttttttttcctgctcgccaagtgtcaacgtttatgaacgctgtgaaatgtccaaaattatttcagaattaaatatggcagatcataaaaacatttgacggtttcatgacagaaaagtcacccttatagacgaatataccgaattcgagaccaagagaatgagcagcgaactcatgaattccttaagtaattttcttcaatatttgcggtttcaagttcattgccaagaataacaacacacctcttgttgaaaatatatttgaagaattattacatttctgttcaagaattttgaaaaactttagtcgaagcacgttttttgcatttttttccatggaaaacatttgtttacaagtggtttttttgttttcgcttgtgctacatgtaaattaatatcgattcgtgttgattagtctgacttaatttaaacaattttatttatttagagtggcattccttgattcctaactaatgtttagaagtactataaatttaatacacatactagagtagatgtctgatatttttaataacatcctttgtgcaaagtgtccttgctgcagttgataatactcaatccttttaaattgcagagtttgtttgaactggagctggctggctgcaacgaggtgaccgaggcgggactgtgggcgtgtctaacgccccgaatcgtatccctatccctggcggactgcatcaacatcgcggacgaggcggtgggcgcggtggcccagctcctgccctccctctacgagttctcgctgcaggcaagtccagattgatgaggatctgccacagctcctagagctgctgctcctacacccttttcccctcttatgccgcatctcgtatcgaattaattgaatctccttccgcccctcaacaggcttaccacgtcacggatgcggctctcggctacttctcgcccaaacagagccacagcctcagcatcctgcgactgcagtcgtgctgggaactaaccaaccatggcatcgttaatatcggtaagcgacactctgccccctgccaattaatcaaattacatgtggaacgaatgtggggagggcggatccaatttgtcccacaaattgcacagacaaaaatttcattaaaaaaatatagagggattcattcgggaattttctctgaattctcctaaatgatctatagttccgaaaatatttgaatattatcgcaaagaaaagatttaaaaaggctacaactactactacaaataatggaaattatgcttaaatatatataaaatatcttgcaccgtataacgagtataatgaattttcaatcggaaattaaaaggctttcgttacacaacaaattcaacttggttgagcgcctccatcggtagcaatgtttaatccagaaatgaggatgaccgagtggcggcgagtaatgttgctcctcccagccgtgctgatagtggtccgaaaaagctgttcaggatttcctccgggagtgtgccaaacggagcacgagttgtaagagaaatgcgaacatcatattgcaaatgaaatgcccgagctgggggctagagagtcctcctagtccgcacgggattgtcgtgcttccgaaaaaaaataggttgtccatgggccctcgtcatcttgtctaaacattgcactcaactaattgaaacttttt

SEQ ID NO: 12893 - DNA, 914 bp, DROSOPHILA
atggagagagcacggggaaagccacgggtcgaaaatcgatactgctgcccaggcagcacgcaggcttacggatacggactctccacccggaccctggaaccccggattcgggcgaaggcggtgaaactcgctaattgtcgggtggaaaaaggaggcaaggtgaatctgttccagcacacgatgtcatcgatctcggcgcagggcgtggtcgagcgagcatccgcggagttgtcgaagcggatcaatggcctgggcctgcgctcgaagcaccatcatagcagcacatccagtggtgctggtggcgccggcgatgctgcatccccggcaggagccacgcccactccggcagcgcccagcggcaagacgtcggtgatggagcgcgtaacgaacgccctgtgcggcggtggcaactcaaattctaactcaggatcgaatagctccaatagcaacacctcttcagcgtctgccaccgctgccacatcgcccgccagcaacgccaatcctccacagacgccggacaaaccgtcgcgtggcagtagccccagtcccggcggtatcacaatgccagggcggagtaaatcccggttcgcccaccttcagcaccatgggcatggtggccgcccagaaggcggcggccagtgctggaggtacaccgttgcagttgcggaaacaactgcccaatcctcacctgcaccatccgtatggcagtatgggcatcaacgcagcatcgccgctgatcatgcaacaccagctccacccgccgcctatccaagcatgtccactcgctcagtctgcgctgctcctcgattagcgaccggggactggagaccctgcttgaccacctgcagagtttgtttgaactggagctggctggctgcaacgaggtgaccgaggcgggactgtgggcgtgtcta

SEQ ID NO: 12894 - protein, 295 aa, DROSOPHILA
MERARGKPRVENRYCCPGSTQAYGYGLSTRTLEPRIRAKAVKLANCRVEKGGKVNLFQHTMSSISAQGVVERASAELSKRINGLGLRSKHHHSSTSSGAGGAGDAASPAGATPTPAAPSGKTSVMERVTNALCGGGNSNSNSGSNSSNSNTSSASATAATSPASNANPPQTPDKPSRGSSPSPGGITMPGRSKSRFAHLQHHGHGGRPEGGGQCWRYTVAVAETTAQSSPAPSVWQYGHQRSIAADHATPAPPAAYPSMSTRSVCAAPRLATGDWRPCLTTCRVCLNWSWLAATR

SEQ ID NO: 12895 - DNA, 8372 bp, DROSOPHILA
gccgtcagtcgattgcgccaaatgcgctcctgaaatcagcgattcttgcggccgccgagcagaacgctgccaagacgccgccgcctaagccgcgcacctccatcctcaagacgcccggcaccacgaaacgccagaaccgtggcgtgctcttcagcgccaagaagagcgtacgacgattccagttcacctacgaggagggaaacattagcaacgacgagacagtgggcgccgacaagttggaggactgcgaggaggacatgtcgctggaagcctccacggaaagcggatccctggaacagaatccgggaagggattccaatcaggagaatgaagcaactcctcgcacgtacacgctgcgcaatcggcgggtgaatctgcgtccctcctccgagtttatgtagttttgtctattgacagtaattgtccgttgtggaattgtttatacttttatcttcttagtttaatatttttttgcggatgccattaagtgttaatttattaagatgttgaaaattacatttggcgttttaaatgttcgacgagtatgttctgtgaaaatgaaagcttattttatttttaattatctatcttaccttgattataatttagacatagttaaaggaataaaaaagagaagaataaataaatttgaaatgcttttcttattgaaaggggatcgaaatttaaaattaacaatttaatatcacaacacagaaatttgattacgcgactcaactagtaaaacttgaattttggagttccagaaaattaatattaaaatatttgcatttttcaagttgtctaaataaattttaagaatttagttttggtatgagtctttgctaacatattacccaagtcattcaccttcatggctccgtataattttgaagtattttccagtatttcctaaggaaatttcagtatatctgcgtgtgtatggcggtataatttaacggtagcgacacggtctcaccctgattcataaaagtaaaggaagaccactcgacggcaatttaaattgaattttgaattttgctgttgcactcgattgtaaatactcgttgataaggccgccaaatgaaagtgcacatagctgtgatatcgcgacgcgcatctcaccgcagtgactaaccgcctcgcgaccgtttcgttcgcccgcgacgccctttgagttcaacgcattcacatttcccagtgtgcagattttctttttgttttgtccgcagtcaccgcgcactgcattcaaaacagcgcccaacacacaatacgcgaaccacagcggcacagcatacacaatacacacccagcatggacacgagtggcggaaatttgggtaaggatctggtcatttcgtatttcaaattgaattttcaacctctggtacagcgtgtactcgccatggcagttgggccattcgctggcgcgcaaattgatctcctcgatttgcggctcccccttcgcttgtctacccccctgccacaacaccggcaagctaacttatgagtgcgtattgcattgcggtgtgcatatatctggcaatgggtctgaatttagatttttcgtaagtttgtgcactctgctgacgaaacgaaaaagtgcttttaacgatctgggaacatcccatggcgctgcgttgccagacagcttgttacacacatgggcatttgtatgcttgtgttggtgtttttagtggggtacagtcttgggggcaaatgtttttacactgtaaaaagtatgctaacgtgcaattagagaattggcaagcacataaatttaattagcaagttatatttggcattggtgtgtcctatgagtttagacgagttgttgagatgggtggttaatgggtggaaaaaaacgcgcacaaaataataacgtcaacaaggggctgccacccctttcaatgttcttatgcaaaagtagcagtcaaatatattactctatttcaaagtaaatatttaaagtagtagcctgttttaattaatgttaatgttttataattattttaccattataaatttttttttttttaaataatttaacgtatcgataagtgggtggcctatcggacaacctccaccatgtggcaactctggcgcacagcacatttcagggtttacgcaatttcgagccgtaagattttcttcgacctgtgaaaaggctttttaccccctgccaggatagctaaatcttcactcgtaagtgcagcaggagctatccatcgcgtagctcatattctaatccacacatttagttaaaagcgccaataggaagcccagaaccatgtcacatgcatttgccgccgccgtctgccggtccaccgcatccatgtcattggccctgcgctgcagccggcgcgccatgagctctgccagaatgctgcgtatggcgggtgccactgccacctccacggcctgcaaggattggcagagaaacggactacttgctgcgcccagaaccggcaacatgcagcagtacctgcgcgagtacgccaacgagaagaaggtgttcgagcgaaccaagccccattgcaatgtgggcaccattggccatgtggatcacggcaagaccacgctcacggcggccattaccaaggtcctggccgacaagcagctggccgagagcaagaagtacaatgaaatcgacaatgcgcccgaggagaaggctcgtggtattaccatcaatgtagcccacgtggagtaccagacggagacgcgtcactacggccacacagattgtccgggacatgccgattatattaagaacatgatcaccggcacagcccagatggatggcgccattctcgttgtggccgccaccgatggcgccatgccccaaactcgcgagcatatgctgctagccaagcagatcggcattgatcacatcgtggtgttcatcaacaaggtggacgccgccgatgaggagatggtcgacctggtggagatggagatccgagagctgcttaccgagatgggctatgatggtgacaagatccctgtggtaaagggctcggcgctgtgcgccctcgaggacaagagtcccgagatcggcaaggaggcgatcctgaaactgctccaggaggtggatagcttcatccccacgcctgtgcgcgagctggacaagcccttcctgctgcctgttgagaatgtgtattcgattcccggacgcggcaccgtcgtcactggtcgcctggagcgcggagtggtcaagaagggcatggagtgcgagttcgtgggctataacaaggtgctgaagtcgacggtgacgggcgtggagatgttccaccagattctggaggaggcgcaagccggtgatcagctgggagctctggtgcgcggcgttaagcgagatgacatcaagcgcggcatggtcatgtgcaagccgggcagtgtgaaggcactcgatcagctggaggcccaggtgtacatcctgtccaaggatgaaggcggtcgcacaaagcccttcatgtccttcatccaactgcagatgttctcccgcacctgggactgtgccgtgcaggtgcagattcccgataaggagatggtcatgcccggcgaagacaccaagctcattctgcgcctcatccggccaatggtcctggagcagggacaacgcttcacgctgcgtgacggaaacctgaccctgggcactggtgtcgtcaccagcactctgcccccattgactgaatcgcagcgatccgagttgacggagggcaagaaggcgcgcgagaagaaggtggcggctaagaagtagatccccggaacgccgtcagtcattaactaaaatcatattcttaagcgatttttatgcatattgtataagttgttggcgctccaatcacaatcgagtaaaatataaacaaacacctatggacaacgaagttttaaaacttggaatattagtagggatcttaaaattgatttaaaatagtacggcttttaagtattactgttgttgcctgacatttcggcatttcaaaggactatttgttatataaagttatgtaagtaagcattgatcattgataaagggcaatatttaatttaggcgccactcatcgattgcttatcgctctatgttaacggcatccgaaatagagtggtatcgaaatggagccgataaaatcaaacaaggccgataataacctgactacgacattttacaacactgctgcaaccgccttgaacgcagctgatgataaagaacattttgaaattgatttgaaaattggcaaaaatgagtacctaccgcgtagactacttgaccggtagattcaagcaccgtaaacgtttgtttgcaaagtaattaataacttattttgtccgcagattccctagacgacacggaaccattgccggagctgagttttgaagactttttggagccaacgtcggagaagagttcccagcacatggaaatcgaagctctggactcagaggaagacaatatcggcggtgaagatctggccgatccggccaacgattccctgaacacgccgcagtttaagaagaacgtggtccacatactggaggacaagaggttaaactcgtccggactaaccgttttgaagtcgcacgccattaagatggtgactgccggaggtactcctccggccaaggcgcaagttacagacgtaaagatactaaacaaattgaaaccaatacccagcagtacgctaaagatcggtagcacgaccatagcgaccaaatccacaccgggcagcataaccaagactttgggcaacttgacccagattaggacgaaagatggccaagtcatctttgtccagaagtctgttcctggaacacaaagcagcactgcggtgacagggtcaccaagcggtggaataagacgcctcgtggcgccttctggtatccagaaggcagtgctttctaagggcgtgaccatggcaagcacgggtctggtcaaggcggctgttcctgccaaagcaagcacctcggtacccggctcagccataaccttaaagggcatccaaccgctggccggaggcactgcgaaggcgtcgacttccagcacgacggcaaccacatccccatctttggcacagcccaacaaaattcaggtggtgcgcactgccgatggcaaaattatcaagatcaatcaggctggtccctcactgctggtgaacgccaaacagggaactgggaccacagtcacaccaggaggttctgccgccacttctgtcaaactatctccctccacgggaaatgtggtgctcaacaagcccgttggccaggtagtggtgagaacagaaactcctgtaaaaacggcgacgggctccgttgccagtgcatccgcaacaccgggcaagatgttggttcaaagtggcggcaaacagattcttgtatccaacaagaacatcattaagctgtcgccgaatgcgagtgccaccagttcgacaacccacacgacgggcggacagacaccttccacctcgagcggattgcacgctattcagctgcctggcaagggaggaatacaatatgtacgtgtcctgaacaacaataagagtgccgccggaacaagtgcaacagcctcaatcccgaaaacagtgcaaactcagaagatcactgtggtgcggccaccggctgctactggtgttcctgccacatctactacaacatccgcagcagcagcttcacctgcagccgcatcgaaggcaaaccttgccatgggcaacactaacaagattgtaatgcgatcaatgggtggcagcattgtgccgctgccttccgtgcagacgttggtctcaaaggttggtacttgtgttggtacaaatttatttcattctaactcaatttccatctttaaagcgtgcgctgggcgccatctccaacgcttcaaaaccagccagtgcggcgagcagcagcgccacgccgagtgccagccaggagttgccacgcaaacaccgtcttactgatctcaatgtgcagctaaagcaatcggcctcggtcagcagtgaagctagcgacagcagcgatgcgggtcctgaggccaaaaagccgcgttacgttattaccatgcagcaaggatcacagaaggcagcttcccagccagttcagaaactaattaatcggacagcgaatgtacagcgtgtggtgtctagcagtacaagtcccagttccaactccacaaagaaaatctacaactatgttcaaccgactggaagcaatggggccaagtacatgatctgtaactcgggtgtgccccaatcatcgacgagtgccatgcgacggggatacactggatatgtggaaaacaagacgcgacgcccgccacccatttccccgcaacagcaccgctttaagcagatgggtccccagcagcagtccaagcaccagcaacttcaagcgcaggccaagcaacggattagacagcagcaactgcctaccgaacaatcgacgccgatcaaggtcgagccaaagttgccgacactgcctccgggggtgaaggccaatgtacctgccaagccgctctttgaagtcctaaaacctccagcaaccgcggcagcagccggagccgtcgatccattgggcggcatgacttcgcggcgaaagcactgcaactgcagcaagtcgcagtgtctaaagctttactgcgattgctttgcaaacggcgagttttgtcaggactgcacctgcaaggattgctttaacaatctggactacgaagtggagcgggagcgtgctattcgcagctgcctcgatcgtaaccccagcgcctttaagtaagtttatttgaaaggaaaagcttatgaggtctatcctatgtttctaaagatgctaatcacaactactttttttttttttaaacagacccaaaattacggcacccaattcaggtgatatgcgtctgcataacaaaggttgcaactgcaaaagatcgggctgcctcaagaactattgtgagtgctatgaggcaaagattccctgctccagcatatgtaaatgcgttggtaagtgaactgataaatctgttttatctatgatcaaactaactgaatcaatcaacttattatttagggtgtcgaaacatggaagaccgtccggacgtggacatggactctctggacggattgatgggtgtcgagggtcagaaaaaggacaaagctaaaaacaagcaattgaacgagaatcgcgcaaatatatattttacggacgatgtcattgaggcgaccatcatgtgcatgatatcgcggattgtgatgcacgagaaacagaatgtggccgtggaggacatggagcgcgaggttatggaggaaatgggcgaaagtctgacacagatcatcgcttttgccaaggaaaagcaagaaacctctcagatagacgagtccaagccttcttcttaggcatgcaaatatagtcacacattaattagtttataagttcaaagagttcttgaccttttctcaatcatattctaattttggctttctaaaagttgaccttaaagtaaagtgtttaccctatttaaataatttaaacacaaaatgtatatatcatacatagcaaatttcagatataaggctattttaatttttggccgagcattgtaattgtgttgtaaacttttcccttggattgaatgtaaataatttagatacctaataaagtttaatgaccattgaacacaaatgaaaagagacgttgtgttgttttgtagcttgtttattcaccaacaacttcagttacatatttgtattttgcatttgcattgtttcaaatttattgatgggcgagtatattaaactcaacgcaatttagtttggtttttcacaatatcggtatcagcttagttagcaatatctctataaaataaacacatgtcgaatgactacagtataggtaatgcatatattagttgattgtattgatagtaggtatttagttttgtatatatgtagttttttttgtttaagtatagttatatattctacttggtcaccattggtatgtataaatagcatataagtatgtttgtgttctggtttctcccggttctcaccctataaacatggcatggcatgacatgagtacatatgtgtgtatgtatgtagtttcaaggtttgagtaaaaatgtgataatcgtttaaggactatagtacatatacgtggttagtaatgctaatatatatatatatatatatgccctgttatacatatttttcatacactgttttgactaatatgctcgcgctaaactatacgttttatttgcggtcattcgaatacgaactttttcgaagagagagtatgtgtgtgcgattatcttaaatagcaaatacatacagtaaacgttgagtatatcgatttaaggatagttttgaatatttgaatactgtgcacaaa

SEQ ID NO: 12896 - DNA, 3164 bp, DROSOPHILA
accactcgacggcaatttaaattgaattttgaattttgctgttgcactcgattgtaaatactcgttgataaggccgccaaatgaaagtgcacatagctgtgatatcgcgacgcgcatctcaccgcagtgactaaccgcctcgcgaccgtttcgttcgcccgcgacgccctttgagttcaacgcattcacatttcccagtgtgcagattttctttttgttttgtccgcagtcaccgcgcactgcattcaaaacagcgcccaacacacaatacgcgaaccacagcggcacagcatacacaatacacacccagcatggacacgagtggcggaaatttggattccctagacgacacggaaccattgccggagctgagttttgaagactttttggagccaacgtcggagaagagttcccagcacatggaaatcgaagctctggactcagaggaagacaatatcggcggtgaagatctggccgatccggccaacgattccctgaacacgccgcagtttaagaagaacgtggtccacatactggaggacaagaggttaaactcgtccggactaaccgttttgaagtcgcacgccattaagatggtgactgccggaggtactcctccggccaaggcgcaagttacagacgtaaagatactaaacaaattgaaaccaatacccagcagtacgctaaagatcggtagcacgaccatagcgaccaaatccacaccgggcagcataaccaagactttgggcaacttgacccagattaggacgaaagatggccaagtcatctttgtccagaagtctgttcctggaacacaaagcagcactgcggtgacagggtcaccaagcggtggaataagacgcctcgtggcgccttctggtatccagaaggcagtgctttctaagggcgtgaccatggcaagcacgggtctggtcaaggcggctgttcctgccaaagcaagcacctcggtacccggctcagccataaccttaaagggcatccaaccgctggccggaggcactgcgaaggcgtcgacttccagcacgacggcaaccacatccccatctttggcacagcccaacaaaattcaggtggtgcgcactgccgatggcaaaattatcaagatcaatcaggctggtccctcactgctggtgaacgccaaacagggaactgggaccacagtcacaccaggaggttctgccgccacttctgtcaaactatctccctccacgggaaatgtggtgctcaacaagcccgttggccaggtagtggtgagaacagaaactcctgtaaaaacggcgacgggctccgttgccagtgcatccgcaacaccgggcaagatgttggttcaaagtggcggcaaacagattcttgtatccaacaagaacatcattaagctgtcgccgaatgcgagtgccaccagttcgacaacccacacgacgggcggacagacaccttccacctcgagcggattgcacgctattcagctgcctggcaagggaggaatacaatatgtacgtgtcctgaacaacaataagagtgccgccggaacaagtgcaacagcctcaatcccgaaaacagtgcaaactcagaagatcactgtggtgcggccaccggctgctactggtgttcctgccacatctactacaacatccgcagcagcagcttcacctgcagccgcatcgaaggcaaaccttgccatgggcaacactaacaagattgtaatgcgatcaatgggtggcagcattgtgccgctgccttccgtgcagacgttggtctcaaagcgtgcgctgggcgccatctccaacgcttcaaaaccagccagtgcggcgagcagcagcgccacgccgagtgccagccaggagttgccacgcaaacaccgtcttactgatctcaatgtgcagctaaagcaatcggcctcggtcagcagtgaagctagcgacagcagcgatgcgggtcctgaggccaaaaagccgcgttacgttattaccatgcagcaaggatcacagaaggcagcttcccagccagttcagaaactaattaatcggacagcgaatgtacagcgtgtggtgtctagcagtacaagtcccagttccaactccacaaagaaaatctacaactatgttcaaccgactggaagcaatggggccaagtacatgatctgtaactcgggtgtgccccaatcatcgacgagtgccatgcgacggggatacactggatatgtggaaaacaagacgcgacgcccgccacccatttccccgcaacagcaccgctttaagcagatgggtccccagcagcagtccaagcaccagcaacttcaagcgcaggccaagcaacggattagacagcagcaactgcctaccgaacaatcgacgccgatcaaggtcgagccaaagttgccgacactgcctccgggggtgaaggccaatgtacctgccaagccgctctttgaagtcctaaaacctccagcaaccgcggcagcagccggagccgtcgatccattgggcggcatgacttcgcggcgaaagcactgcaactgcagcaagtcgcagtgtctaaagctttactgcgattgctttgcaaacggcgagttttgtcaggactgcacctgcaaggattgctttaacaatctggactacgaagtggagcgggagcgtgctattcgcagctgcctcgatcgtaaccccagcgcctttaaacccaaaattacggcacccaattcaggtgatatgcgtctgcataacaaaggttgcaactgcaaaagatcgggctgcctcaagaactattgtgagtgctatgaggcaaagattccctgctccagcatatgtaaatgcgttgggtgtcgaaacatggaagaccgtccggacgtggacatggactctctggacggattgatgggtgtcgagggtcagaaaaaggacaaagctaaaaacaagcaattgaacgagaatcgcgcaaatatatattttacggacgatgtcattgaggcgaccatcatgtgcatgatatcgcggattgtgatgcacgagaaacagaatgtggccgtggaggacatggagcgcgaggttatggaggaaatgggcgaaagtctgacacagatcatcgcttttgccaaggaaaagcaagaaacctctcagatagacgagtccaagccttcttcttag

SEQ ID NO: 12897 - protein, 950 aa, DROSOPHILA
MDTSGGNLDSLDDTEPLPELSFEDFLEPTSEKSSQHMEIEALDSEEDNIGGEDLADPANDSLNTPQFKKNVVHILEDKRLNSSGLTVLKSHAIKMVTAGGTPPAKAQVTDVKILNKLKPIPSSTLKIGSTTIATKSTPGSITKTLGNLTQIRTKDGQVIFVQKSVPGTQSSTAVTGSPSGGIRRLVAPSGIQKAVLSKGVTMASTGLVKAAVPAKASTSVPGSAITLKGIQPLAGGTAKASTSSTTATTSPSLAQPNKIQVVRTADGKIIKINQAGPSLLVNAKQGTGTTVTPGGSAATSVKLSPSTGNVVLNKPVGQVVVRTETPVKTATGSVASASATPGKMLVQSGGKQILVSNKNIIKLSPNASATSSTTHTTGGQTPSTSSGLHAIQLPGKGGIQYVRVLNNNKSAAGTSATASIPKTVQTQKITVVRPPAATGVPATSTTTSAAAASPAAASKANLAMGNTNKIVMRSMGGSIVPLPSVQTLVSKRALGAISNASKPASAASSSATPSASQELPRKHRLTDLNVQLKQSASVSSEASDSSDAGPEAKKPRYVITMQQGSQKAASQPVQKLINRTANVQRVVSSSTSPSSNSTKKIYNYVQPTGSNGAKYMICNSGVPQSSTSAMRRGYTGYVENKTRRPPPISPQQHRFKQMGPQQQSKHQQLQAQAKQRIRQQQLPTEQSTPIKVEPKLPTLPPGVKANVPAKPLFEVLKPPATAAAAGAVDPLGGMTSRRKHCNCSKSQCLKLYCDCFANGEFCQDCTCKDCFNNLDYEVERERAIRSCLDRNPSAFKPKITAPNSGDMRLHNKGCNCKRSGCLKNYCECYEAKIPCSSICKCVGCRNMEDRPDVDMDSLDGLMGVEGQKKDKAKNKQLNENRANIYFTDDVIEATIMCMISRIVMHEKQNVAVEDMEREVMEEMGESLTQIIAFAKEKQETSQIDESKPSS

SEQ ID NO: 12898 - DNA, 5064 bp, DROSOPHILA
cttggtcagcagcacaccaaggctgaactgctggacaagcggaaggagaacgatcggcacgccaagtcgctgcaagaggacgagcagaagctggcgcgcctgcgcaaggatgtggacaacctgatgaacgagaagaatgcgattagtgcggcgctgaccaaacgcaacgaggagttcgatcgactcaagcacagccaggagaacctgcaaacggtgtacgatcagacccagaggcagtgcagccagtatcaggatgatatgcgtctaatgggcgtggagataaagaatctgcgtacggaaagggatgtcctgcgcgcggatagagagagtgcagcggatctgcgccaggaactgttacaaatgcatcgcatgctcaaccaggaacgaatcaaggcgcgtgccctgcaggacgagatggttacgccgatgaatgtgcatcggtggcgtctcctgagcggcaaggatccagaaaaaatggacctgctcggacgcattagcatcctccgaaagcagttgctccagcagaacgttgccgcctcggagcaggaacgggccctcaatgaagcccaacagctctatgcggccttgagggagttcatgctcaagctgcccagccataaagtgcgggcggagctcaacagcgttaaggtatatccaaatgggattgctaaaaagtataagatctaattattcatcttccaacaggctaacctatccgccaaggatcgcaaactgaaggtcctaaaggccgagctcagtgcccgcgaggcagacgagaagtccaaaaaggagaagcttgaagagatgcgggtgagtttggctctaaccaagacccaactgctagaggagaagaagcacaagcagaagttacttgaggagcgacagttgctggagcagatgcattgctactccgcgcccgcccaactgcctaggactctgggtgcgggtttcaagatggtcagtagtctactctaatgctactattatcttacaataatatgtaatgaacaaaacacaatgtttttttaatattcgaaaagtgtaaaagataccctttcaaagttggaggcgggcctccatatgtagatatatgtggatactgtcatccagcttgtggagattaactttcgcaggtggcagacatgtcgaacacctgttccgtgaattcatcctcggtcgccttgccactgcgaatcgagaaatcccccttgccaatgaagttctccttgttctccagatgatgcaggcgcagttgctcctggaagccctctatcaggtgctccctggtcttgagatcgatctcgttgatcctgagctcagctttcatggccttgagttggcgggtctggcggcgattgatgcgctgctggatgcagagcttctggcgcacactcggatcgggtagattcgtcatctggcgcttgaactcctcgtgaacgtgctccaattcggccagctccttggccttgttttcccgttccacggatagccgaatgttgcgcttcagaagctgttgaatcttgcggatcaattcgaaacggcgcggatccttaccgagcaggactcgccagcgatggatgcgacaggggcgggacagctcttccgagtaggcggataccttgagcctctcctggttgagctgtcgctccaatcgaatcacatcatggcgcatggccgccttgttgcccacctcgcgctgcatgcattcgtgcgaagttcgcaggtttaccacttccagtttaagcaacctgatgtcctccaccctttggttgtactgcatggttccgcgatcgatggccttctgcatcatatccagtttctcccttagcagacgcacctcatcattcctcctaaccatttgcaagcccaccagactcttctctttggttacctcgtccagggcgcaggccatgttcttaaagcgcttttcatcggtatcgatggtgtgggcagcttgttccaaccggatcttcatctcgcgaagatccgtctttgtgctggccaacaggcgacttttggcgtgaatctcgttctgcttctgcttcacagttcggttcagctgctcaatctggttcttcaggctggagatctccttttcgttaatggccagcgaactggtcatctggttgatctggtgcgtcaacttggtcattgtgttctgcagcgtggagcggtccctcgagcacatgtccatcgttttcatcagcatgaccttctccgattgtatcacttccatctgcttcttgacgttcgcgaattcctgctgtttctgctgcagctccacttggagcacctccaatcgctcagacttcaaggcaagtgtctctgtagaaatccacctcgaattaatttcaatgtgtaattttttccttcgcatgctcaccctcgatcccatcgatcttcttgtaggcatcgttgagctccaggctctgctccctcttttcccgagctattttctgcacctgcaggtccttctcgtccagctgcttgttggctcgaagcagatcggttagcaaatcctgcatttggtggcggattgaagcgatttcgtgccgcactccggccacaatgtcattcaaacgggagatctctgctctcagcttgtcccgcgaacgagctatttcctccttttgtcggatggcctcattcagcttggcggtggccatcagcatcttcttctcctggaccttgagctcatttctaaaaggttgtcagtagtatcaatactattctagaaatattatactcactgattgaccagaacttgatcgttaagctccgtgttcttcttggccagcagatggaatcgtcgctccaggatcatcgagtcgtcagccttctttttggcatcccgctcggctgaacggcgcgccaattcgagatctagcttgtcccgtctctgggcatcgttgagaccctcggacacctttagactcgtctgcagcttgttcttctcatcctccatgattcgaagggacttggtcagggtatgattctcccgcgaaagacgatcgctgcgctgctttagtgcttcgttggtggcagccagctccataaaatccttctcggccgcctggagttcctcgttttgctgcacaacggcgaccaactccttgttcagatgcagcagccgatcctcgtacttatcctgctccacattacatctgtgctccagccgaaagttgtccaactcggctttcttcgcccgcgcattgagcttggagataatctccttgtatacctcgatcatgacttccaccgactccgagtaaaggcggttagtttgcagtcgcttctggtggtccttaagctcggcagccagccgatcgcgctcccgaaggaccaagcgatgaagttggaggtccttgctgcgaaaaggatcagttctagtaaacgaggaaacctgactggtggggttatgtgggtgaactcacttagagattggcacatgatcggtcgtgccttttgtcatattggattgatcgctgcgcaccagcgacatcagctgcagctgcatggtctcctcccgattcttggtcgcgtcctcgttccgccaggcgtcctccaaggactcacgcaagtgctccatcatcgcctccgagatcgctgtggtccgcagtgccagttgcagcttctcgtccgccgttctcaccttctcatgcattgccctgccctgctccacctcgttgacgtagtgcgcatgcagtctggagaggatgtccacgtacaacttgaccttgcccgccagaaaggggaagcgttcgctaagactttgcaccagctggtaggagcttgagaaaaacttatcgttaagatcacgcagtagatttatctgcgccggctctacgctctcccggaatcgctcctccaagttcatcatcgaaagcgacttggaattcacagaggcggtcttaaagagcctggacatcttgcgcttcgatgatttcatcttcagggtatcaagcaacaaagaaaaacaaccgctaaggattgcaggataacgaagaaatcctgccgaaaatcaaagaaaaaaattcaaaatcaacaaaaaaaattgttgtgtaatcagtgtgacgttctagtgtaatacattttattcagcattgccccattccaaaattgatttgaaaaatgaatttgtttggtttttatttaagcataaaattgcgtatatttcttaaactcaatttacagatttttcgtttgttacattctttttacaagtttgaatcagaaaatatatatgtatatatgtgtttatctttagtgttaatatatagttgttattattgttgaaattcaatttaaggatttcatcttgccacatacatctacgcacttatttattccagctaggtcaaatagaaacgaattaacataagcgaattaatacatataaaattacgataaatcacaaaaaatgtttcgcaaaaatttctgctacagttaacgcctactaaatcagcttgatcgcgcaatgatactcgacgctagaaaaatatacacacatttatctacacctctaactgccatttagtaaggccttggctagtgacaaaggatcttgcaaagttaaagcttacggataaaaaactcttgtccactctaaaaggtgcttccctacgtcccgaaacaaaacgaagaacagaaaacataatgtgatatttataaaatgcgagccgaacttaaagctggcgctatcttctgatatgaacaaatatcttttagtttagtctagtttagtttagttcgaagctttattgtagactcgtttgatagacgctcagttggtcattggtttggaaataaaaaatatatagctagggtaatatatatatttaagatatatatgatctatatacgcgggccctggctgtggtcatgtggccccatcgcatgggattaggattacgtataaaataaagaaaacaatgtttgcggaacaattgcgattcacagtttgcttttcctccatcgcggccacatttttggtcgtcagctgcgccttctagcgccattggccagtcctaagaggcgctggcctgaacgctctgaacactctgc

SEQ ID NO: 12899 - DNA, 2890 bp, DROSOPHILA
tacacaacaattttttttgttgattttgaatttttttctttgattttcggcaggatttcttcgttatcctgcaatccttagcggttgtttttctttgttgcttgataccctgaagatgaaatcatcgaagcgcaagatgtccaggctctttaagaccgcctctgtgaattccaagtcgctttcgatgatgaacttggaggagcgattccgggagagcgtagagccggcgcagataaatctactgcgtgatcttaacgataagtttttctcaagctcctaccagctggtgcaaagtcttagcgaacgcttcccctttctggcgggcaaggtcaagttgtacgtggacatcctctccagactgcatgcgcactacgtcaacgaggtggagcagggcagggcaatgcatgagaaggtgagaacggcggacgagaagctgcaactggcactgcggaccacagcgatctcggaggcgatgatggagcacttgcgtgagtccttggaggacgcctggcggaacgaggacgcgaccaagaatcgggaggagaccatgcagctgcagctgatgtcgctggtgcgcagcgatcaatccaatatgacaaaaggcacgaccgatcatgtgccaatctctaacaaggacctccaacttcatcgcttggtccttcgggagcgcgatcggctggctgccgagcttaaggaccaccagaagcgactgcaaactaaccgcctttactcggagtcggtggaagtcatgatcgaggtatacaaggagattatctccaagctcaatgcgcgggcgaagaaagccgagttggacaactttcggctggagcacagatgtaatgtggagcaggataagtacgaggatcggctgctgcatctgaacaaggagttggtcgccgttgtgcagcaaaacgaggaactccaggcggccgagaaggattttatggagctggctgccaccaacgaagcactaaagcagcgcagcgatcgtctttcgcgggagaatcataccctgaccaagtcccttcgaatcatggaggatgagaagaacaagctgcagacgagtctaaaggtgtccgagggtctcaacgatgcccagagacgggacaagctagatctcgaattggcgcgccgttcagccgagcgggatgccaaaaagaaggctgacgactcgatgatcctggagcgacgattccatctgctggccaagaagaacacggagcttaacgatcaagttctggtcaatcaaaatgagctcaaggtccaggagaagaagatgctgatggccaccgccaagctgaatgaggccatccgacaaaaggaggaaatagctcgttcgcgggacaagctgagagcagagatctcccgtttgaatgacattgtggccggagtgcggcacgaaatcgcttcaatccgccaccaaatgcaggatttgctaaccgatctgcttcgagccaacaagcagctggacgagaaggacctgcaggtgcagaaaatagctcgggaaaagagggagcagagcctggagctcaacgatgcctacaagaagatcgatgggatcgaggagacacttgccttgaagtctgagcgattggaggtgctccaagtggagctgcagcagaaacagcaggaattcgcgaacgtcaagaagcagatggaagtgatacaatcggagaaggtcatgctgatgaaaacgatggacatgtgctcgagggaccgctccacgctgcagaacacaatgaccaagttgacgcaccagatcaaccagatgaccagttcgctggccattaacgaaaaggagatctccagcctgaagaaccagattgagcagctgaaccgaactgtgaagcagaagcagaacgagattcacgccaaaagtcgcctgttggccagcacaaagacggatcttcgcgagatgaagatccggttggaacaagctgcccacaccatcgataccgatgaaaagcgctttaagaacatggcctgcgccctggacgaggtaaccaaagagaagagtctggtgggcttgcaaatggttaggaggaatgatgaggtgcgtctgctaagggagaaactggatatgatgcagaaggccatcgatcgcggaaccatgcagtacaaccaaagggtggaggacatcaggttgcttaaactggaagtggtaaacctgcgaacttcgcacgaatgcatgcagcgcgaggtgggcaacaaggcggccatgcgccatgatgtgattcgattggagcgacagctcaaccaggagaggctcaaggtatccgcctactcggaagagctgtcccgcccctgtcgcatccatcgctggcgagtcctgctcggtaaggatccgcgccgtttcgaattgatccgcaagattcaacagcttctgaagcgcaacattcggctatccgtggaacgggaaaacaaggccaaggagctggccgaattggagcacgttcacgaggagttcaagcgccagatgacgaatctacccgatccgagtgtgcgccagaagctctgcatccagcagcgcatcaatcgccgccagacccgccaactcaaggccatgaaagctgagctcaggatcaacgagatcgatctcaagaccagggagcacctgatagagggcttccaggagcaactgcgcctgcatcatctggagaacaaggagaacttcattggcaagggggatttctcgattcgcagtggcaaggcgaccgaggatgaattcacggaacaggtgttcgacatgtctgccacctgcgaaagttaatctccacaagctggatgacagtatccacatatatctacatatggaggcccgcctccaactttgaaagggtatcttttacacttttcgaatattaaaaaaacattgtgttttgttcattac

SEQ ID NO: 12900 - protein, 884 aa, DROSOPHILA
MKSSKRKMSRLFKTASVNSKSLSMMNLEERFRESVEPAQINLLRDLNDKFFSSSYQLVQSLSERFPFLAGKVKLYVDILSRLHAHYVNEVEQGRAMHEKVRTADEKLQLALRTTAISEAMMEHLRESLEDAWRNEDATKNREETMQLQLMSLVRSDQSNMTKGTTDHVPISNKDLQLHRLVLRERDRLAAELKDHQKRLQTNRLYSESVEVMIEVYKEIISKLNARAKKAELDNFRLEHRCNVEQDKYEDRLLHLNKELVAVVQQNEELQAAEKDFMELAATNEALKQRSDRLSRENHTLTKSLRIMEDEKNKLQTSLKVSEGLNDAQRRDKLDLELARRSAERDAKKKADDSMILERRFHLLAKKNTELNDQVLVNQNELKVQEKKMLMATAKLNEAIRQKEEIARSRDKLRAEISRLNDIVAGVRHEIASIRHQMQDLLTDLLRANKQLDEKDLQVQKIAREKREQSLELNDAYKKIDGIEETLALKSERLEVLQVELQQKQQEFANVKKQMEVIQSEKVMLMKTMDMCSRDRSTLQNTMTKLTHQINQMTSSLAINEKEISSLKNQIEQLNRTVKQKQNEIHAKSRLLASTKTDLREMKIRLEQAAHTIDTDEKRFKNMACALDEVTKEKSLVGLQMVRRNDEVRLLREKLDMMQKAIDRGTMQYNQRVEDIRLLKLEVVNLRTSHECMQREVGNKAAMRHDVIRLERQLNQERLKVSAYSEELSRPCRIHRWRVLLGKDPRRFELIRKIQQLLKRNIRLSVERENKAKELAELEHVHEEFKRQMTNLPDPSVRQKLCIQQRINRRQTRQLKAMKAELRINEIDLKTREHLIEGFQEQLRLHHLENKENFIGKGDFSIRSGKATEDEFTEQVFDMSATCES

SEQ ID NO: 12901 - DNA, 4662 bp, DROSOPHILA
ttgatgttattaattttgcccacaaaaaggtaccattcagcctatagtgtagtgcaaaaattgagttgacgcctggcaagcaaacttaagctgtcatccgcatgcctggaaaagcgaggaaaaagcgagggaaaagtgatggaaaaacgcgggacaggcacacatgcaatgggatgggttggctcggtgatgggtttccgtgaggtcgactggtgtcatgtttacgcggcgttgccacgcgacaacttgttgcacgtcctggccctcccacgcccacttccacttgtcctcatcctcgtcgcttctgctccttcctatccttgaagcggcaaaaggaaacattaacgaagtgggcatagatggggggaaaaccagaaatgggaagccaacttttagagttgagtccaaaaaaaaaaaaaagtcttgtgccacgctcgttactctaaatacgatcaaaaacacacacaaacaaaaaataaaaatatttaaaaaaggggaaaaaaacgggaaaatgacaatgaacatatcaacagattgtcaacatgttgatacctttgccttttaatctgataagtccttgtttgtgatataaaaacgtgctatttcgctattattagaataacatttattgtgcaaattgccaacgcttattacgagatgaaaattcaagggatttgcaaggcacttatgaattatgtttttaagcccacaattattggtatttataaattgttatgtgaaacctttttcaattccgactgagggttgtgttaattaattgcatcgtgggcggattaaatgaataatttttgaatcatatgccagaaaagagctatacccctgggaaagtgtatcggtaagacgggaaggtgacgacggaatatcaacgaacacagcccaatctcttaatgattttaattaacaaagtttacctcccatccaccacccacttccgtcaacttcatcccaatccctgccaatccctgccatcccatctccctcacatgctcacgaacttgaccagttttcgactgctcctccgaagcagcaccttgcccaggggctggccgaagccctcgaactgttggtagacatgcaggccccgcaccaccgtggcatgcaccacgccccgcaacttttgacccgcgtacggggtggccttcgtggccgtgtagagcagctccgggcccacggtgaactcctcctcgggactccacacacagaagtcggcatcgtagccctcggcaatgcggcccttcgaggcggacaagccgcacaggttcgccggctcctggcacatcagacgatggatgtccgcgatggtcaggttggcggatcctggcgagaacaggagatgagttcgtgaattgtgaaatcctgtaccatcaatacaatatcaatatatttggcattatcaaataaattagtagaaaactactgtgtaaatgatattatttaattgcatccgaaactggatgctttcctgcatattcattgtgataatggtaagctgaatatttcaatttaatttaagctatgttttattaaaatggcactgaatgaaatgtaaaacagattgaaaacttttaattgtgtcggaactttgcggtttcaggagttttatttcgaatagggataaactagaaataattattatgtttgttgactaagcccaattaaaatatatttaattaaaaacattgcctgatggcaattatctgagttattatgatgagtagctgcataaaagtggtgcaaactatggcattacactttccagataatacattaacaacactttccccaaacgacatatttcgtaataagcaagttattatgacaactttggcggttttaggagacaactaagtgtcgaaattaatttgctactaacgccaattaaaatatgcactaataaatttaccattgttattcaaagcaaatagaacatagcttcctggaagacagcacgcaaactagtgtgcatttcaaatgcagtcagtgctcagaaattgagtaatgcgtaatgcttcggctcatgcggcgtatacttgatatttgccattcactctccctcaattagcactaatgtggattggatggcttacctcgccgattggcggccgctgtccaaacgaccgacaggctgagttgcaacgagttgatgcccggccacgccttcaggaagttgccacgcccccttccgcaggtgagagcacgtgcacccggcgtcgccggcgagtgatcactgccaatcatgcggatggctccgcccggtctcagagcctgccacaattgctcctgattgcgacgctcccgaatcggtggccaggtcttgaactccgtgccgcaatcgggcacatcctcggccgccagggccaggtaatgcggacaggtgtccaccgttagattcccgccctgccgtcgacactcctccaccagcggcagactttcgccgctgctgcagttgaggatgtgtatgcagcgccgcgggtggcgattcgccagccggcagagcaactgcgtcgcggaaatctccatttggggtggacgagtcaccaggaaagtgccatactcccggggcgcctcctcgtccggatggatttcggtggtcagcggcagctcagcatgcacctgtcacaatggaaaacgcaggcattcaattaagccatatcattgagctctcaatcagaggagatggtttattgggaaaatcctgtgcaaaagtgaatggattatctgttatcctaccctagtgatccgttttaaaatatcggtaatgatatctggtagctatttacgctgtaattactggaaatctttcgaaaagcagaatgatttagtgctagaatctacatgtgtaactaatccacctttgaatttcaactgacatgcagcatggaagttattctattgcggcagaattttgttaatacaattaatgcacttaagaactatacttaatacattgagttcttgtgccctgaatagtagcttctgttgactcaccgctacgattgcttccccttcagcctgatccttgtccaactgggaaagagcctcctccagctgagattcgtttacggcgggaaattcctgagagacgggcgccgcgggatcgcacaatgtgcactgcagacccatgacaccggcacccaaaagtgcagccagctgatccccgtttccgggcactagtccgccccaaaaacccacgtccacatagatctttccacgggccgtcgacgttttggccttgagatgggccacactaacggtgggtggttgcgcgttggtgggtcgatcgatgattgtggtgaagccaccggcggccgccgccttggtggcagttgcaaaaccctcccagtccttgcgacccggctcgttgatatggacattgggatcaatcagaccgggcatcagtaccaggtccccgaaatcgtaaaccgattcggattctgtgttgtacaaataggtattaacctcctgcggtgaacgtagcactaagtagatgttatacaggtgttaaaaacagagtatggactaaatgtaagtttacccctgcgtataatgccctctgtatccacgatgatgccgccatggatcagggcgttttggctgccatcgcccaggaaaattcgccggctgagaaacaacagatccattctaaaagcagctgactactgagcgagttccttcttcagctgtctagtctacatacatattcgtctattttcgtagatcatgggagcgccttctgctgaagagagcaattcgtctaagcataccctgttcgtgcagttgggtatatcggactgagcttgtacttaatattttacacacatatgttatttttggggtattataacgaagtaaggatgcagaacaattgcttatgtagatatgtatgtagctgaaataaaattgtatataggtggcgccactacagacatggtttattgtttaaatattttctagaatttttaagggctctgctttcgtaacccgaaattggggcttgcaatctgtggaaaggtggtagagatgctctcccgttcagtaattgaattcgggatagaacttttcggcagcgctcaccttctagttgcgcgcccccgctttttggcttattaaaaactagagaagaaaaacaaaaatgaaaaaactttgttgacccacagcggaagaggcaaaaatctgcttaatgaaaatctaaactcacccacccaccacccactgtttttattttttgatctgtgcgtgtgttttctttttgctgggcgttacgtgtgccgaactttattaaagtgctgtgcacaactttcaaacgttttggagtgttttttttttttagctcttcggatttagattttgtgtttgtttaaattgtgcaaaatattttaattggtggcgccacccagtgggagcttagcaaaccgaagagaggcgtacggccagcaaaggcaacagcaaaaacaacggtgaaggcaacgacggcaaaggcaacagcaacaagacaaaaggcgcaagcgaaagcgaaaacgaacaagcagacgaaactgaaaccgaaaccaataacgggcgcaacgagacgcatacatacacgccaaactgactccgattgcgtgtctgtgtgccagcgtgcgtgtcagtgcgtgcgcgtga

SEQ ID NO: 12902 - DNA, 1500 bp, DROSOPHILA
atggatctgttgtttctcagccggcgaattttcctgggcgatggcagccaaaacgccctgatccatggcggcatcatcgtggatacagagggcattatacgcagggtgctacgttcaccgcaggaggttaatacctatttgtacaacacagaatccgaatcggtttacgatttcggggacctggtactgatgcccggtctgattgatcccaatgtccatatcaacgagccgggtcgcaaggactgggagggttttgcaactgccaccaaggcggcggccgccggtggcttcaccacaatcatcgatcgacccaccaacgcgcaaccacccaccgttagtgtggcccatctcaaggccaaaacgtcgacggcccgtggaaagatctatgtggacgtgggtttttggggcggactagtgcccggaaacggggatcagctggctgcacttttgggtgccggtgtcatgggtctgcagtgcacattgtgcgatcccgcggcgcccgtctctcaggaatttcccgccgtaaacgaatctcagctggaggaggctctttcccagttggacaaggatcaggctgaaggggaagcaatcgtagcggtgcatgctgagctgccgctgaccaccgaaatccatccggacgaggaggcgccccgggagtatggcactttcctggtgactcgtccaccccaaatggagatttccgcgacgcagttgctctgccggctggcgaatcgccacccgcggcgctgcatacacatcctcaactgcagcagcggcgaaagtctgccgctggtggaggagtgtcgacggcagggcgggaatctaacggtggacacctgtccgcattacctggccctggcggccgaggatgtgcccgattgcggcacggagttcaagacctggccaccgattcgggagcgtcgcaatcaggagcaattgtggcaggctctgagaccgggcggagccatccgcatgattggcagtgatcactcgccggcgacgccgggtgcacgtgctctcacctgcggaagggggcgtggcaacttcctgaaggcgtggccgggcatcaactcgttgcaactcagcctgtcggtcgtttggacagcggccgccaatcggcgaggatttcacaattcacgaactcatctcctgttctcgccaggatccgccaacctgaccatcgcggacatccatcgtctgatgtgccaggagccggcgaacctgtgcggcttgtccgcctcgaagggccgcattgccgagggctacgatgccgacttctgtgtgtggagtcccgaggaggagttcaccgtgggcccggagctgctctacacggccacgaaggccaccccgtacgcgggtcaaaagttgcggggcgtggtgcatgccacggtggtgcggggcctgcatgtctaccaacagttcgagggcttcggccagcccctgggcaaggtgctgcttcggaggagcagtcgaaaactggtcaagttcgtgagcatgtga

SEQ ID NO: 12903 - protein, 499 aa, DROSOPHILA
MDLLFLSRRIFLGDGSQNALIHGGIIVDTEGIIRRVLRSPQEVNTYLYNTESESVYDFGDLVLMPGLIDPNVHINEPGRKDWEGFATATKAAAAGGFTTIIDRPTNAQPPTVSVAHLKAKTSTARGKIYVDVGFWGGLVPGNGDQLAALLGAGVMGLQCTLCDPAAPVSQEFPAVNESQLEEALSQLDKDQAEGEAIVAVHAELPLTTEIHPDEEAPREYGTFLVTRPPQMEISATQLLCRLANRHPRRCIHILNCSSGESLPLVEECRRQGGNLTVDTCPHYLALAAEDVPDCGTEFKTWPPIRERRNQEQLWQALRPGGAIRMIGSDHSPATPGARALTCGRGRGNFLKAWPGINSLQLSLSVVWTAAANRRGFHNSRTHLLFSPGSANLTIADIHRLMCQEPANLCGLSASKGRIAEGYDADFCVWSPEEEFTVGPELLYTATKATPYAGQKLRGVVHATVVRGLHVYQQFEGFGQPLGKVLLRRSSRKLVKFVSM

SEQ ID NO: 12904 - DNA, 7129 bp, DROSOPHILA
ttcaagttaaaaacataaacagtgtggaacgagttaactttcatttaatgagaaagctttgaaatagtcgaatttttcaaaacattataaataaaatcaagttataccgccacttgacgtccatacgcacaaatgtacggatagacggacatgtccagatcaacttgaaagtgagataaatactttataaggtcggaaacgcttaccctttttttagttcccgaacaacaattcaatcgaacaaataaaacgcgatgtgttcttattctgtgtattatttattaaaatttaaaatattactttcatttggttttcaaactgtttttagcctaggtatattatgcacgtatggatgatgggaaggcggcaatgcgtctccacctgatgatgaatgagcatatgcttggaaacatgtgcgacatggctatggtctatataaagaatgaacacctcgattttgcgctggctaagctgcgggctccgacgacgagattacagcggaaaatggcagaacttttcaattcgtttcgaaagttttgtggaatttagcgtttttgagttattgcgacgactgcctgtctccctacgacgccgatccgttggtcacggcgagtttccctgaaagatgtacaggataatacagttgagcgggttttcgggtggaacgattcgagcctgcccatgcgatgactccgaaacactcagcgagtagtatgcgacataagctggcatttatttacagcggttccaagtcgatgagccttacgatctacaaagcaatcggggtctataggaatgggaatgggttttaggggtttaggtgtgatgggtatgcaggtgcagggttagagacaaggtgctcggaatgtggattgaacagaagtgcgtcttagtcatgctattcgattacaaactcgatccacaccagaaaggcagagtacggcaggcgaagcagagaagctctagcagctagcaactaggcagtgagtgagtgagtgggttagtagatggagtagttatagcgacgcctcttgggttcgtcgcccaggggcagggacttgctggagccagagcgcccgctcagcagggcggtgtgcgagcagctgggcagcagggtgcccgggttagtgtgaagcgagctactggaatggtcgcaggcggcggagtctgagatgcgagtggggctaggccaaggtgagtcggggtacgaaccagttccgttgtccacgtgtccattgctctggatagttggggacgctggtgcgcttccattgataccattcgtggcacccatcagcggtgcactggacttggtgcctgttacaaagtggcaaatcaattaacctagtttaaaagggattgggtaggagtaggaaaacctaatacttaccagccgaccgataatggccgttgccggcaatctcgatgtctccattggccagtaccaccgctcgcggcgcactgaccccgttctcctcctccttgacgcacttgatgaggaacaagagcgaggagccaagtagtggggggagtccggcgaggatcagcggcaatgtgtaggagttcgtgctgtcgaagatcatgcccgccactggtggacccactgtgagcggaatagaactgagtcctagcagaaagccgatggcctgtgtggcgcccgaggggccacagatctcgtaggctattgggcccagcagcgaaatgaagcagccgtcgaaaagacccatgaccagggtgaacgagacgaggatgacgtacgagttggtgagcggcagcagcaaggtaaccaggccaatggacaccaaggacaattgttgcaggtacatacggttcacacccggcatatcggcaatgactccgaaaatcagacgcccgatgccggaggtgatgccgatacacatgaccggcaggttgacatcctctcccggaaaagtggttttcacgaactgcatcatgtgcacatagggcacaaagtagccgaacaaggcgagcggcacacaaagtgcccagatgacgaagcgtttacgcttccagatctccacgttgatgatcgagcgtaggaagagattgatgcgcgatctgccgggcttcttcttcggcggctccggtggcggatgcagtggcttgtacacgaaggagcaaaggataataaaggcggaaacgaggctcattatctggaagacgagaagccataagtatactagcaagtagatgccatctttattccacttacccgcagggtcccctccagaccatagctaccgagcagcttgtccagacagggcggcagtatcacagtgaaaacgctggagccggcggtcacaaagccactcacctttcccaggtaccgcttgaaatagtggcccaggatggccaatgtgggcgtgtaggcaagggcggcacccaggccgaacatgatcccgtaggtgaagtacagggcgccgatgttctccgtgcaaaacgaggacagcagcagtcctcccgcggagaggactccgccggcgaacgtggtcagccgcaggccaatcttgtccgtcagacagccagccattgtggagaagaggaatgtggtgccgatggccagggcgccaatcagagctgaaagtaatttctacaatgattaagtattcttgatatccaaattaagtaatctgtgtgaaaacaagaaactttgtgaaatccagaaggtgtgcttccttaaatacagctacattttgacccatttttaaagctatgttgaaatattaaatacctttcatcttaagtaaagatcatttcaatatgtggatgtgaaggaatgttgatttgcaatctcacgtcttgcacaatatttggttttcttgcttatcaaaatttatattgttaatattgtttatatatatattgtttctagatggattcctgtgcatttatttgccgtgaggcaactacctaatcccgatcttgttgaccaactgtctgctcgactcacttggaccaatttcaattgacaaatcgaatctcacgcacttgcggtcgattgtgaagtgaggccatgcaaaccatgtctagagttgggccgccatcccaggtgtttcattgcaacttccaggtggatgcccgactgcgtcgaacagagtgtgcgagctggaaacccgatccgctggcggttgatggggttggaagaccaaatgcatcttgtcgcacgccgctcaaagattcgattttcgtcgtcaataattttccgctgaactctggctgaagaagtgggggaaatccaatggttttcgtggcgtaaacactttcgcttgttccactttggcacttccaattgatgtccgactgacagaattgggttaattctttgttgcccgcctgcgaggatgatcaaatgccgtgataacgcagttgtgcagctgcagccgcgccagcgtcccaatggtccattgcctgggacatggacagtggaccggagcaggtagcgcttccaaagcaattatcgctttatttacgactaattgaaaccgtatagattatatttatagcacgcaattagaagtctatgacccctcaaaactaagcggacttgtagttccaatcgcggagaatttcaaatacttctatacgccggaactggagataagccctcgattcagttcgcgtgtccgtccgaatttgttgtcacaatctacgtcggaatggcttttttaatggcgatatgcacaccattcataagctaacctcccttgaactttaatccaaagatttgtttatttctttccattttcattttcatttcagtgtataagaagtacgctcctcagctatcttaaattccacatagtatataatatggtagaaatacaatagaacagaaagtgcaacgcacatgtcccaaaataacacttgacccactccagatgcctcatggatacctattgaccgttcgccgagacacgtcccattgaggaatggggccgtgagatggcacgtaactctcgcccacatgcgcagaacgatattccactgcaatctcggcaagagccggccagtccaatgtcaatgccacagatagagacgtcgacgacgatactctctcactgcacagccagcagtcaatggcgaggagaggcattagataatagcctaatggacggtgccaaaaatcggtgctaaaaacgaatccgtacggaaggggaatctgccgggttgcatggctccgccggcgtctggcgaaaatagatcggaatatttataggacgcctcatattcatagttaggtaggcaacccgatgcgatctcatgcaatatctgacgcaatctgcaggcggattgcatcgtgggatagcacttagattgacactcgattggatgattgatcttgacctccgatccgcgcggatgaaccaatggtccaaccagcgtccactaagctcccccaagtcgcgctgatgtgcctacggaggtgtgtaattgacaaaggctgacaattaattgacgaatcgacaccgcgataaaagtgggcggaggaagaggaggaaaaggaaaatatggcacacaagagctggggttcgggttcggattacgtcaggttttaatcatattgcggaactgaactggcagccagtcttggcttagctctagccttagccctagatgagtgcatctggctgccgttcggtcggaggaggatcgctgtcaggcggagcacttgaggggcttccccgatgcagcgccgtcagtcgaccaagtaactgggtcactggctggtggctttcgtcttctgccggtcggcttggccaattcgaccagctcgtcttaaaaacgccggccgtgcccccaatgcgttagccgtcccacgttgcgtatgcgtaatgcaggccaagcggcacaaccttgacaaatgctgtggtatgaaccctgctcgtttgtttcagttgtttctggttgagggtggctctgcccggtgctccagttaaggtggccaaaaaacaatgatgcacttctggcggagaaccctacggattttccgctccaactctatgcgacgtcgctgtcttcgtgctcttcgcactcgaagtctgttgaataatgctttgtgatccaatcaacttttagcaatttaattcacttgacgtcgctacgttggattcctatatcgtcacttcgttcgtactacgtactacaacgttttattgaacccaagagctggcggatgggagacgccaatgtgcgttgccatgtccgagtgtccgttagattcgaaataaatattaataaatgtaaataaaaattggcaaagtattattgcgtatgaagtccgtcatcatctaatcaaatttaaattcgtaaatataagatctcctttatatatttcaaggcaacttcaagtggtgatagtacaatctttgcctgtggatgccattaaatgcaagtcagatgtgacaatattatcaactaatggggaatctttgacgattgaacctctaggcttttgcaaatcaaagtctgagaccccccggtcagcaatcagaggccataaaatatgatttgttctctggagtggttggccaggtccgtgcccaaaagagatagtagtcgcaaaaaacaactgcccagttcccatctaatctcatttgccctgcctgcataattacaatcaacgccggcagcagccgtccataaattccgaatagatgcgccaggggctgaagggattatagacaaattgctttcgtgtacggatggatgggggaaacatccccaagttccataccccatactcgatacccgatttccgtgacacactcacccgctttgctggacgcctccggatcgccgagcttcgtaagcctatccgtcagcagcgaatggataacgccgtaggtgttgatgaacccaaagatgatgccgttgcaaaggaaggcgctcaccatgaccagccaggcgcgtgctcctccgtccggtggctccttgccgtgtatgtcccgacagcagggcgcctcgatgtgtgtcccgttcgcgttgccattcccattctgaacgggagctgacggcttcattgcatccttgccattcgcatgcaccaatccgttggtcgcggatgctgtatgtccattggcggcgggcaggatacgaccattcacctggctctgcaggtcgttcagcggttcattctcagccatggctgctggctaggattggattcggagtgctgcctgcaaatttatcatatagtgtatgaggtttaagtgcattgaatcggttggacgcactccgcgtatcagtaagccacactgcacccaaatatgccgaaatgataccagtgccactcgcatttccccatcccggaaaataatcgccgactgacgcggaattggctggtcaaatatttggacacttttatcgctatttgcgcccccgacaaatgaaaatgcagtttacattgtcggcgaaccagaggcgaactaaatgagcaacaaaggctagatcttaagggagagttactagggaagatctcagtttcgactggagataagctgagggaattgctataaaggtataaagatataagggatgccttttacttttgaatatttcaaataacataaattgtatctttaaataagttacccttctgttctttagcatgttagtcacttatttagccaacgaaaagtttaaattggattaaattgcaaagctcagttaacgaggaaccataaaaaaaactggttcaaattaatatccaaagatatcatggccacataactttcgattccgcctccaatttccctgcttagtatctggtcagcaacattgtaatgcacttttaaagctgcgcagaacacagattgcattacaagcgataactgaaattcgtcgcatttttcgattatgcatgcccttgtcgagtgcacttgaggggttcggggcgcggtagctcgaggtgggtctactgtctatggttgacggttcattgcagcgttccgttctgcaaacgtttctttttcccgccgcggggcagccgaaaaaaccgcatcgccgccacagcgaaaactcaatgtaatgcgaaccgctcgacggaattgtagtaaaaataaagaaatacaactaaaaccactgtcgttcttggcggctatcaccgaag

SEQ ID NO: 12905 - DNA, 1804 bp, DROSOPHILA
ccaggtgaatggtcgtatcctgcccgccgccaatggacatacagcatccgcgaccaacggattggtgcatgcgaatggcaaggatgcaatgaagccgtcagctcccgttcagaatgggaatggcaacgcgaacgggacacacatcgaggcgccctgctgtcgggacatacacggcaaggagccaccggacggaggagcacgcgcctggctggtcatggtgagcgccttcctttgcaacggcatcatctttgggttcatcaacacctacggcgttatccattcgctgctgacggataggcttacgaagctcggcgatccggaggcgtccagcaaagcggctctgattggcgccctggccatcggcaccacattcctcttctccacaatggctggctgtctgacggacaagattggcctgcggctgaccacgttcgccggcggagtcctctccgcgggaggactgctgctgtcctcgttttgcacggagaacatcggcgccctgtacttcacctacgggatcatgttcggcctgggtgccgcccttgcctacacgcccacattggccatcctgggccactatttcaagcggtacctgggaaaggtgagtggctttgtgaccgccggctccagcgttttcactgtgatactgccgccctgtctggacaagctgctcggtagctatggtctggaggggaccctgcggataatgagcctcgtttccgcctttattatcctttgctccttcgtgtacaagccactgcatccgccaccggagccgccgaagaagaagcccggcagatcgcgcatcaatctcttcctacgctcgatcatcaacgtggagatctggaagcgtaaacgcttcgtcatctgggcactttgtgtgccgctcgccttgttcggctactttgtgccctatgtgcacatgatgcagttcgtgaaaaccacttttccgggagaggatgtcaacctgccggtcatgtgtatcggcatcacctccggcatcgggcgtctgattttcggagtcattgccgatatgccgggtgtgaaccgtatgtacctgcaacaattgtccttggtgtccattggcctggttaccttgctgctgccgctcaccaactcgtacgtcatcctcgtctcgttcaccctggtcatgggtcttttcgacggctgcttcatttcgctgctgggcccaatagcctacgagatctgtggcccctcgggcgccacacaggccatcggctttctgctaggactcagttctattccgctcacagtgggtccaccagtggcgggcatgatcttcgacagcacgaactcctacacattgccgctgatcctcgccggactccccccactacttggctcctcgctcttgttcctcatcaagtgcgtcaaggaggaggagaacggggtcagtgcgccgcgagcggtggtactggccaatggagacatcgagattgccggcaacggccattatcggtcggctggcaccaagtccagtgcaccgctgatgggtgccacgaatggtatcaatggaagcgcaccagcgtccccaactatccagagcaatggacacgtggacaacggaactggttcgtaccccgactcaccttggcctagccccactcgcatctcagactccgccgcctgcgaccattccagtagctcgcttcacactaacccgggcaccctgctgcccagctgctcgcacaccgccctgctgagcgggcgctctggctccagcaagtccctgcccctgggcgacgaacccaagaggcgtcgctataactactccatctactaa

SEQ ID NO: 12906 - protein, 571 aa, DROSOPHILA
MKPSAPVQNGNGNANGTHIEAPCCRDIHGKEPPDGGARAWLVMVSAFLCNGIIFGFINTYGVIHSLLTDRLTKLGDPEASSKAALIGALAIGTTFLFSTMAGCLTDKIGLRLTTFAGGVLSAGGLLLSSFCTENIGALYFTYGIMFGLGAALAYTPTLAILGHYFKRYLGKVSGFVTAGSSVFTVILPPCLDKLLGSYGLEGTLRIMSLVSAFIILCSFVYKPLHPPPEPPKKKPGRSRINLFLRSIINVEIWKRKRFVIWALCVPLALFGYFVPYVHMMQFVKTTFPGEDVNLPVMCIGITSGIGRLIFGVIADMPGVNRMYLQQLSLVSIGLVTLLLPLTNSYVILVSFTLVMGLFDGCFISLLGPIAYEICGPSGATQAIGFLLGLSSIPLTVGPPVAGMIFDSTNSYTLPLILAGLPPLLGSSLLFLIKCVKEEENGVSAPRAVVLANGDIEIAGNGHYRSAGTKSSAPLMGATNGINGSAPASPTIQSNGHVDNGTGSYPDSPWPSPTRISDSAACDHSSSSLHTNPGTLLPSCSHTALLSGRSGSSKSLPLGDEPKRRRYNYSIY

SEQ ID NO: 12907 - DNA, 9708 bp, DROSOPHILA
tattgcaggattcggaaaatgctggattgagaatcatagaataacaataaaaggtggtggaaagctggggatcttagctggcatttttaattaacacaaaaagtaaataaaaactcattgatttcttagaagattcaaatataagaatcttagtgtaatatagtgtaaatttactttaaaacctgattgaataactctatcaacttgttaacttattaatatattgtagtaaacatctcaaagtattctataagtagacagaaaatccattgatttttgtatgtccacaaaataacttaataaatattacacactaatatggtttaagtaagaataatgtaaagtcaaaaggtaccaactttacttctataacaatgaatcccccaccaaactgaactcccgagatttctccaaaaaactacccaatcaatctgaactatatataactataatccccaatggtatatagaagccagacgacaccttcccaggagcacataaaacccccatacttaattatgatttacttgcaactgggggcaagtcgaggtatgcaaagaaatgctgcatgctgcgcagaaggtcggagaatgcataatacataggccacacccatttcgcaggagaagtcaacttgtggcctatgctaatgcaggaaaatgtgtaaatgcaggaaaatgtgagactgcaggagagggagaacacaatgaagtcccaggatattctgatcagaatgcacggcgacaaaggatacgttccacaacacacgcacacactgaaactcggctaacggtgcaggggttgatagctggggaaactgaaaatgagcgagagagagcggagaggaagtgaggaaaactacggctgcaaatcataaagcatatcacacacacacacacacactagcaaccagcggagagagtgagagagagggcagcgagtgcgagcgagaggttgcatgcacatagcagagaatgcagcaaaatacgattcctcaattcagtttctaagttgcattcgaccgaagaagttgaagctagacggtccggtttccttgctcgtgacaattattgaaatcgaacagaacagatcgggaaaataggaaaccgtagactctcttcgtcgtgaatgtttaagtgaccaactgaatatttaaatttgaaaaacattatttaaatataaaactgctaaaatgatggtgctacagcaacaacaacaacagcgtctctgggatgcaacaacaacgagcaacacaaatacacaaacacagcaatcggcgaatgtggaaagcacgccaacaaaagtttgccatcaggaaaatgcagcgacacacacatgtgagtttttcagggttgccatcctacaaccagccatggaagcttttcgagaagtgtggctagagttgtcaaatgcaaacggatttgggctttgtgaatatgatttgaatatttaaataggaaacatatttcagtttttaaggatcgatcattttccaaaaacggatttaaatattaaaattttaagaaattcggattaatttattgatccaactcagtttaaagttttattgactcttcaaaataaaacatagccacaaacaacttaccgaatgaaaaccaagtcgtaacctgatttattgtaccccgtacctgttacaaaaacttttcactttctcgggcaataaatttggtcagaaagagcctaaggacgaaaccagttcagaacacacaaaggtcaccgattatcattacacgcccacacattatcccaggtccagatcagatggaataccatatagaagaggcacacacaatttccctatcagatgaacgatttcatggcgttttgcaacagatttgatgcgatgtcctgctgctgacggtgtcctttttgggcagctgctgcccttgagtgtcccactgtgcgagcgtgtgatcgtagtttttagatttcttgtgtttgcatttgcatcctggcagtgtcctttttacctgtgtccgagacgttgtcttttttccataagggtattttgcatgaaaacaaaggagaaaggaaacgctgttttttttctccatattcctggcatttccttcgttttttagggagaaaactattttccagcctaggacgtgcataggtaatttgcatggaacaaaggaaagaaaccaaattagccacaaaaggcaaattttctgtaattacatttaagccgaaggtgtgtggatataaaaagggcgagcaattccagcatgcagatcatgtgcacatctaaaatcccaaagatcctttgactaatgccacttgttatcctcccaacaagtgaggtgtgaggtcaaccaccgcctccaactaagccgaccccaatcccatcgggccaaaccattacccaaccacaaggacaacgccatgccaatgtccaatggtaatctgtatatttatattgtcctgcactggacattatgcacaaggattccccaagtcagagcgtcctcacacaatatattgtcgtaaaaatatgttacttttttttcctactgcccgttgtccttctcgggccaggattctactttgcttacgccccgagggagctataaatttaatatctactttgcaaaacaaaaaaccaaatggcacaaaaaaaaagagctgagggaggatgagaaaggacggtgggaaatggataaaagatggtgaggatttggtcccaagtctttggaaagggagctagtcatttaaatcaaaaacgcaaagttgtagaatactataactatagctatttaagattccgtggcaatactggcagtgcctcttgcttaaactataaaaaaaattgcgtgaaaactactttgagcacaatgccaaccatttgcactcggaaattgactcttaaaaattttacaccagcgagcactcagctgagagctggaaacatttttgcatgttatatacgccataagaaatgtgttatgtccgaactcctaatggacattttacgagccagacatgaaaggaaaacaccctgacaacaggacaccatccccacttctggtttaagaactgctcgtcctgttcatatctgtgtagaatgacgagtacgtgtcatttgcatttgaattttctactgttaagtattattaaaaattaaaaacatatttcatttttctcattgcagttatgcggcacatgtcgaactcaccaacaccgccctcgccactgcgttcgctatcaggtaaataaatgtgcatataatatggctaatccttggccagcattcagccgtcatgtcctttttatcctgctgccgactcgtggcggaacgtggctactttgtggctaaattgattactcacacgacagacaatttttatagttttcagttttcctctttttttgcaatatgcaatcagccacgcacccccttttccgcatcccctatacatccacattgggctcgatttcagggtttggcctaggtagtaactcagaagtgcggccaaggactggcgggttcccggttcctggtcattggtaataaggcattaggttagggcacctataatatttataggtgctgttgggcaaccagcacgtgactgaagtgtgaccgaggatgggccagaagcctttgggtttgcaataagaaagtatagggtttcttcattgaaaaatgtgaaaaataatagaggcaacacatataaaaacaaacttaaaaacttaagaagcccaaaaataacataacatcctgtggtgtttgaaaattccattgcgagtattaaaactactttatctaaaaatcgtaagattaatttattatacatttcaatagtttttggtcctaacatttaaaataattggtataaacacgaattcattacgtgcctttgtataaattattcaaacattaacgtcttttcaaccatttccatggaatgccacccgaaatctgctctaccacacccaccaaaaactcccctgagaaaacaacccccgcatggcaacaagcttaagccagagatcatccttgtgagacccctatatgctcttttgacctccacctccaactcccccgttgaccctaacacgaccctcttctgttcgcaaacaaacagaaataacaatttgtcaaaatgtaaatttctgcattggcgcatttaaatgatgggccgagcaattatgtaagtaccccgaaaccgaggccaaccacccctaacgaagtgcaactaatctatgcaaaaacatgcatggaaatccaccccatttgaataaatgcggcacgcattaacagggttgccaatgccatccgatagtagttgacaattaaacttgcatttttattggtttacacaaattaggcgagtcaatcgagccaagagtgctcctagcccatctcacacccctccccgcgtatcattatgcatattcaaatgttgtcaaaataaacggaagggggaaacccttttttttcaaataaagggttgctcaagcgctaaaaaactcaagtgccgtaacattagcatggcacacacaaaaaaaggcaaactgttgatccggctcaaccctgtttaacatatcatttgaatagcgccgaggtgtgaagtcaattgagggggtaaccctgagcgaagggttacccttgccacctcatttttttttaaagtagcacttgttgagcgatctcccctcgttctggttattcaaattgaaaggattttggttgcgtgaagttaattgaggggtaattcggaagaggaagcgcgaaaaggatattacaatcagcagctctgattgggtgctctatacttttttgtactccaaaaaaactttgttcagagggcgtttcaagggcgtttttgtggcatgcaaacaagtttaaatgagtcgatgggcgtgacgagttcttaatgaagggttaagtaaacttaatgaaactgctaagggcttagcttagttcaacgaaagtggttatgagtaaatagggaacttaataaatcgatttaaagggcaccgaatattttgtaacaaattttaacatttaatattgaaatgaaagtggttttactcgtatttagataaacagcttgagatattcaaggataattggattgccaaactctgcccctcaatcacatcattcagtgcacttttccaatttttgattgtatctttccgataaatcgaaacgcacttcacattcccttttatgtgatatagggaaaatcaacccctaaaaactgcatgcaaaaggagtacccagaatttggagttttcgaatagaggcaacacttcatttgtcagtggaaacattcacacattgccattgtggctgaacgacgaacttgcattcaccatgcagtcctcatcagcaggataacacatctgctccggggacagacaaagcggcatcacctggtattgggtttcgaaaaaatcgagtttcgatgctcgtggatcgctcgctgcaggcgcattccacttacaaaggatcacaacagtgtttctttgccttgatttgaacttgctcccgaggcttcttgactttactcctttctttcattttctttttttttttttttgaagccaaacaatgcaacttggaacccttttttctagctggtccaaatctccacccaatggcaagttgcattcggttctaatccgcaactcgtgcaactcgaaattgtaacgaattttaaatttgcaactgcgctgccagaaggagggttgaaaaatcattccgaaaagggtgacaatttttgactacgcctaacccttggatgattttcatttctgactggttccaatagattttcaatggctaattttattgcggcgtattcaactttcgccgttctacataaagggagtcataaaaacagctgcccacatgcaatttattttgcaaagttcaaacgcccgcattcgatatatgtatgttttccttttgaaatatttcctaatccgccgaatcgagtttaacatggggttgaatccgcttaaaactatcaattctcttttttttcgaaatcggtttaacattttttacagtttagacaaatgttcgaaagttgatttttaatggaggatcgaaatagcgaaaggtttttttttgttggctataaatatgaaggagaagcttttatttgatttgaaccgatcaaaagatctttgatcatatttctccagtcggaagtttaatactcattattatatttcccatcaaaatcaataattttctttcacaaaattatgaaatctgagctcctttcgttgctccactgcgcatttatcggagacaaaggaagcatcctgtttgacttcgccgtggcctctgatgtatggctatttttcaattattatgcatggttgggttttcaacgaggatgttggggtttgtcgaagtttaatgggggagtggaggccacaaaggagaacccttccgcttgaacgtctatcgtagctaaccgcaggacgcagacattggacaggataactgggaaaggatgggcattcgattggaagattgaataaaatttgacttaaaaaggctgaggagaaaatgttcacaataatacgatgagtggatacactttgtaaatgaatagaaaagacttaaaatgagatcgcgagatatagcatatattaatttcttaaaatctctcagttatatttataatttatttttgtagccagctagacagtttatttttcatttcaaacttccttaaaaactcatgtaacccctgaaataccctttaaaatagctgcagaaatattgaaaaacttgcagagtcctttggttaaaatcaaattatgctacgcgtgcgttgaccagtccggctacttgaacttcattgagttggaaaattgaaaagcaaactacccacaatcatctactataaaaaaatatcctttttccctacttacagactgcggaaagagcttcgaggaggaggaactggagctgggcgagaactgcgagatgccacagaatctgagcagcaagcgccaggccagggaactagactctgagctggaaaacgaggtcctggatctggcaccgccaccgaagagattggccgaggagcaagaggaggaaaaggtggccagtgtcaatccaccacagcccgtggcatttgcaccggaggaaatgcatcaggctctgcaactgcagttgcacagctacatcgaaatggttcgccaattggcgccggaggcgtttcccaatcccaacctggccacgcagttcctgctgcagaactcactgcaagccttagcgcagtttcaggccctgcaacagatgaagcagcagcaaagggaggatcctctgcccagttactccacccccttggccaaatcaccactgagaagtccatccctgagtccggtgccccggcacagcaaatcccagcagcgaactccgccaaactcgatgactgccaattctctgggaatgagtagtgccgtgatgactccaaatacgcccagcatgcagcagcagccgcaactgcagcagagcactcccaagcccacgagtggactaactgtggcatctgccatggccaagctggaacaatcgccggaagagaccaccgatctggaggaactggaacagttcgccaagaccttcaaacagcggcgaatcaagctgggcttcacccagggcgatgtgggtctggccatgggcaaactgtatggcaatgacttctcgcagaccaccatttcccgcttcgaagccctcaatctgagcttcaagaacatgtgcaagctgaagccgctgctccagaaatggctggaggatgcggacagcacggtggccaagtcgggcggtggagtgttcaacatcaacacgatgaccagcacgctgagcagcacaccggaaagcatcctgggacgcagacgcaagaagcgcacctccatcgagaccacggtgcgcaccacgctggagaaggccttcctgatgaactgcaagcccacgtcggaggagattagccagctgtccgagcgcttgaacatggacaaggaggtgatccgggtgtggttctgcaatcgccgtcagaaggagaagcgcatcaatccctcgctggatctggacagtcccacgggcactccgctgagcagtcatgcctttgggtatccaccgcaggctctgaacatgtcccacatgcaaatggagggcggttcgggttccttctgcggcagttccatcagttcaggggaataggagaagcgggttcagcatggaaatccatccatccaatcttgtacatagtcagcttatgctccaaattcttccacaacattccacatgccagactctccatatcaaatgcaaacaatgccatggatgtatttagtaaactaggtgatagccagtcgtatcagaaaatccattacgaatttatgagtacatatagctccagtacactatactacctattcgtatctgtatgcatatagagttcctagttctaactattccccaaatgccatacgtgtgtatctgttgtgccccatatcccccatatccattatgccacaaatcagtcctctagttgtatttactgtactgtgtattgacctaaatgtgtatgtatatgtataccgatgttgttgtacgatgtccaattgtaaattgatcttgaacacacttagatcgtaacatccaaaaatttcaataaaattattccgataaaataatttataaaaaaacatactgtattttaatattgggtggaaactgtaatcaaagatagatgcagttcaagatatgcggtctatatattagaatcttctgcttagttccattccatttctatattattttttaaaaacatttattttatttttatttatcttattcaatgcactaaagaaaggagtttcatttaatttgccacccatatttaccagctgtatgtttttgaaaagccctagcttattattcaattagccagctctttaggtttactccagcgtgtgccatataaaaacgcactcgaatctcattaggcagagcctaaataaatattgaacgaggtatttagttaactgatttccttggcccgccccaaaagcgtttgccagccacgcgacaaaggcaaacaagaccattttttaataaacttcctggcaaacgcgggccaaaacagcaaaaggatgcgaaggaaggacccaaaccagcaaccccttttttttttatttttttggttgctttggttgtcgagtgtggatttgttggataagaaatcacttcatctttttgggcccggcgacagtcaatatggcagcgcagacagaacccttatttgtatatcgaggcaagcgtgtaaatcctttttttaccaacccccaactccgatccctcggcccggattttccccctgctgccaaaagtttgccgggctctgattcgtttagggcacgaatctctaaaaaaatgatagagttggggaagttggcaaagggttcatgccatcaattcacacatggttatgtcatatgctcctcgcctcggtggttgattttggtcttgtagtatgggtagtatggatatagctcctgtgttgtttgctgtttttttttttttggactacgatgtgggcagtggaagtattttatgttgtcccagttgtatcctttggaaatcgcttaagcgagtcaagtcctcgatggagatatcttaatggaagtgtgccaataaattaggta

SEQ ID NO: 12908 - DNA, 2176 bp, DROSOPHILA
cagtttctaagttgcattcgaccgaagaagttgaagctagacggtccggtttccttgctcgtgacaattattgaaatcgaacagaacagatcgggaaaataggaaaccgtagactctcttcgtcgtgaatgtttaagtgaccaactgaatatttaaatttgaaaaacattatttaaatataaaactgctaaaatgatggtgctacagcaacaacaacaacagcgtctctgggatgcaacaacaacgagcaacacaaatacacaaacacagcaatcggcgaatgtggaaagcacgccaacaaaagtttgccatcaggaaaatgcagcgacacacacatttatgcggcacatgtcgaactcaccaacaccgccctcgccactgcgttcgctatcagactgcggaaagagcttcgaggaggaggaactggagctgggcgagaactgcgagatgccacagaatctgagcagcaagcgccaggccagggaactagactctgagctggaaaacgaggtcctggatctggcaccgccaccgaagagattggccgaggagcaagaggaggaaaaggtggccagtgtcaatccaccacagcccgtggcatttgcaccggaggaaatgcatcaggctctgcaactgcagttgcacagctacatcgaaatggttcgccaattggcgccggaggcgtttcccaatcccaacctggccacgcagttcctgctgcagaactcactgcaagccttagcgcagtttcaggccctgcaacagatgaagcagcagcaaagggaggatcctctgcccagttactccacccccttggccaaatcaccactgagaagtccatccctgagtccggtgccccggcacagcaaatcccagcagcgaactccgccaaactcgatgactgccaattctctgggaatgagtagtgccgtgatgactccaaatacgcccagcatgcagcagcagccgcaactgcagcagagcactcccaagcccacgagtggactaactgtggcatctgccatggccaagctggaacaatcgccggaagagaccaccgatctggaggaactggaacagttcgccaagaccttcaaacagcggcgaatcaagctgggcttcacccagggcgatgtgggtctggccatgggcaaactgtatggcaatgacttctcgcagaccaccatttcccgcttcgaagccctcaatctgagcttcaagaacatgtgcaagctgaagccgctgctccagaaatggctggaggatgcggacagcacggtggccaagtcgggcggtggagtgttcaacatcaacacgatgaccagcacgctgagcagcacaccggaaagcatcctgggacgcagacgcaagaagcgcacctccatcgagaccacggtgcgcaccacgctggagaaggccttcctgatgaactgcaagcccacgtcggaggagattagccagctgtccgagcgcttgaacatggacaaggaggtgatccgggtgtggttctgcaatcgccgtcagaaggagaagcgcatcaatccctcgctggatctggacagtcccacgggcactccgctgagcagtcatgcctttgggtatccaccgcaggctctgaacatgtcccacatgcaaatggagggcggttcgggttccttctgcggcagttccatcagttcaggggaataggagaagcgggttcagcatggaaatccatccatccaatcttgtacatagtcagcttatgctccaaattcttccacaacattccacatgccagactctccatatcaaatgcaaacaatgccatggatgtatttagtaaactaggtgatagccagtcgtatcagaaaatccattacgaatttatgagtacatatagctccagtacactatactacctattcgtatctgtatgcatatagagttcctagttctaactattccccaaatgccatacgtgtgtatctgttgtgccccatatcccccatatccattatgccacaaatcagtcctctagttgtatttactgtactgtgtattgacctaaatgtgtatgtatatgtataccgatgttgttgtacgatgtccaattgtaaattgatcttgaacacacttagatcgtaacatccaaaaatttcaataaaattattccgataaaataatttataaaaaa

SEQ ID NO: 12909 - protein, 498 aa, DROSOPHILA
MMVLQQQQQQRLWDATTTSNTNTQTQQSANVESTPTKVCHQENAATHTFMRHMSNSPTPPSPLRSLSDCGKSFEEEELELGENCEMPQNLSSKRQARELDSELENEVLDLAPPPKRLAEEQEEEKVASVNPPQPVAFAPEEMHQALQLQLHSYIEMVRQLAPEAFPNPNLATQFLLQNSLQALAQFQALQQMKQQQREDPLPSYSTPLAKSPLRSPSLSPVPRHSKSQQRTPPNSMTANSLGMSSAVMTPNTPSMQQQPQLQQSTPKPTSGLTVASAMAKLEQSPEETTDLEELEQFAKTFKQRRIKLGFTQGDVGLAMGKLYGNDFSQTTISRFEALNLSFKNMCKLKPLLQKWLEDADSTVAKSGGGVFNINTMTSTLSSTPESILGRRRKKRTSIETTVRTTLEKAFLMNCKPTSEEISQLSERLNMDKEVIRVWFCNRRQKEKRINPSLDLDSPTGTPLSSHAFGYPPQALNMSHMQMEGGSGSFCGSSISSGE

SEQ ID NO: 12910 - DNA, 3925 bp, DROSOPHILA
tgaaaagtggagaaatcaatcaatgtattttaattctattacttgaaaacatttaccggttgcaattgtttcgccagttggaaaactttaattgctgcttcctcttcggacgttaaatttattaggcttaaaaccgcatccttggccaccgtttgatttgcatcgaatgtcagtccaaaaatggccattagcatttcatctagtgaaagtattgctgatttgccctctgagctgccagtcaatcctgaataatacgaatattttaggtaaataaatacaatgtgccaccggtgacgtcacagttgcccacaacaaacgcacgtgtagccgtggaaacttatttttcttgaaacacacctaaaacatgtgttagggctactgcctttaagtccagccgctgattcggttgcatgaattgaaccagttccttcacagtctccattttagttgtatttttcgcgtttattcagatttaactgctgtgttttggtttcagttgaccaatgtgaccggcttctagtttataattaatcctgtctgacaataaagctatagattattaaaaatcgtaacaagcagttttcgacaggctgctatgcccaccgcggagtgtgtatttgctagttaaaggagcatgtatttgcttattggtactcaaaccattactgttgttgctaacttgcaaaagctgaatgctgcatctatgctacccaacaaacaaagtgtatagggtattcccaaaatgaactttaatagcataatagtaaaagacatggatgcacacaatgagcttaacgacttagccagagacccgagtgccactcgggtacgttatctgatgcccgttccgtttttggatggctagtgcccttatgctttccactgatcgccttcagaatgaatcgtttaacctgatggatatcggtgaagatccctggtaaattggatctcttgcaggcgggactccaggcgacgataccacaaagctgatctccagcagtcacaggacatccggcgctaaacatacagtctgcgctccttttaaattccttggcacaggcgacagtttcgcgcagaagaaaattgccgtacgccgaatcgcagatcattcggttgagcacctcaatttcttctgttcgtacgttttccgcgggtcctgcgccgtaggacacaacggaaaggcttttgtacgagctcagcggattggtacagagggtaacatagttattccgattgccacgcaggcggttggtcagttctatgacagcgacatccataaaagttccaggccagtgccaatccttcgaaacgattatgttgcggataagggcgtttggaggatcatgcgaatcaagctgattatcctgccggctgtccgacgataccaactccacactgagcgactccatctgtgacctatgactatgcatacagtttgctgaggtgagggcatacaaagcacttaagtacgaggctccgcagacgaaagtaggtccatcaactatccttaatagccaagggaccgcatgaccacccgaggttcgacgaattccattcttgttcaatgttctcactggtggcctgccatgcaagtacgaggctgaagaattccaccaactagagtgtgcagctccgacttctgtcagaagaagagcgattgaaaagatttcccgaatatatttcataacataaagcgtttaagtgagagctatacacatactgaatagctgatagatctagaaaaaaacatgcagtagtagaacgattactttcacacttatttgataaggtaattagtaatggggaatggtttagaccccaggtaaagcatttcaaaacgttctttatatggagcacaaaaggtaaagactaggtttccgtcgtaaagatgagtacttgagtacttgaagatttttacttattgaaataagcccgaaatgaatgaaccattaaattttcttagtttagtttgtatttcattcaacacaccaagggctccaccattacagttcttaaaagacgttgtatctttactggtttcgattttggtttgattgttttctttgggggtttctttgtttctttcactactttagttgatctgaagacatcaccggcatttatggattcttccgtttcagtaatgaatcgttttactcttctgatgttggtgtacatgccgggcctagaggtgtcgatgcagtgtgacccgaaggacacgacgccgcagagctctcttccgtaaatcagggggcttcctccgtcgtagaggcactgcttcggattcttgggctgcctggcgcagatcgatgtgctcgctatctttgggcttttgaatttttgacggcactccttaatggatataatagttactgtaacgtttcggggatccgatgagggtatctccacctccgtattgtcgaaaccccatccgaagaccaccatctgcattttgggctgcactttgacgctgcaaagacggatgaactcagtgagccgtcccctaacgggatcccttagacgcactactgccacgtccatgtagagtttctggtagataaatttctcgggaaattgaatcgtatcgatatcagcatagttctccctatcgcattcggagaacgcggtgccctccaccgtggcaccttcaaggctgttccgatacggatagatgcagttggccgaggtgatcacgagcagaggggcatagtaggcagctccgcaggcaaagttaccgtcaccgttcaggatccgcaacagccagcctccgaaattcgggcctgtgttggactgcaccccgccccagacgcgtcgaaatttcggagtctttagaaggatgtccctcggatacaccgttccctggctctggggcaggcaggtccacagcagacaactcaccagaagccagatcttcgagagtcccattttattgcggtggatgactgaagagtaagtaattaagttgttgtttgaagtatgggtaaaaaattttcaagcaaattagtgtggaaaattgcagtccgtttttccgaaccttaagtcgccgtaagcatacacttccaaggaattcaaatgttttcgaatttgctttataataataattataatattgtatcaatcaataactgcactgaattagtgttaatttgttaatagcttaacataataattataatctcatcagtgctttagatactcttttagaatcagaaatggtggaagcgtctttaatagaattatataccatatatcgtcacacgaggcgtgcaatatcatgttaagactgttatttgtatttgtatatcttgggcattatcctcacattaccatgctatagaaatttagatatagatgggctccggtttgggttttattttaaaagacggtgacttacaccacaccaatttgatttgacaatcatcaagtcccgtacaattgatcgatttgatattttaagaaaacagagaaaaaaaccggattatcccaaaactgtaatactcgtattatttttagacttaagcctccccagacttacgcactcgaagtgcataaagtaagtcagagatgcggtgtgatgtcattcgaaggggcagtcattgtctcgtcctgaatcgtgttttcgcacaataaagtgcgagctttattaatttttaaatgccgatcgaagatgattaacgagcataatttaagtggaactggttcggttaatatcattctccgatgggaactttccgcgagcaagtgacccttattcggaatcattcattaaaattcattcgtaaaaattcaaaaagtcgagttggtgtgtattaattaatattaaatttagatataaagcagtaacctttaaatatacttaatatagaatcttttaacgtttgatacgtttggcagggtactaaagcaataatatgtatatcgccgt

SEQ ID NO: 12911 - DNA, 1450 bp, DROSOPHILA
atgggactctcgaagatctggcttctggtgagttgtctgctgtggacctgcctgccccagagccagggaacggtgtatccgagggacatccttctaaagactccgaaatttcgacgcgtctggggcggggtgcagtccaacacaggcccgaatttcggaggctggctgttgcggatcctgaacggtgacggtaactttgcctgcggagctgcctactatgcccctctgctcgtgatcacctcggccaactgcatctatccgtatcggaacagccttgaaggtgccacggtggagggcaccgcgttctccgaatgcgatagggagaactatgctgatatcgatacgattcaatttcccgagaaatttatctaccagaaactctacatggacgtggcagtagtgcgtctaagggatcccgttaggggacggctcactgagttcatccgtctttgcagcgtcaaagtgcagcccaaaatgcagatggtggtcttcggatggggtttcgacaatacggaggtggagataccctcatcggatccccgaaacgttacagtaactattatatccattaaggagtgccgtcaaaaattcaaaagcccaaagatagcgagcacatcgatctgcgccaggcagcccaagaatccgaagcagtgcctctacgacggaggaagccccctgatttacggaagagagctctgcggcgtcgtgtccttcgggtcacactgcatcgacacctctaggcccggcatgtacaccaacatcagaagagtaaaacgattcattactgaaacggaagaatccataaatgccgaagtcggagctgcacactctagttggtggaattcttcagcctcgtacttgcatggcaggccaccagtgagaacattgaacaagaatggaattcgtcgaacctcgggtggtcatgcggtcccttggctattaaggatagttgatggacctactttcgtctgcggagcctcgtacttaagtgctttgtatgccctcacctcagcaaactgtatgcatagtcataggtcacagatggagtcgctcagtgtggagttggtatcgtcggacagccggcaggataatcagcttgattcgcatgatcctccaaacgcccttatccgcaacataatcgtttcgaaggattggcactggcctggaacttttatggatgtcgctgtcatagaactgaccaaccgcctgcgtggcaatcggaataactatgttaccctctgtaccaatccgctgagctcgtacaaaagcctttccgttgtgtcctacggcgcaggacccgcggaaaacgtacgaacagaagaaattgaggtgctcaaccgaatgatctgcgattcggcgtacggcaattttcttctgcgcgaaactgtcgcctgtgccaaggaatttaaaaggagcgcagactgtatgtttagcgccggatgtcctgtga

SEQ ID NO: 12912 - protein, 483 aa, DROSOPHILA
MGLSKIWLLVSCLLWTCLPQSQGTVYPRDILLKTPKFRRVWGGVQSNTGPNFGGWLLRILNGDGNFACGAAYYAPLLVITSANCIYPYRNSLEGATVEGTAFSECDRENYADIDTIQFPEKFIYQKLYMDVAVVRLRDPVRGRLTEFIRLCSVKVQPKMQMVVFGWGFDNTEVEIPSSDPRNVTVTIISIKECRQKFKSPKIASTSICARQPKNPKQCLYDGGSPLIYGRELCGVVSFGSHCIDTSRPGMYTNIRRVKRFITETEESINAEVGAAHSSWWNSSASYLHGRPPVRTLNKNGIRRTSGGHAVPWLLRIVDGPTFVCGASYLSALYALTSANCMHSHRSQMESLSVELVSSDSRQDNQLDSHDPPNALIRNIIVSKDWHWPGTFMDVAVIELTNRLRGNRNNYVTLCTNPLSSYKSLSVVSYGAGPAENVRTEEIEVLNRMICDSAYGNFLLRETVACAKEFKRSADCMFSAGCPV

SEQ ID NO: 12913 - DNA, 3542 bp, DROSOPHILA
caattaataaacgtaaagcactagtcactagaaatgcataccgaaaaacatccttgagatctccgacgcgatccattgagaagttgttaaccacctttgcatcgagaaaggcatgagcgtaggccaaaggaccagcatttacagtcaccgccacacttccctgcagacgcagctgcaacttcttcacatcggccggtgggagtatgatctcctccagctctgaaaccttggattgcatttcatcgatggccacctcaatggggctcagttctatgatttcacgggatttgacgggtatacgtttaagaacatatgggaaggagtattgagctgcaataattgatgctttaatatggtacaaatgaaattaaagacggtttttacatactttttataaccgtcttgcgtttccattgttcttctacgctgccacgggctgcacccgatttggtgaacggagtctcgtacataaaagtatccacatcatgattctgctcgaattcatttagcctttggtctagctcgtccttggagaagaaaggaatcacatgggtgacctgtatgtaggcaagtttggcatctagttcgtctactttaacctgaaaaaatgagttgtaaaattttataatacttaattgtttgtcttaaaaaatcgtctataaataataataaataataatataatgcaataataatgcaatcaatggtggacatacactagtaacttcgagatcaagtcgtccctccagcaaatatcagaatgaagtttgtttcagaatacttcccaccttcaacagatttggttcaaatagctcagcaactttactaggtactagtaaattgtttgttatttttatacaactaccacaatccgcacactagaaccgcaaaaatatccaaaattttgtagagatcgagttccttcttttggcacaaaccataagttcatcagattgtcggacatacggtaactatttcacaatacattgtccgttcccttatggagcagctctttgagttcccggctcgtgcgatgggtctgggattggtccagatgccgcagatgcagataccaatcccatgtaggagggagtactcgctaaatccgaacgcagtggaattcgtgccatcttttcgccagaaatccgagcctccaagtccatcgaccaaaacggaggcgacctcaactacaacattgctgcgtcccgaggtcgttggtgatgccgtgaatcgtgttgaaaatgggatttttctcgagcgccagatctttgacaccctaagtcaactgggagacgagcaaatgcctctggaagagatcgcggttggtgtattaccaggaggacaaggtcttagtatgactttcaccaccaaagagcacgatcagatgcagcctttggaccgaaatactctagtaaaccacagtaaacagtgcctccagctggctgtgggcgatcaggcgaagttggcgaacagacctgagaccgttctaattgcccaattcctcatccgggtcaacgatcttttgaacgagaagtatgaatacggtggcgatggatccgtgtgtcccagatgcaccctgtgctcaaatcgcagctatacggagctggaaatcgaaaaccaaatcgagtgcataaaggcttttgagaaatttttcacctttacggaatcaactcgctaccaagacatagtttctcacaaagcctttaaggagctgtgccacaggctgggtttgatcgtaagccgagatcagatccaggttaaccgcccctccacagtggtccctccacccacggcacagtcatctagtataaccctttgcatgtccaagaacgaaatggaatctaatgtagaggccaaggcttatagaggagatgacgaatccagtttcaacggttgtgaactgaccgcgaatggaggtcaacatccatctatttctaatgaatatttgaggggaaagctttacaggtgggtgggtcttaagttaagtgaagggaatacaacaattattgtgatttatatttttagatacgaagactctcagggatgccagttggtcaacgaactgagtgaaaatcaacaaaaaattgaagctatggaggtagatgagttcgagttggatttaccatctaccacgaagcccaagaccgtggtaactactagtgtgccgacaacctttcctcgggtgtacaaaacagccaaagccaaatgctcggctcgtggggcaggatctagtggtcaacagagtggctacaataacagggcagtccgttcaatgatgcagccgtcaaagggctcacccacgacttcacattttcggactattgcagttggttgccaccaccaagctggatcggctgcccctcgaaagctgcaaatggattcgtgcccaaccggggctgcccgcaagcaaaataggttgactgaagcaaaatcaaaaatttaccagccatctggcagttcgcaacgactttcaacaggtcgcgatacaaaactaggaaaatctggtacaaacgtacaaaaacccaagttaaatcatatgtgagttaaaatttgtgatcattaaatgcttacagatctacttcaaactaccttgaaagaagaacttttaatagtctattattatgtgcctgtaaactgtctattttatattttctattcctttatatctttagttgcaagtcaggaaaaatgtctacggccagcaggattgccatgtctaatccaaagcaaaccaatggcaacccacagcgaatgatgccaagaagcacaaacgcctcaatgatgcgacagtccgaggtcaagcgggtaaaccctctcgcaactccaatttcacaaataatataatatatatatatactccattgtagcgcatgagtttgatgcgcgccgacagtgattcggatctgctatacaacgaatatctcttcaagtgatttgcaataagttatatggatttgttgcttccctttcaaaaattagtttttccaatccaaaaatacctaggttatgttaaaattaaaattgaaaccaagactgggaaaaatttaaagaaagtgtaatttttatacttaccggtgatgagtccatgatcatcttaactacatcggctccaaacttttctttgtattgtttggcaagtcgctcagagatttcgctgagtgatgttagcttgggctccttgtacacaaactcgatggcatgatcttcttcaaagtacatctaaaaatagcattaaatttaatattaattttaagggtattctgtagattactcactaatccataaaatacaacacggtaaaagcgacccaacattctctttcctgaccgattcacttcaactattttattataggcttgcgtgagatgctcatagcagtgtgccaggtcctggtaactacgatctctttcgtacatgggcaggatgagtttgtagagctctccaaggcactcaaatctttcagcgcgatccaagaagtcagcacatagcttaagctgctccagtagcatttgttcggtgtactgggaatcctgagcaccggc

SEQ ID NO: 12914 - DNA, 1482 bp, DROSOPHILA
atggagcagctctttgagttcccggctcgtgcgatgggtctgggattggtccagatgccgcagatgcagataccaatcccatgtaggagggagtactcgctaaatccgaacgcagtggaattcgtgccatcttttcgccagaaatccgagcctccaagtccatcgaccaaaacggaggcgacctcaactacaacattgctgcgtcccgaggtcgttggtgatgccgtgaatcgtgttgaaaatgggatttttctcgagcgccagatctttgacaccctaagtcaactgggagacgagcaaatgcctctggaagagatcgcggttggtgtattaccaggaggacaaggtcttagtatgactttcaccaccaaagagcacgatcagatgcagcctttggaccgaaatactctagtaaaccacagtaaacagtgcctccagctggctgtgggcgatcaggcgaagttggcgaacagacctgagaccgttctaattgcccaattcctcatccgggtcaacgatcttttgaacgagaagtatgaatacggtggcgatggatccgtgtgtcccagatgcaccctgtgctcaaatcgcagctatacggagctggaaatcgaaaaccaaatcgagtgcataaaggcttttgagaaatttttcacctttacggaatcaactcgctaccaagacatagtttctcacaaagcctttaaggagctgtgccacaggctgggtttgatcgtaagccgagatcagatccaggttaaccgcccctccacagtggtccctccacccacggcacagtcatctagtataaccctttgcatgtccaagaacgaaatggaatctaatgtagaggccaaggcttatagaggagatgacgaatccagtttcaacggttgtgaactgaccgcgaatggaggtcaacatccatctatttctaatgaatatttgaggggaaagctttacagatacgaagactctcagggatgccagttggtcaacgaactgagtgaaaatcaacaaaaaattgaagctatggaggtagatgagttcgagttggatttaccatctaccacgaagcccaagaccgtggtaactactagtgtgccgacaacctttcctcgggtgtacaaaacagccaaagccaaatgctcggctcgtggggcaggatctagtggtcaacagagtggctacaataacagggcagtccgttcaatgatgcagccgtcaaagggctcacccacgacttcacattttcggactattgcagttggttgccaccaccaagctggatcggctgcccctcgaaagctgcaaatggattcgtgcccaaccggggctgcccgcaagcaaaataggttgactgaagcaaaatcaaaaatttaccagccatctggcagttcgcaacgactttcaacaggtcgcgatacaaaactaggaaaatctggtacaaacgtacaaaaacccaagttaaatcatatgtga

SEQ ID NO: 12915 - protein, 482 aa, DROSOPHILA
MGLGLVQMPQMQIPIPCRREYSLNPNAVEFVPSFRQKSEPPSPSTKTEATSTTTLLRPEVVGDAVNRVENGIFLERQIFDTLSQLGDEQMPLEEIAVGVLPGGQGLSMTFTTKEHDQMQPLDRNTLVNHSKQCLQLAVGDQAKLANRPETVLIAQFLIRVNDLLNEKYEYGGDGSVCPRCTLCSNRSYTELEIENQIECIKAFEKFFTFTESTRYQDIVSHKAFKELCHRLGLIVSRDQIQVNRPSTVVPPPTAQSSSITLCMSKNEMESNVEAKAYRGDDESSFNGCELTANGGQHPSISNEYLRGKLYRYEDSQGCQLVNELSENQQKIEAMEVDEFELDLPSTTKPKTVVTTSVPTTFPRVYKTAKAKCSARGAGSSGQQSGYNNRAVRSMMQPSKGSPTTSHFRTIAVGCHHQAGSAAPRKLQMDSCPTGAARKQNRLTEAKSKIYQPSGSSQRLSTGRDTKLGKSGTNVQKPKLNHM

SEQ ID NO: 12916 - DNA, 4394 bp, DROSOPHILA
tgtttgcgcgccctgctcgtcgcattttcccgccctttttgaacgctcggcagatatatatcgcatatatacacatgctcgtacatatgacactcgttatgcaatgccattgaaatcgagtgaagagagagggccacgagaccgggacaaccgggcaaacattactacgcatggcgtggacctgaatccaaatccgaatctgaacccgaatcggcatcgccatcggaatgagaatccgaacccgaaagcgaatgggactgggaatgcgaatgcgaatgcgaattccgactgggaatcggacaacaagcgggcgaatgttttgtatctgtatctggcttatcagcaagccgctcgctcgactgacaaattgataaaaacaagtcggctggcgggggttgggtgggttttactggcgggttggatgccgcccccctgtcaaaacatttccatgcccttcgccggcagataaaaaaaagttggctaaaggtgtgcgctcggggagcggaaatgccttgagatggatgagctagtttatggcaacagattgtcgactacaccttttcacggttcccaaacaaagcgagattatagcttattaatatttttagttaaagatgcaagagcaagttaattaagatttgtgaactatctttataaaagtagattgccaaatcgcctcgatgaaatgtagtaattaaacgtattaattagtaaattcggtaatattatgtcaatcattaacgctttttagacataagaaattcgtctagatatgattaacatgcaagacaatcttttgtatctaacaaatgcattccaacgtggccaaataaaaatgaataatgaaacatttgctgctaaaaattatcatataaatgttggttacctctgtaggcaaaagcaaaacgatagtaaaaaccccaaagcatcttatccctttgcaatataataatgatgatctttttctaaacagcttcctaccgcagacacaatctccacaatggccaatccgcgcaagttcagcgagaagatcgctctgcagaagcagaagcaggcggagggcacagcggaattcgagcggatcatgaaggaggtgtatgccacgaagagggatgagccgcctgcgaatcagaagatcctagacggccttgtcggcggtcaggaggtaagccaatcctcgccaggcgcaggcaatgggacgggcggaggtggcagtggttccggcagtggagccagcggcggaggagcctcaccagatggcctgggaggcggcggtggttctccgacggcttatcgagaatcccgagggcgcagcgtaggtgtgggtcccatgcgaagaccgtcggagcgcaagcaggatcgttcgccctacggcagcagcagtacgcaacaaaccttagacaacggccagctaaatccgcatcttcttggtccacctacggcggagagtttgtggcggcggtccagctccgattcggcgctgcaccaaagtgcgctggtggcgggcttcaatagcgacgtgaactcgatgggcgccaactatcagcagcagcaacatcagcaacaacagcaaccgggccagccaagatctcactcgccgcaccatggtataaacaggaccatgagtccgcaggcgcaacggaggaagtcgccgctactgcagccccatcagctgcagttgcagcaactgcaacagcagcagcaacagatgcaacatcagcatcagctgcaccagcagctccaaatgcagcagctgcaacagcaccagcagcaacaccagcagcagcagcaacaacagaacacgccatacaacaacgccaaattcacgaatcctgtgttccggccgctgcaggatcaggtcaactttgccaacaccggctccctgcccgatctcacggcccttcaaaactatggaccccagcagcagcagcagcaatcccagcaacagccgtcgcagcaacaacagcagttgcagcaaaccctgtcgccagtcatgtctccgcacaatcaccgccgcgaacgggatcagtcgcccagtccgtttagtccggcgggtggaggagggggagcaggtcccgggtcgccctatcagcagcaacagcactcgcccaccggaaacacgcaacagcagcagcagcagcaccaacagcccagcaactcgccgcacctgtcctttaccaatctggccaccacgcaggcagctgttaccacatttaacccgctccccacgctgggtccgcacaatgccaccgactaccgccagccaccgaatcctcctagtccacgctcttcgcccggcttgctgagcagcgtatcggccacggatctgcactccagtgcaccggccagtcccatacgccagcagcaacaggcccatcagcagcaacagcagcagcaacaggcgcagcaacaacagcaacagtttgataactcctacaacagtctgaatacctcgtttcacaatcagtttgagattttctcgctgggcgacagcaattcctcgccggaacagcagggctttgcaaataatttcgtggccctcgactttgacgacctgagtggcggcggaggtggtggcccaagcgggggcggcggcagcaatggaggaggtctgaccaacggttacaacaagccggagatgttggacttcagcgagctgagcggcagcccggaggcgagtgggaacaacaaccacatgcggcgaggagtgagcaacctgaacaacaacgggttgagcaatggtgtggtgggatccacgcacaacggcagcacaaatctaaatggagcgggaaacaacaatagcagtagtggaggtggcacggcgcaggatcctttgggaataaccacttcgcctgtgccctcacccttgggctgccccagttcaccgctgccgataccgattccgatgtcggcgcaaagctcgccacagcagcagcaccaccatcatcagcagcagcaacaacagcatcatcagcagcaacaccatcagcagcagcaattatcattatctctgcaccattcgccgcatcattcgccaatgcattcgccgcaccatgggaattcaccgctttcaagcagctcgccagtgagtcacaatgcctgctccaactccaacgtggtgatgaaccaccagcagcagcagcaacaacatcaccaccagcaacaccatcatcagggctcctcgcaaagtcacacgccgaccacagcgaatataccctctattatctttagtgattactcctccaacgcggattataccagggagatcttcgactccctcgatctggatctgggacagatggacgtagccggtttgcagatgctgtccgaccagaaccccatcatgatcgccgatcccaacatcgaggatagttttcgacgcgacctcaactgatactatgaggaggctgttgcggccattgagagcggagtgctgctggaggaggactaccaggcgctgctcggatcagaggcgctggcggatgaacaggtggtcacagtcgaggccgccggagccgcagcagcagtagtaacagttgaagaggcagccacagttagcgagaaggacaaaaaagatttggaagttgtggaacttctggtgtccggtgttatggatgacctggtggactccagtgacctggacgaggaagtgcgcaatttctttttttaggcagccagcaagtcatttttgtcgttaacacaactgatggaattttcgtttttaacacagatgaggaagtgaattacgttttttaaacgcattcacttgccatttctcgattaaatgccatattacttaagctcaggatttacaagcttaatgcgaattaagttaatttcggaaatgctgacgagagtgattgcaaagttcaaaattgatacaaattcacttccgcaaattcatgctgaaactgaaagttttctaacagtcctcaatattgttatctcgttatcgtccgtgctttcgtagctagctcctacaacaaaaatacaaaaaaaaaaaaattaacaaattgttaacccttaagtgtacttgagtgtctttttacaccctctttcctcaaaaatccctagcaccctgaaaaagcgaaacatattttacagcgagtctcagattttacttaactacgcacataagtcactatacaatttacacaattaagttctaatttctgtatataatacaataactatggggaagaaagcgaaaaggattgaaaccaaaaagtgtcttagaccaacgaccaaaattatattctctaaacgaaaatgatgaatgctggaaagaggatggaggatttggaacagcccctctgagcattggaagtcctgataactatccatttggatatgccatgccattcaacccgtctccgttcgtttgtttgatccag

SEQ ID NO: 12917 - DNA, 2394 bp, DROSOPHILA
atggccaatccgcgcaagttcagcgagaagatcgctctgcagaagcagaagcaggcggagggcacagcggaattcgagcggatcatgaaggaggtgtatgccacgaagagggatgagccgcctgcgaatcagaagatcctagacggccttgtcggcggtcaggaggtaagccaatcctcgccaggcgcaggcaatgggacgggcggaggtggcagtggttccggcagtggagccagcggcggaggagcctcaccagatggcctgggaggcggcggtggttctccgacggcttatcgagaatcccgagggcgcagcgtaggtgtgggtcccatgcgaagaccgtcggagcgcaagcaggatcgttcgccctacggcagcagcagtacgcaacaaaccttagacaacggccagctaaatccgcatcttcttggtccacctacggcggagagtttgtggcggcggtccagctccgattcggcgctgcaccaaagtgcgctggtggcgggcttcaatagcgacgtgaactcgatgggcgccaactatcagcagcagcaacatcagcaacaacagcaaccgggccagccaagatctcactcgccgcaccatggtataaacaggaccatgagtccgcaggcgcaacggaggaagtcgccgctactgcagccccatcagctgcagttgcagcaactgcaacagcagcagcaacagatgcaacatcagcatcagctgcaccagcagctccaaatgcagcagctgcaacagcaccagcagcaacaccagcagcagcagcaacaacagaacacgccatacaacaacgccaaattcacgaatcctgtgttccggccgctgcaggatcaggtcaactttgccaacaccggctccctgcccgatctcacggcccttcaaaactatggaccccagcagcagcagcagcaatcccagcaacagccgtcgcagcaacaacagcagttgcagcaaaccctgtcgccagtcatgtctccgcacaatcaccgccgcgaacgggatcagtcgcccagtccgtttagtccggcgggtggaggagggggagcaggtcccgggtcgccctatcagcagcaacagcactcgcccaccggaaacacgcaacagcagcagcagcagcaccaacagcccagcaactcgccgcacctgtcctttaccaatctggccaccacgcaggcagctgttaccacatttaacccgctccccacgctgggtccgcacaatgccaccgactaccgccagccaccgaatcctcctagtccacgctcttcgcccggcttgctgagcagcgtatcggccacggatctgcactccagtgcaccggccagtcccatacgccagcagcaacaggcccatcagcagcaacagcagcagcaacaggcgcagcaacaacagcaacagtttgataactcctacaacagtctgaatacctcgtttcacaatcagtttgagattttctcgctgggcgacagcaattcctcgccggaacagcagggctttgcaaataatttcgtggccctcgactttgacgacctgagtggcggcggaggtggtggcccaagcgggggcggcggcagcaatggaggaggtctgaccaacggttacaacaagccggagatgttggacttcagcgagctgagcggcagcccggaggcgagtgggaacaacaaccacatgcggcgaggagtgagcaacctgaacaacaacgggttgagcaatggtgtggtgggatccacgcacaacggcagcacaaatctaaatggagcgggaaacaacaatagcagtagtggaggtggcacggcgcaggatcctttgggaataaccacttcgcctgtgccctcacccttgggctgccccagttcaccgctgccgataccgattccgatgtcggcgcaaagctcgccacagcagcagcaccaccatcatcagcagcagcaacaacagcatcatcagcagcaacaccatcagcagcagcaattatcattatctctgcaccattcgccgcatcattcgccaatgcattcgccgcaccatgggaattcaccgctttcaagcagctcgccagtgagtcacaatgcctgctccaactccaacgtggtgatgaaccaccagcagcagcagcaacaacatcaccaccagcaacaccatcatcagggctcctcgcaaagtcacacgccgaccacagcgaatataccctctattatctttagtgattactcctccaacgcggattataccagggagatcttcgactccctcgatctggatctgggacagatggacgtagccggtttgcagatgctgtccgaccagaaccccatcatgatcgccgatcccaacatcgaggatagttttcgacgcgacctcaactga

SEQ ID NO: 12918 - protein, 797 aa, DROSOPHILA
MANPRKFSEKIALQKQKQAEGTAEFERIMKEVYATKRDEPPANQKILDGLVGGQEVSQSSPGAGNGTGGGGSGSGSGASGGGASPDGLGGGGGSPTAYRESRGRSVGVGPMRRPSERKQDRSPYGSSSTQQTLDNGQLNPHLLGPPTAESLWRRSSSDSALHQSALVAGFNSDVNSMGANYQQQQHQQQQQPGQPRSHSPHHGINRTMSPQAQRRKSPLLQPHQLQLQQLQQQQQQMQHQHQLHQQLQMQQLQQHQQQHQQQQQQQNTPYNNAKFTNPVFRPLQDQVNFANTGSLPDLTALQNYGPQQQQQQSQQQPSQQQQQLQQTLSPVMSPHNHRRERDQSPSPFSPAGGGGGAGPGSPYQQQQHSPTGNTQQQQQQHQQPSNSPHLSFTNLATTQAAVTTFNPLPTLGPHNATDYRQPPNPPSPRSSPGLLSSVSATDLHSSAPASPIRQQQQAHQQQQQQQQAQQQQQQFDNSYNSLNTSFHNQFEIFSLGDSNSSPEQQGFANNFVALDFDDLSGGGGGGPSGGGGSNGGGLTNGYNKPEMLDFSELSGSPEASGNNNHMRRGVSNLNNNGLSNGVVGSTHNGSTNLNGAGNNNSSSGGGTAQDPLGITTSPVPSPLGCPSSPLPIPIPMSAQSSPQQQHHHHQQQQQQHHQQQHHQQQQLSLSLHHSPHHSPMHSPHHGNSPLSSSSPVSHNACSNSNVVMNHQQQQQQHHHQQHHHQGSSQSHTPTTANIPSIIFSDYSSNADYTREIFDSLDLDLGQMDVAGLQMLSDQNPIMIADPNIEDSFRRDLN

SEQ ID NO: 12919 - DNA, 3392 bp, DROSOPHILA
ttaaaaatgattttagatttcatattttgttctatttttaaaggacgcatttacgacgacgatgatgaggatgaatacgattctgagctggatgacttcatagatgatggcgactgtgaggaggatatatcttctcacatccgcgacattttcgggtatgataagcgtcgttatcaaggaatagacgacgacgatcgtggcatggaatccagttttgcacaagtgcagcgcgaggagttcatcagcaagaagctgggttcgtagcaaaccgcatgaccaataaaaacccataataatgattatatattcgcaggaatgcaagaggatctcgaggacatgcgcatggaggcggcgcacaagaaacaaaagaagctcgtggcgaaaatcagctcacgctcctaggacggtatttcatctcgacgtgggctaatccgtcgccatgtaaagtgtacacctgatttatctcttgggcttagcaacgaaaatttaagcccactcattagtttttgttgtattacgatgcaataagatgaaatgcagagtagattgacggaaaggagaacaggaaaaccagagaagtgcacaggaagaagcgaattctgatgaagattggtttgctgaaaatagcttatttttatatcatattttagtcgaatatccatggttaatgccacaatgattatagcgggctcatatttggtatatgtacaagtacatatgtaaacaatatataattttgtgtgcggacgactacatcgtgtagctgccataggaacatttggaaaattattataaataatggaaaatgaaaactttcttgcgtttattaaagttattaagttactctaagaagctctttaacttacaattgtcgtttattttttttatacaaatacaaaaattaaaacaatcatgaagtttcgacattcgttgaattgaaatcctgatgtgcgtttgccatttatggtaaatccattttgaagacaatatcctttaggatttacttcttgtccttggcctgcagctttgagtggatcatgtccttaaactgcgacagaatcttgttttcgcgcttctgtcgctcctccttgctgaacatggccagtgctcgcttctcgtcggcggagtacagctggttctccttgcggatacggacggcctccatgcgacgatgcctgctgccgctcatcacatagcccacggactcgaaattggcgatttcatcggatgttaggccgatttcaccacggcgaggaattctcttgccctcggcaatgtaggcagccatggcggcaccttctcctggcagcaaggccttgccgaagtccttttgattaagactaccgccgggtcgcagcgaaggtccaacgtcctcgtcgttgtgcgaggcactttccttgttcttcgacttgctggcactggaggaggagctcttcttggacttttccgcctctgacttacgcttcttcttcttctttttagactttttgtcctttttgctagtggaggacttcttctttttaggcttcttgataccgtcggctgtcttttccagccaaacatcttcctcctcggactcatcttcgctgtcagaactggaactggaacttgagctgctggactcgtcgctactgtcttcgctgcttgaagaactggaggaggaactcgactcttgtttgctctttttctttttggatttctttgactttttcttcgacttcttttcagatttcttgtgctttctcttgccctttttctttttcttcttgggtcctatgtaagaacccttcaccagctccacatcgtcggtttctggccgggaagggctcttgccccagacctctggcacgccttcctcgccgatgagaactctctggtttctgcgggcattcacagccttggagtcacctttgaattggtggttagacgatcctctacctctgtgctgcgacctgaacgatggttcggcgggatcattaatgaaactaccctcgggagcccttccccggaagggattctgccgcctatcgttgttttcatgataacgatcgttgggccagcgttccacggattttgggcgggatttgcggcttctggacgggcttctcgaggaactggatctatcactgctgctgctgctggagcttctggagggcgaggagcgcgttctacggcggcgaggcactgcatccttttctctggagcgacgtgagctgcgattggaagtcctttccctgtggagctccctatccctttctcttttcctctcccgcgaaaccgatctcctatgctgcggtttctggtaagtccttctttccgagcgggatcgagccctagaatcggaccggcgacgttccctttgcctgctgcgactcctgctgcgtgaacgcatgtggaaaatacaagtttttaacaatttcaccggaaaatgcaaaacaaacgtttgtcgctattggtgagcagactcgatagcctacccaatcgatagtagccgctcatcgataggcaacagctgattgagtgattttagctgcagaaggtcacatcaaaacgaactttgcaaattcgctcgccaaaataaagtttattatcgccaaaaatgctgtaatttaaatataacataaaatataggaaagctaccacttgctaaaaatgacacgcattacttggagaggtcactccactcaggagttgctgtaagctttgaaatatcccgctgcacaaatgtatcactaatttgcaatgttttcgtttattgtttacttatttaacagatcgattttgcggcttcgttggtcatatatgaagcactgctggcactccttaactttcaacgcccacatgaactcctcctacgcctcggacgtctgcctgacccctattttttggtttgtggacaactatactcactgcctaggaccggtaacactatgcaacataacatttgttgttcgtatgattaagcgttttaaacttgtttagttttttgtggttggcgtggctgccttgacgacttcagtcgttagtattgcctattggattggcttgcccttttggtgggccaaaagtcagttggtgacctacttcctcctcattgtgggcaactggctgctgctcaatgtggttttccactacgttatggctgtgatcacgccggctggtcatccgccagagggcgtgtccctggtagaagcggttagcatgtgcggcaagtgcatagctcccaaaccaccgaggactcatcactgctccatctgcaatcgctgcatacttaagatggatcaccattgtcgtgagtaccttaagatttctaaagggttcctacattaattttcatatatcccatatatagcttggctcaacaattgcgtgggttatggtaatcatcggta

SEQ ID NO: 12920 - DNA, 1392 bp, DROSOPHILA
atgcgttcacgcagcaggagtcgcagcaggcaaagggaacgtcgccggtccgattctagggctcgatcccgctcggaaagaaggacttaccagaaaccgcagcataggagatcggtttcgcgggagaggaaaagagaaagggatagggagctccacagggaaaggacttccaatcgcagctcacgtcgctccagagaaaaggatgcagtgcctcgccgccgtagaacgcgctcctcgccctccagaagctccagcagcagcagcagtgatagatccagttcctcgagaagcccgtccagaagccgcaaatcccgcccaaaatccgtggaacgctggcccaacgatcgttatcatgaaaacaacgataggcggcagaatcccttccggggaagggctcccgagggtagtttcattaatgatcccgccgaaccatcgttcaggtcgcagcacagaggtagaggatcgtctaaccaccaattcaaaggtgactccaaggctgtgaatgcccgcagaaaccagagagttctcatcggcgaggaaggcgtgccagaggtctggggcaagagcccttcccggccagaaaccgacgatgtggagctggtgaagggttcttacataggacccaagaagaaaaagaaaaagggcaagagaaagcacaagaaatctgaaaagaagtcgaagaaaaagtcaaagaaatccaaaaagaaaaagagcaaacaagagtcgagttcctcctccagttcttcaagcagcgaagacagtagcgacgagtccagcagctcaagttccagttccagttctgacagcgaagatgagtccgaggaggaagatgtttggctggaaaagacagccgacggtatcaagaagcctaaaaagaagaagtcctccactagcaaaaaggacaaaaagtctaaaaagaagaagaagaagcgtaagtcagaggcggaaaagtccaagaagagctcctcctccagtgccagcaagtcgaagaacaaggaaagtgcctcgcacaacgacgaggacgttggaccttcgctgcgacccggcggtagtcttaatcaaaaggacttcggcaaggccttgctgccaggagaaggtgccgccatggctgcctacattgccgagggcaagagaattcctcgccgtggtgaaatcggcctaacatccgatgaaatcgccaatttcgagtccgtgggctatgtgatgagcggcagcaggcatcgtcgcatggaggccgtccgtatccgcaaggagaaccagctgtactccgccgacgagaagcgagcactggccatgttcagcaaggaggagcgacagaagcgcgaaaacaagattctgtcgcagtttaaggacatgatccactcaaagctgcaggccaaggacaagaagtaa

SEQ ID NO: 12921 - protein, 463 aa, DROSOPHILA
MRSRSRSRSRQRERRRSDSRARSRSERRTYQKPQHRRSVSRERKRERDRELHRERTSNRSSRRSREKDAVPRRRRTRSSPSRSSSSSSSDRSSSSRSPSRSRKSRPKSVERWPNDRYHENNDRRQNPFRGRAPEGSFINDPAEPSFRSQHRGRGSSNHQFKGDSKAVNARRNQRVLIGEEGVPEVWGKSPSRPETDDVELVKGSYIGPKKKKKKGKRKHKKSEKKSKKKSKKSKKKKSKQESSSSSSSSSSEDSSDESSSSSSSSSSDSEDESEEEDVWLEKTADGIKKPKKKKSSTSKKDKKSKKKKKKRKSEAEKSKKSSSSSASKSKNKESASHNDEDVGPSLRPGGSLNQKDFGKALLPGEGAAMAAYIAEGKRIPRRGEIGLTSDEIANFESVGYVMSGSRHRRMEAVRIRKENQLYSADEKRALAMFSKEERQKRENKILSQFKDMIHSKLQAKDKK

SEQ ID NO: 12922 - DNA, 8606 bp, DROSOPHILA
cacgtttggttggtaacagctttaaattccttttaattgacattaaattaattgttaacattggttttgcattagcctagctagttaaatgaaaatacagcgaggatacttggtaccgggacttaggcgatttgggatacaatcgattgaacgttgaaaatctggcagtgataacaatcaatcaagagtgttaattcgatttgatgaatagtttggtttggcttgtgcgatcggggggtatcctaaataatatgagtattcgttttagttacacatacatttgctcccaacttctctctctctctcttaactaactaattgcggagctaagctaatacaactattgtacagaccggcattgcactagtttagccgagctcttcgttttcggtgagtgatggatggatggatgccctaggcttgtttcagggaataatcggaataattgttggggatggagcagaggaaagtgtaagtatattttaattaaattaaattattgcttgaaatgcacttcttggtattgttcccattgctgactttacctaggcaaaggatatctttgcatcttccatcactgcataccggagttggcacaaatacgggcttatctgagcgacgacctatgatgatggataatccctatttgctaattcaaaggctcacatcctctagtatttacaatacttaatacattacatggcaataatatctagttactaatttcgagcgaaatataattatatatatatacagacgatatggttttgttcgggctacttcgacacgattattacagtttatatataactaactaatattcgagaatacttttaaccatcgatagcggcgactctccgtagtggtaattcttggctggggtaaccctgatatgctgggatgctcggattaactttacccttggtccttcccgggacgtagacccgattaccgtgggaaggtcaaacaaagtttcccgctgactactcagtggtttcagtcataacacgtccaggtaaaggccagaatcgggcgctatatagcaaccgccgcagtatcctccgcagaatccccttcgcatctgcgtggtcgtatcaaactgaaaacgggaatagcatatatatataggcaatgatcctttttgataattgagtgactgacatacctcactgatacgcttcatgaccgagtactggccatgcatccgccacacggttcccggtcgtatggagaagtccgtgtccttcatgttaatcgagaagtcgccctgcggacactggccaatgcgattgtagcaatcgcccgctgatcccagcttctgagccaatcctcgcgaatcggcgaacttgaagtcgttgtccatgatgcgcagatcggtgatattcagccgcagctttctgaagtgcgtccggccggagttctgatcgttgtagtactcgtggcctcgcgactccggcggacagctgttggtctgtttcgtcctgtactcgtagtatatggagtagttctcctgcggatccacgttcacgtactcctgtggcgtcctgctgttcatcccgtggcagtagatgtgcaccattcgcgatctcacctccagctggtagttgccatccttgttgtagccgtgcatctccttcaggtccgcacagcttctcggtgttccgcgattccgtgagcctccgattgaattcaagctcctgctgctactcactccagtgcccctcggtctgctgctgatgctgctcccgatggcacttctccttcggcaatgtggcggcggagtgcagctgtgacgctccaccctggctctcgtgggacacgcgatgcgacccttgtgcgagttgaagcagaagtcccgcctcttctccacaccctcacagttgcactggaaagggaggtgggatagtaactctatcgaaaggaagctttccaagtggccaactcacctgcgagatgactctcgactgccggcgcacgcagttgttgcagatgcgtcgcttggatggacgcttcttggcatcgcagtgcttgtcctccactccgtcaccctggaaggactcgcagcgcacatcacgcgtttggtactcctccgagcagtcagcaggacagcgcctccagtccgaggcattccacttgcagttgatcctgcaggatttggtggtggtgcgcagcttgggacgatgcacctttcggctaatgcagtacgattcatccacgtacactcggcgctttcgggtacccggaacatccggcttgtagacccgcgtgcagctttgcttcttcctcttgacgccctcgccacattgcaccgaacactatgaagggtaaaaaatttaatttcatggatctattggcagttgcaggacaactcacgtctgtccaatcgctggtgtacttgatgtggcagcatttgcggacgtccttgggctttctactgccgcagccgattccgtatggatgtgaacaactcacagaacgagtcttctcgcaccactcattgcattcgccccattctccaatcacccagttactaactgccagggcattctatgggataagaaggattaatatatgcattaattcctccgatttcagtgacttacaggtgatttcgtgtacgtgggacacgactcagtgttgcagatcccgattagggtgttcaaatggggcttggtccgtggattgcacagatcatcgctgacacgggaattgtgtaggtagcagtgagcttcacgctgctgggaaccagtgccacacgacttggagcactacgatggagaatatatatggcttaggattcgttccgattaacaaatgttgtgctaaactcacagttgaccactccgataaaacccagcatccttcgcgacactcctcatggtaagccacatcgaatttcagcttgcaatatgacatatccacaatattggaacgttgcatattcgtgaatgtctggacgcaggcgtaggtcttctcccgggtacccaattctccacacgcggccgagcactccgagatgctcgtcacagtgagactgcaagttagttaatttaattagtttactacaagtaagttttatctttatcactatcttaactcacttgaggcggcagtcagtgttgcaagcccgatcatcgattttgggcatggcggacttgtcacagaactgtggggcaaccttgacaccctgggtggtgctgatgcaggccggcagtcgatgactcctgccctcgcatagggaatcacagttgctcggggcctgcatctcccagcgatagatctccacctccgcctcataatccggtggcttgtcgatggtgtaggagtaggacaagaggacggtgtcctgccgcttggacggactcacgtccagtgaaatgatctgcaaaatggagttaaggattgcaactaaccatctggtataggatccaataggtaatacctgtactataagatcacgtgacagtttccatgagtaggtcgtattcacctgctccaccacactactagaaccggtgtactgcatcgtgactccggcataaacgaatttcaatggataggtcttgaggaattttccattaagcagttcgttgtcccggtcatcggtgagtactatgaagttctggtcgggatagccacgctgagtgattattatgttggaggcacctgtaaatgaataatcaattgttacaaacaataaatgacgaaataggttgaacatagaaacagaatatagcaatatcaaatgatttaaaacattaaagcggtcttaactattgtcataattaatccaattttatttgcatgtaaagtggtacctatgcgcaaatttaaatatattgtaataaaataaatatgtaactcatcgagtagatatcaagttaattaattgatatttaaaattgatactcagaaatcattgaagtggttttatagaaatggttttaattaaaaaatgcattaaatgcatttaaatttaaatttagattaccagcagcagcgataagaaatgcaatgccgaatgattaacaaataagcgtgttgttaatgcaaacatttgaaatcagcgatgcccctgctgattgtaaatgtgattttacacagggcatgaatgttacaagattaccgccggtggcgccagaatatgaatatagaatataattaatggacgattttaaagtggagcagcagccccagtagataggcccagaatcgcaaagagtgcaatctgggtgaacgtgagactgtggggtgcgttcacctggcgccggtgaacaagtctatgcctggcgacaagtctatctggaactggcaactatctgtcacccagttggcgagtcacgagctccacgtacttgtatgtacgttaagcgatttagccattaagcccgtaaggcacaaacagatgccattagcatttattgaggaaattattagccaaaaattaattaaagttatgctgttagctgagtgtgtgcaaaccttttggtattcgcgtcacatagtaaagtgtcttgttcggctcattcccatcatttagccccaggagattggagacgagcagatttccggttacctcgtggcatgtgtcattgcgaccctcgcacacgccgcacttgtctgcaaagagcgtagcggaaatcgattaattatgattattatggtaggtgattcaatcaagcgatgggtgctgaagttaggggtattaggtgctctgcggataaggggaatgattcgctttacccagcttggcaatcgagttgagctcgttgtcgcatcccgccggccggcagatgccgttgacgcacttgtcgaagctgtccaccgcacaggaggtgccgtcggtgaccatgctcttgagcatgaagtaggtgaccttcatgtccatgcggcagaatagcttgcacgcatcctctgggggtcgagaaagggggttggttagcctagggtttcacacgtttctcacatggctgtcccatactcactttcgtatttgggcacccacttggtgtctgggttcacgcccggaatgttcatgttccgtccgttcatcgcatagcactgctgctcgcgcggatccatgctgcctggcggacactggtgtgtgttgcacgatcggtacttcttccgacttcccgtgcagtacttgccaccgttctccggcaccggttggttgcactcacgacgcgactcctgcactccgccaccgcaggtgaggctgcagggcgtgaatggcgtccatggtccccatccaccgttcacctggcgtccgtatccatgcttgttggatacacacttgccccgctgacaccagtggccactggagccgcagggcgttccgtcggcccatggcagattgctggaggcgcactgctcgttggagttaccggaggttcggttgcaccacaaccgcttgcactcctcgtccgtgggacagtagccaaagtcattgccgaaactcagctggcactgggcgtccagggagtagatctctccaggcagacgctcggtgccatagggaatgtgggcgcccacggaggtctccagacaggacttgtcggttttcctaagttgaatggtaaattggacaattggaatcacaattggcaactcgattggcggaaaacttactcgagaaactcggagacaaagtggcgggagcacttggaccacgaccacggatgcatgtggatgcccatcacgctggacatgatgtggagcaccttgttgttgttctgcctggtgacatagggcatacacttgtcgtcgtcgtcgtggttcatgttcaagctgaaatatattaaaaacagggcatacggcattgataagccatgtggtaaacaaattttcgatttgataacttacatgtgtcccagctcgtgggccatggtaaaggcggtgggcagtccggtgtcctggacaatggagcaggaactggaactgcaaacagtgcccagttcggccaagcccagcatatggcaaatcttgcccggcacgctgccacagatgggttcgctattgtccaaacgaaattataccattagatgaacccaagatggatcatatctccacttaccgtgtgatcaacatggctgtatctctttcgtatccagattggttaataaactggcagaagtgcttcagcatttcgttgctggaatgcgtctggtcgttgatattcggcaggctgatcagtcgcaccagcaaaatgcgaatggagttaccaatgctggcgtccgcaaaaatgctggacacgatcgacatgaggatgagaatgtatggttgcaggtcctcgccgtggaattgcttcatgctattgtccaccgcaatgagcacctccaaggtgtacacctggttgtccacgtccgcatagtgtcgcttcttccgattcagtttgcgggacttggacttctgctcctcctcctgcacctgctccagcttgctcatgaaatcatccaggcccagctcgaacttggagacagcgtgtctggcgttgcgctgcgatttgcgaaagacccggtggagaacctcatcgctgctggttcggttcaccggctgaatgagcagcgcgccgaaactcgttttgatataaccagtctggtgaggtgaagaggggggcgaaacgcttattagtggtcatattcggcggcatattgataagcataatttgcgatatgttaatgcgatgcaaatggatgaaatctaaatctgagcgaaggtcagttgttggccttaccatgccgccgcacagtgagacggagaccatcgagtgcggatcgtcctcgacgtaaccggagtagaagcagcctaggtggcgctgctccgcctccgcctccgtctccggtcccggatgctcctccccctccttcagtatccgaatgtgggtcatcgaatggttgtggacgaacgaggcgtcctgtcgcagcaccaaatgcaactggcgaccgaacacattgaggttgtactgcggatgcgggtcccagatctcattggacatgttgcgatacgttcccgtcatggcaaaggccgatgcggactctataagtggttgggatatattgtagatagattaatattaaaaaggtgtattaggcttaccttttaggaaactgttgatgtcgctgtttcgtttcgactcgtagatcagatcagcttcgctgagactgtagttgtagaccttggtgggcatcacgaaggcgctgtgctcctcctcgtccagatcgtctaagccatcgggtggctcgtggtccgtcgacgtgtcgttatcaagccttctgggatggagcgtggctggtgtagcaggtggactgttggctagtgggtgcgtgctctgtggcagctcctcttggcccttatgggcacttcgcaaaccgagatggaacatgataagcatgcccagcagaaaagcgatgcagcaggcatacaggcaggcattctgccgccagtgggtggacatcttttgaatgtacttgtggcaccaccattcacacctcttcttcacctcgagctgaaagatggatagggagaaatgggggattcggttagcacatcgtttgctccgcagattatgggctaccgcgtgcagattggccgcaccgtccggcattctctcacaccttgggtgcggatttcgattagtgggcggctggaaaggtgaaaagctgaaaacctgaaaagccgaccagataagtgcttgtgcacgttccgtgctctccaaaccagcctatcgcggcgggggccgatgtgagtgattgacttttgaaagaattattgatgaactgccgccgccggcgtgtggataccttgaccacctgtgagatgctcagatggctaagatactaggatgcccggcggcgttggcctttggctgcagtcagacgagatacagagcagaggagaagctgttgaaaagacttcctcgcaccgcgaatttttgcacattttgtttaaaataaatgcttaaatgcgaaggtgtaaagtgtgccaacggcaatttgtgctcgagagataaaacaaaagccgaacaaaaatgcgaataaaaagattcagtaccccattcccatccccaccgccaccagccaactggccaactagccaaccagtcagcctggcgcaaaaaaataatgttaaatgcctctaatttgtaaatttatgtgagagctctttgtttgcaccttcgccgaaattgttttagccaattcatacatcagagcaaataaattaaaattccccctgcgaaattagcaaattaatgccgctaaatgatgggctgttttacataattttatggcatctctgtgaactctgcaaccgccgacacattcgttatgctcattggccatagtgtcgcctcaaaagtgtctgcaaaatatggtatatgtatgccaaatgccaatctggcgtgccgtgtgattccgactgttgaaggaaggggcagccgtgatcacatttccggctactttacggttctcgccactgattagttttgaaaaccacaaatgggtatatcgttatcgaaactttaaatttagactatagctcagcacattccgaacacaaagctactgggccgtaaaacttgtccttgaaatttgttaattgctatt

SEQ ID NO: 12923 - DNA, 4660 bp, DROSOPHILA
atgccggacggtgcggccaatctgcacgcggtagcccataatctgcggagcaaacgatgtgctaaccgaatcccccatttctccctatccatctttcagctcgaggtgaagaagaggtgtgaatggtggtgccacaagtacattcaaaagatgtccacccactggcggcagaatgcctgcctgtatgcctgctgcatcgcttttctgctgggcatgcttatcatgttccatctcggtttgcgaagtgcccataagggccaagaggagctgccacagagcacgcacccactagccaacagtccacctgctacaccagccacgctccatcccagaaggcttgataacgacacgtcgacggaccacgagccacccgatggcttagacgatctggacgaggaggagcacagcgccttcgtgatgcccaccaaggtctacaactacagtctcagcgaagctgatctgatctacgagtcgaaacgaaacagcgacatcaacagtttcctaaaagagtccgcatcggcctttgccatgacgggaacgtatcgcaacatgtccaatgagatctgggacccgcatccgcagtacaacctcaatgtgttcggtcgccagttgcatttggtgctgcgacaggacgcctcgttcgtccacaaccattcgatgacccacattcggatactgaaggagggggaggagcatccgggaccggagacggaggcggaggcggagcagcgccacctaggctgcttctactccggttacgtcgaggacgatccgcactcgatggtctccgtctcactgtgcggcggcatgactggttatatcaaaacgagtttcggcgcgctgctcattcagccggtgaaccgaaccagcagcgatgaggttctccaccgggtctttcgcaaatcgcagcgcaacgccagacacgctgtctccaagttcgagctgggcctggatgatttcatgagcaagctggagcaggtgcaggaggaggagcagaagtccaagtcccgcaaactgaatcggaagaagcgacactatgcggacgtggacaaccaggtgtacaccttggaggtgctcattgcggtggacaatagcatgaagcaattccacggcgaggacctgcaaccatacattctcatcctcatgtcgatcgtgtccagcatttttgcggacgccagcattggtaactccattcgcattttgctggtgcgactgatcagcctgccgaatatcaacgaccagacgcattccagcaacgaaatgctgaagcacttctgccagtttattaaccaatctggatacgaaagagatacagccatgttgatcacacgcgaacccatctgtggcagcgtgccgggcaagatttgccatatgctgggcttggccgaactgggcactgtttgcagttccagttcctgctccattgtccaggacaccggactgcccaccgcctttaccatggcccacgagctgggacacatcttgaacatgaaccacgacgacgacgacaagtgtatgccctatgtcaccaggcagaacaacaacaaggtgctccacatcatgtccagcgtgatgggcatccacatgcatccgtggtcgtggtccaagaaaaccgacaagtcctgtctggagacctccgtgggcgcccacattccctatggcaccgagcgtctgcctggagagatctactccctggacgcccagtgccagctgagtttcggcaatgactttggctactgtcccacggacgaggagtgcaagcggttgtggtgcaaccgaacctccggtaactccaacgagcagtgcgcctccagcaatctgccatgggccgacggaacgccctgcggctccagtggccactggtgtcagcggggcaagtgtgtatccaacaagcatggatacggacgccaggtgaacggtggatggggaccatggacgccattcacgccctgcagcctcacctgcggtggcggagtgcaggagtcgcgtcgtgagtgcaaccaaccggtgccggagaacggtggcaagtactgcacgggaagtcggaagaagtaccgatcgtgcaacacacaccagtgtccgccaggcagcatggatccgcgcgagcagcagtgctatgcgatgaacggacggaacatgaacattccgggcgtgaacccagacaccaagtgggtgcccaaatacgaaaaggatgcgtgcaagctattctgccgcatggacatgaaggtcacctacttcatgctcaagagcatggtcaccgacggcacctcctgtgcggtggacagcttcgacaagtgcgtcaacggcatctgccggccggcgggatgcgacaacgagctcaactcgattgccaagctggacaagtgcggcgtgtgcgagggtcgcaatgacacatgccacgaggtaaccggaaatctgctcgtctccaatctcctggggctaaatgatgggaatgagccgaacaagacactttactatgtgacgcgaataccaaaaggtgcctccaacataataatcactcagcgtggctatcccgaccagaacttcatagtactcaccgatgaccgggacaacgaactgcttaatggaaaattcctcaagacctatccattgaaattcgtttatgccggagtcacgatgcagtacaccggttctagtagtgtggtggagcaggtgaatacgacctactcatggaaactgtcacgtgatcttatagtacagatcatttcactggacgtgagtccgtccaagcggcaggacaccgtcctcttgtcctactcctacaccatcgacaagccaccggattatgaggcggaggtggagatctatcgctgggagatgcaggccccgagcaactgtgattccctatgcgagggcaggagtcatcgactgccggcctgcatcagcaccacccagggtgtcaaggttgccccacagttctgtgacaagtccgccatgcccaaaatcgatgatcgggcttgcaacactgactgccgcctcaatctcactgtgacgagcatctcggagtgctcggccgcgtgtggagaattgggtacccgggagaagacctacgcctgcgtccagacattcacgaatatgcaacgttccaatattgtggatatgtcatattgcaagctgaaattcgatgtggcttaccatgaggagtgtcgcgaaggatgctgggttttatcggagtggtcaacttgctccaagtcgtgtggcactggttcccagcagcgtgaagctcactgctacctacacaattcccgtgtcagcgatgatctgtgcaatccacggaccaagccccatttgaacaccctaatcgggatctgcaacactgagtcgtgtcccacgtacacgaaatcacctaatgccctggcagttagtaactgggtgattggagaatggggcgaatgcaatgagtggtgcgagaagactcgttctgtgagttgttcacatccatacggaatcggctgcggcagtagaaagcccaaggacgtccgcaaatgctgccacatcaagtacaccagcgattggacagactgttcggtgcaatgtggcgagggcgtcaagaggaagaagcaaagctgcacgcgggtctacaagccggatgttccgggtacccgaaagcgccgagtgtacgatcaactgcaagtggaatgcctcggactggaggcgctgtcctgctgactgctcggaggagtaccaaacgcgtgatgtgcgctgcgagtccttccagggtgacggagtggaggacaagcactgcgatgccaagaagcgtccatccaagcgacgcatctgcaacaactgcgtgcgccggcagtcgagagtcatctcgcagtgcaactgtgagggtgtggagaagaggcgggacttctgcttcaactcgcacaagggtcgcatcgcgtgtcccacgagagccagggtggagcgtcacagctgcactccgccgccacattgccgaaggagaagtgccatcgggagcagcatcagcagcagaccgaggggcactggagtgagtagcagcaggagcttgaattcaatcggaggctcacggaatcgcggaacaccgagaagctgtgcggacctgaaggagatgcacggctacaacaaggatggcaactaccagctggaggtgagatcgcgaatggtgcacatctactgccacgggatgaacagcaggacgccacaggagtacgtgaacgtggatccgcaggagaactactccatatactacgagtacaggacgaaacagaccaacagctgtccgccggagtcgcgaggccacgagtactacaacgatcagaactccggccggacgcacttcagaaagctgcggctgaatatcaccgatctgcgcatcatggacaacgacttcaagttcgccgattcgcgaggattggctcagaagctgggatcagcgggcgattgctacaatcgcattggccagtgtccgcagggcgacttctcgattaacatgaaggacacggacttctccatacgaccgggaaccgtgtggcggatgcatggccagtactcggtcatgaagcgtatcagtgagtttgatacgaccacgcagatgcgaaggggattctgcggaggatactgcggcggttgctatatagcgcccgattctggcctttacctggacgtgttatga

SEQ ID NO: 12924 - protein, 1229 aa, DROSOPHILA
MPDGAANLHAVAHNLRSKRCANRIPHFSLSIFQLEVKKRCEWWCHKYIQKMSTHWRQNACLYACCIAFLLGMLIMFHLGLRSAHKGQEELPQSTHPLANSPPATPATLHPRRLDNDTSTDHEPPDGLDDLDEEEHSAFVMPTKVYNYSLSEADLIYESKRNSDINSFLKESASAFAMTGTYRNMSNEIWDPHPQYNLNVFGRQLHLVLRQDASFVHNHSMTHIRILKEGEEHPGPETEAEAEQRHLGCFYSGYVEDDPHSMVSVSLCGGMTGYIKTSFGALLIQPVNRTSSDEVLHRVFRKSQRNARHAVSKFELGLDDFMSKLEQVQEEEQKSKSRKLNRKKRHYADVDNQVYTLEVLIAVDNSMKQFHGEDLQPYILILMSIVSSIFADASIGNSIRILLVRLISLPNINDQTHSSNEMLKHFCQFINQSGYERDTAMLITREPICGSVPGKICHMLGLAELGTVCSSSSCSIVQDTGLPTAFTMAHELGHILNMNHDDDDKCMPYVTRQNNNKVLHIMSSVMGIHMHPWSWSKKTDKSCLETSVGAHIPYGTERLPGEIYSLDAQCQLSFGNDFGYCPTDEECKRLWCNRTSGNSNEQCASSNLPWADGTPCGSSGHWCQRGKCVSNKHGYGRQVNGGWGPWTPFTPCSLTCGGGVQESRRECNQPVPENGGKYCTGSRKKYRSCNTHQCPPGSMDPREQQCYAMNGRNMNIPGVNPDTKWVPKYEKDACKLFCRMDMKVTYFMLKSMVTDGTSCAVDSFDKCVNGICRPAGCDNELNSIAKLDKCGVCEGRNDTCHEVTGNLLVSNLLGLNDGNEPNKTLYYVTRIPKGASNIIITQRGYPDQNFIVLTDDRDNELLNGKFLKTYPLKFVYAGVTMQYTGSSSVVEQVNTTYSWKLSRDLIVQIISLDVSPSKRQDTVLLSYSYTIDKPPDYEAEVEIYRWEMQAPSNCDSLCEGRSHRLPACISTTQGVKVAPQFCDKSAMPKIDDRACNTDCRLNLTVTSISECSAACGELGTREKTYACVQTFTNMQRSNIVDMSYCKLKFDVAYHEECREGCWVLSEWSTCSKSCGTGSQQREAHCYLHNSRVSDDLCNPRTKPHLNTLIGICNTESCPTYTKSPNALAVSNWVIGEWGECNEWCEKTRSVSCSHPYGIGCGSRKPKDVRKCCHIKYTSDWTDCSVQCGEGVKRKKQSCTRVYKPDVPGTRKRRVYDQLQVECLGLEALSC

SEQ ID NO: 12925 - DNA, 5359 bp, DROSOPHILA
atccattcatcgaactcatctcttagttcggatagctcttgtcccccacagccacctcgatcgcaatccgttccaccccagtatccctatgccttcgggtatccgtatccatggtacatgccaccccctccacctgtcaatggtgagggagctccctggccatatccctattcatatccaccgccacctcctccacaatcgattgatggaaagcaggcagaaggatttccaccatatccctattactacccatattatccgcctcccttgccaccttatggacaacaacccggggaagctcagataccgccgggctatcctcagttccatgccatgccaccatatggtcacccgtatccctatccagtggctcccagttacagtcagagttccaccgaagagagcagagccagcagtgttctaccggatataatcatcactcccagtaccgatgatataccctcgcaggtcataatgaaacatcacatccgagtggagccacgagagccaccaaagcgggcgcactctgtggaaatagaggaggtagtcagcaaaccgaaagcccggaatatttgcaccaacaatcacgaggtcatcgatgtgctgagccaacgattggcaaatatcaacaagattgccagcggcaacacccaggcgaatctctccaagcagctacagaaaaactatgccggtgaacaagccaaagaactgggtgagagatctcccagcgaaaatgcctccaattcggatagtgaatcagaggaagagagcagcgatgacgaagaagatacccctaagctgggagctcgtccagctcccttgcagtccattaagtcggtgacaaatgtgcaggtgtacaagggtaaaacactggaacagcatttggactccgagagtagcgatgatgaagatgatgtgactacagcggatgaaatgtacgatgaagaggaacagatcgaggaggagcaagaaggattggtcgaggaaatggaagatgattacattgttgaggaggatcttagtgttatatacgaggaagagagtgaactggaacgtagcagtgaatatgccaagacagtcattcgaaaggatgactcccgatccaccatagttgatgatattgaaaagcaaatcgaagaaaatgatgatgacgatgacgacgaggagtccaactcggtaacagttcgtttgccactccgcttctccttcagtcgcagttcgaatgatgaaaacattgccactgtgcaagtcggtaatacaacacaaatcgaagaaaaacccatcatcgcgagctcgttcagtgtggccaaggtcgaaagtgatgatgaggatgatgactgtgaggtcagtgttaccatcagtttgtcgaactcttcacgttctaattctgtggagaaggttgcccaaccctaccgaccctccaatgcatatcccgtggaggatataagtacacccatcaaaactagtgaagaagatgtttccgcatcattctcccttggtatgcgtaacaaatttatgggtgaaacaattgccaatgatgttactaataatatatcccgggatcaggcaaaaccaaagaacgacgtcaccgaagttgagagctccccaaaagaggaattcgacttctttgccactttgatggccaccaaaatgcaggctcagaaaatgatggagcagtctaaaaacttttggaaaactcctgaccctaagatagtagaacccgcagctgagaagccaaaacttcgacctaaggagaatattcctgagacaaaaccaccaagaccaatatctggtgatatgtccaagaccgaggcttcgctggaggcagccaagaatagcttctggtccaccttcgctacgacctcaaaggaaacggagcccaaagcagagcaagaagatgcagctgaggaagtcgacttctgggcaagcatagaaaaaacctctgataaggaagaaaaacagtggaccaagaaaaagaagaccgtaacctatactcctttgaagaaagaggcagtaactacggtgcagcattggacaacaacgtttaaggctcacttggaatcgttaccaatgccccaaaaagccgaggtgcattttgtagttgaggaaaagaaaaaagaaattgaagaaccacaagaggagaatcagggtaaagaaaatgatttttggggctcagtaattcaggataagatggaaaacacagacagtgcaacgtgggaacgtacagaatacaactcagaaccttctcagggagttacagagcaacccaagcaacaggatgaggataacgttgacttctgggccaatattgaatcatctaataattgcgaagatgaagaaaagccccacaacatcagctatgatcccacaaaatatcctgaggagccccgcgaagtggatactgatgaggagattgacttctgggccgagatagaagccaaacgcaaaccaggagaagacgacgacgaagatgtcacgttccataaatcggcaactttctgggctcgcaaagaacgacagaactctgtagaggaaaccccttataagcctgtggaaatcaaggctttcagagctaagttacccgatgaagcagcagtagaaattgatgtttgggccaccctagaagcagccagaggccacgagcccgaaattgttgatcctgcggtggaagaggaaaaggttctggccgagcaatttgaggaacttaaacacgagagctcagatgaggaggaggaggttgcggaggaagaaaaggagttagagcagaagcctcgggatgaagtccaggaaagcaatctcagccatatggacaccatgtcactggcctcgatgcacgagccagctacagtctatacatgggctccaccaccacaggaagcagaagataatgaggaggaaactgatttctgggcggacatggaaaaggaacgatccaagaaggaacagttcgaggaggcggaacagaaacgacacaactaccgacaggccatggccttcttcaatacctccatcgatggtcagcagtcaccgccacaacaaaatgccagtcccaatcgcagcagtgttatcctggaagtcgaggagccacaagaagtaaacctgggaccacctggtgagtaccagataataggcgaagatggcgtcgtcgtggaggagcacaagccggagataacggaaacggatggtgatgagcgaggtgctgccactccaaccaatatggagccacaactaccagaggtctatgtggaacccgagccggaagtaaagcgccttgtcaacggacttcctgatcttgccgttgagaagtttagcgaaaaaccgaagatatcggtgcgtgacaggatcagcgcctttgaggtgattccctcggcgacaaatgatggcgccaagggactaaccaagcaatccctatcagtggatagtgcttatggcaagggaaccctctcgcgaaacagcagcactcagcgttccgagtcggagattgaggaggacgactccggggtaacggacatgaaccgtcagctgtctgagacggacacagagtccgagagttttccggagttgcgcaagatgaccagctaccagcgggcagccacacattccaggctctttaagctgttgcaggacgaaaacgatgttccggaagcgggagcccaacccgccgatgaatttcagttcaagcccagtcgcaggaagattgtccataatgtgtccattactagacggcaaaatccaggagctctaaatgaagcagagaccatgacgcagcgcagggaacgactttcgctgccgcttcgcaagaataccagcatcgatgcggacaatccctcgaccccaaatagtcctgcctcccccataatgggaccgtcggccaagaaccaacgtgtggttagcgataagttggtaaatgaattggtccagagcctgctgcttaaaagcgacagttcgcatttgagaaatctgcccatggaacgtcttcaggcagccgccaaacgagccctggtggaggagatggactccgcgcaggagaacagctcgctggacagcacgccggcacccacgccgaagcatgacaaggagtattcggactactacaacagctggtgcgacgccagtggcagtggcgacgaggtgttgccatccaagagcttccgtgctctgcaagatccaagacgcagtccttggacggtgcgttgtccgcgagttctcagctccaagacgataaaccgggacttggcccgggttacagaatcaccggaaatagccaatggacggggcagcaaaagtcccgaatgcttccgtcagaactcacactcccagtctcgggaacgatccgtcagcagttggcggagagtttaggatacggcaacgaattgccttttgtatataacagggcgggtctatagtctttagcagggatgtgagacctgttcaaatggaaaaaaagaatctcgtgaggagaatctgagaatcaaacgaaatgtaaagcgaaccttaatcgaaacagggaatgttttcagtaactaacatcctatttctggttagatattattatccagtatctaggagggttaggctagcagctaagcgctccagagccggatttcactcccgaacttctcgtaaactaagaaactactgcatttggccgaaagagtcactgcctctgggaatgtgtgataaaaaaaagagccagattttgcatttcatatctcaccatcattgaactatccgcacacattgtacattatgaatatcgaatacactcaacacattaataaactaaatctaattaaacatgtaaataaaccaattgaaaccaatgaaaggaaatcgttcattcgttcgttcgtttgttacctcagtaaagcgcaaacccaaaaaaccaaccgaaatcattttctaaacttacatgagtattttaaaatttgtaagccgtaactcatgaaatcgaaccaaataataacaagcatataaaactgaaaaaaaaaaactatcaagcgccacaataaacaacaaaataaaaaccaatttcatctcaactcaatgattttgtaaaactcgttcaaaatcctaaggtacctaaaattgcaattattaaaaattacccaaaaccaagttttaactaattgaatgttttcataatattccaaaaattgtcctctttctattctatgtatttaattttattttcgccgctgtttgactttattatgtgtgccgtattcttatttttgatttgtctataaaaatatttgcgatctttgcaattgaagtcgaacaaattaactcaggtttgtatgcgcaaataatcaacaaataatttaaagtaaatactatgagtaaatgcatttaccat

SEQ ID NO: 12926 - DNA, 4242 bp, DROSOPHILA
atgccaccccctccacctgtcaatggtgagggagctccctggccatatccctattcatatccaccgccacctcctccacaatcgattgatggaaagcaggcagaaggatttccaccatatccctattactacccatattatccgcctcccttgccaccttatggacaacaacccggggaagctcagataccgccgggctatcctcagttccatgccatgccaccatatggtcacccgtatccctatccagtggctcccagttacagtcagagttccaccgaagagagcagagccagcagtgttctaccggatataatcatcactcccagtaccgatgatataccctcgcaggtcataatgaaacatcacatccgagtggagccacgagagccaccaaagcgggcgcactctgtggaaatagaggaggtagtcagcaaaccgaaagcccggaatatttgcaccaacaatcacgaggtcatcgatgtgctgagccaacgattggcaaatatcaacaagattgccagcggcaacacccaggcgaatctctccaagcagctacagaaaaactatgccggtgaacaagccaaagaactgggtgagagatctcccagcgaaaatgcctccaattcggatagtgaatcagaggaagagagcagcgatgacgaagaagatacccctaagctgggagctcgtccagctcccttgcagtccattaagtcggtgacaaatgtgcaggtgtacaagggtaaaacactggaacagcatttggactccgagagtagcgatgatgaagatgatgtgactacagcggatgaaatgtacgatgaagaggaacagatcgaggaggagcaagaaggattggtcgaggaaatggaagatgattacattgttgaggaggatcttagtgttatatacgaggaagagagtgaactggaacgtagcagtgaatatgccaagacagtcattcgaaaggatgactcccgatccaccatagttgatgatattgaaaagcaaatcgaagaaaatgatgatgacgatgacgacgaggagtccaactcggtaacagttcgtttgccactccgcttctccttcagtcgcagttcgaatgatgaaaacattgccactgtgcaagtcggtaatacaacacaaatcgaagaaaaacccatcatcgcgagctcgttcagtgtggccaaggtcgaaagtgatgatgaggatgatgactgtgaggtcagtgttaccatcagtttgtcgaactcttcacgttctaattctgtggagaaggttgcccaaccctaccgaccctccaatgcatatcccgtggaggatataagtacacccatcaaaactagtgaagaagatgtttccgcatcattctcccttggtatgcgtaacaaatttatgggtgaaacaattgccaatgatgttactaataatatatcccgggatcaggcaaaaccaaagaacgacgtcaccgaagttgagagctccccaaaagaggaattcgacttctttgccactttgatggccaccaaaatgcaggctcagaaaatgatggagcagtctaaaaacttttggaaaactcctgaccctaagatagtagaacccgcagctgagaagccaaaacttcgacctaaggagaatattcctgagacaaaaccaccaagaccaatatctggtgatatgtccaagaccgaggcttcgctggaggcagccaagaatagcttctggtccaccttcgctacgacctcaaaggaaacggagcccaaagcagagcaagaagatgcagctgaggaagtcgacttctgggcaagcatagaaaaaacctctgataaggaagaaaaacagtggaccaagaaaaagaagaccgtaacctatactcctttgaagaaagaggcagtaactacggtgcagcattggacaacaacgtttaaggctcacttggaatcgttaccaatgccccaaaaagccgaggtgcattttgtagttgaggaaaagaaaaaagaaattgaagaaccacaagaggagaatcagggtaaagaaaatgatttttggggctcagtaattcaggataagatggaaaacacagacagtgcaacgtgggaacgtacagaatacaactcagaaccttctcagggagttacagagcaacccaagcaacaggatgaggataacgttgacttctgggccaatattgaatcatctaataattgcgaagatgaagaaaagccccacaacatcagctatgatcccacaaaatatcctgaggagccccgcgaagtggatactgatgaggagattgacttctgggccgagatagaagccaaacgcaaaccaggagaagacgacgacgaagatgtcacgttccataaatcggcaactttctgggctcgcaaagaacgacagaactctgtagaggaaaccccttataagcctgtggaaatcaaggctttcagagctaagttacccgatgaagcagcagtagaaattgatgtttgggccaccctagaagcagccagaggccacgagcccgaaattgttgatcctgcggtggaagaggaaaaggttctggccgagcaatttgaggaacttaaacacgagagctcagatgaggaggaggaggttgcggaggaagaaaaggagttagagcagaagcctcgggatgaagtccaggaaagcaatctcagccatatggacaccatgtcactggcctcgatgcacgagccagctacagtctatacatgggctccaccaccacaggaagcagaagataatgaggaggaaactgatttctgggcggacatggaaaaggaacgatccaagaaggaacagttcgaggaggcggaacagaaacgacacaactaccgacaggccatggccttcttcaatacctccatcgatggtcagcagtcaccgccacaacaaaatgccagtcccaatcgcagcagtgttatcctggaagtcgaggagccacaagaagtaaacctgggaccacctggtgagtaccagataataggcgaagatggcgtcgtcgtggaggagcacaagccggagataacggaaacggatggtgatgagcgaggtgctgccactccaaccaatatggagccacaactaccagaggtctatgtggaacccgagccggaagtaaagcgccttgtcaacggacttcctgatcttgccgttgagaagtttagcgaaaaaccgaagatatcggtgcgtgacaggatcagcgcctttgaggtgattccctcggcgacaaatgatggcgccaagggactaaccaagcaatccctatcagtggatagtgcttatggcaagggaaccctctcgcgaaacagcagcactcagcgttccgagtcggagattgaggaggacgactccggggtaacggacatgaaccgtcagctgtctgagacggacacagagtccgagagttttccggagttgcgcaagatgaccagctaccagcgggcagccacacattccaggctctttaagctgttgcaggacgaaaacgatgttccggaagcgggagcccaacccgccgatgaatttcagttcaagcccagtcgcaggaagattgtccataatgtgtccattactagacggcaaaatccaggagctctaaatgaagcagagaccatgacgcagcgcagggaacgactttcgctgccgcttcgcaagaataccagcatcgatgcggacaatccctcgaccccaaatagtcctgcctcccccataatgggaccgtcggccaagaaccaacgtgtggttagcgataagttggtaaatgaattggtccagagcctgctgcttaaaagcgacagttcgcatttgagaaatctgcccatggaacgtcttcaggcagccgccaaacgagccctggtggaggagatggactccgcgcaggagaacagctcgctggacagcacgccggcacccacgccgaagcatgacaaggagtattcggactactacaacagctggtgcgacgccagtggcagtggcgacgaggtgttgccatccaagagcttccgtgctctgcaagatccaagacgcagtccttggacggtgcgttgtccgcgagttctcagctccaagacgataaaccgggacttggcccgggttacagaatcaccggaaatagccaatggacggggcagcaaaagtcccgaatgcttccgtcagaactcacactcccagtctcgggaacgatccgtcagcagttggcggagagtttag

SEQ ID NO: 12927 - protein, 1413 aa, DROSOPHILA
MPPPPPVNGEGAPWPYPYSYPPPPPPQSIDGKQAEGFPPYPYYYPYYPPPLPPYGQQPGEAQIPPGYPQFHAMPPYGHPYPYPVAPSYSQSSTEESRASSVLPDIIITPSTDDIPSQVIMKHHIRVEPREPPKRAHSVEIEEVVSKPKARNICTNNHEVIDVLSQRLANINKIASGNTQANLSKQLQKNYAGEQAKELGERSPSENASNSDSESEEESSDDEEDTPKLGARPAPLQSIKSVTNVQVYKGKTLEQHLDSESSDDEDDVTTADEMYDEEEQIEEEQEGLVEEMEDDYIVEEDLSVIYEEESELERSSEYAKTVIRKDDSRSTIVDDIEKQIEENDDDDDDEESNSVTVRLPLRFSFSRSSNDENIATVQVGNTTQIEEKPIIASSFSVAKVESDDEDDDCEVSVTISLSNSSRSNSVEKVAQPYRPSNAYPVEDISTPIKTSEEDVSASFSLGMRNKFMGETIANDVTNNISRDQAKPKNDVTEVESSPKEEFDFFATLMATKMQAQKMMEQSKNFWKTPDPKIVEPAAEKPKLRPKENIPETKPPRPISGDMSKTEASLEAAKNSFWSTFATTSKETEPKAEQEDAAEEVDFWASIEKTSDKEEKQWTKKKKTVTYTPLKKEAVTTVQHWTTTFKAHLESLPMPQKAEVHFVVEEKKKEIEEPQEENQGKENDFWGSVIQDKMENTDSATWERTEYNSEPSQGVTEQPKQQDEDNVDFWANIESSNNCEDEEKPHNISYDPTKYPEEPREVDTDEEIDFWAEIEAKRKPGEDDDEDVTFHKSATFWARKERQNSVEETPYKPVEIKAFRAKLPDEAAVEIDVWATLEAARGHEPEIVDPAVEEEKVLAEQFEELKHESSDEEEEVAEEEKELEQKPRDEVQESNLSHMDTMSLASMHEPATVYTWAPPPQEAEDNEEETDFWADMEKERSKKEQFEEAEQKRHNYRQAMAFFNTSIDGQQSPPQQNASPNRSSVILEVEEPQEVNLGPPGEYQIIGEDGVVVEEHKPEITETDGDERGAATPTNMEPQLPEVYVEPEPEVKRLVNGLPDLAVEKFSEKPKISVRDRISAFEVIPSATNDGAKGLTKQSLSVDSAYGKGTLSRNSSTQRSESEIEEDDSGVTDMNRQLSETDTESESFPELRKMTSYQRAATHSRLFKLLQDENDVPEAGAQPADEFQFKPSRRKIVHNVSITRRQNPGALNEAETMTQRRERLSLPLRKNTSIDADNPSTPNSPASPIMGPSAKNQRVVSDKLVNELVQSLLLKSDSSHLRNLPMERLQAAAKRALVEEMDSAQENSSLDSTPAPTPKHDKEYSDYYNSWCDASGSGDEVLPSKSFRALQDPRRSPWTVRCPRVLSSKTINRDLARVTESPEIANGRGSKSPECFRQNSHSQSRERSVSSWRRV

SEQ ID NO: 12928 - DNA, 5054 bp, DROSOPHILA
aggaactttttgatttcatcaccgatcagactataaccacagagaacatggaggagtgcctggaacgcatatctgagcgaatcaaggaccgcgatttcgatgccatctcggctcaggagaagatcgatgaggctgtttggcagaacacctacattcccaaaaggttggacgaggtatgtttgcgccgtgatttaaaaatcaatgtcacattacaaattcgtattccgcttctaggtgcgccattttgagagagatgtagccaaggccaagcaaggggtgcagcaaaatctcatctacggaaagatcactggtctgacttcggatctggacgtgcagcaaaagccagacgtgctgcaatcctcgaccgccaaagaggatgacggtagtgaggcccaaacgagcggcagtgaggacgaagacaactcgcaggataacgacaacgatgaagatgccaagaagtttaagaattcggcaagaccacgagaagagtctccggagagtaaaaaggctcgcaaaaaggccgtcaaagatgcgaaagccgagcagcgcaaggttaaagtgaaaaagcacgtgaagaaacgcaaagagaaaatgggcagcatgaaaaaataggattgtttctgaatagagttaatatagctgtgagtttaagttctaaatattttatgcaagttttgtaacttggctccatcgtatataatgaaattatataaaaacgatgtagctaatcattttcttatggtattactataccaaatggctgcggggaacgccgcagctataaatgaaatattaaacacactacgttactagtattctaatcgaattttcggttaatattaagtaatatatctaaaggaataagtgtacctttagttgctccactttatttgtttttaaataaccaccgcatccatagaaaggcgtgaaatcgtaaattaggtgaagttcctagttgcagttgctacgaatcgcttagtttcgtcgcagtctttcagcaatgttgcttaaaatacttgtattgttttgcacattattatcggcaaaattggcagaatcctttgtgaaaccactgcgctataatttgacaattcttacgcgcctggggagtgaagatgagcagaaccagtttgagggcatcgtgtccatcgatattgaagcgacacaaccaactcgcgtcatctatttaaattctctcaacataacaatatctagacaaagaacatggatataccgatgggctagcggcagaaaaatcggtgctctccagataaagagaattattaaaaagaccagcttaattaagatagtaatcgaactcccactcagaagtggcgagatatacacactcaacatgttattctcgggtaacctagatcggagtcagcaatatggctactttgccggctactacgacaaaacgccgagggttttctactccgcgactcgcttggaaccggactatgctcacaccgtgtttccctgcttcgatgacccacgctttcggaccccatataacataacattagtgcacgaccggaaatacgttgcactcagcaatatgccacccgtagaggagaaaccatagttagtaaatcctttagagaacccatatttataatactaaagttatgtatgtgtttctatacttgcagcaaggagatcgaaaactatgtgtcgacgacatttatgggttcaccaccgctagccacacagcaggtcatgtggactcttcatcaattagagaaagtttacagtggtcctgcggctgcgggtgagaatatcaccgtctggtcacggccgcacttggcagagaaactggcgaaggtgccggaaatgacgcccaatttgtttagtaaatacgaaaccttgttcgcatatccattgccaaaaggagcagattggggtggtaaggtcgatcatgtagtgttgcctagatatacagaaatgtatagcggtcagggcataatggtgtacggcgaggatatcgtggactcaggacaaaacggtcttgaaagcctgcaggaaacgcttgcggagctggtagcgcggcaatggaacggattgctggtgaacctcgaagattcggatgaagaatatgtgcggaacggcattaactactatctgagcgtccaggtgatggccatggacaaagaggcgtataacacgactcacctttcaaaaacgcgtctagatgttttgtatcatgattccttggccaaagtaaaatcgatcgctaccgatgtgaaggaatccggacaccagaaactccgcaaaaagaaaatgtgtctgctcatccacatgctaaaggtggccctcggtgataagttgttcttgaagggactgcaagagttctttaagcgatacgccaactcatctgcttcatccaaggaactgtgggaggagttccagcgaggggcacgccgaagtcaccaactgcccaccggtgtgagtttacccactgtgatggagtcatggatgaagcaaccaggtttcccgctactcaccgtccagcgcgacgatgcgaagcaaattgtgaccataacgcagagtcgctattatcagaaatatttggacaacagttccaatgactgctggtgggtcccggtcgcttacatcgtcaggaatcttacgttgcctcaggtggagtggctcggctgtcagaaaaatagtagagatatattggaactcagccacatcgctaatccggaggattggctattaataaatgtggatgctgcagttcctcttcgcgtcttctacgattcatacaacttgcagctgatcagtgaggctctgcgtcaggatttcacccagattccggagcttagtcgcatccagttggtcgatgatgccctcagtctatcgtggtcaggtcggttgccgtataacgtcaccttaaacgtgatctcatatctttcgaatgagaccagcgttttggtttgggaaacagcgcttttgaatttggagaagctacagagtatcatgcgaatgactacgggctttcgtatctttaaggtgggagctaccaaattaaacttaattttgaatctatatctatctaatatgaacctaactttttcttagctttacatgcagaaacttattgagccagcttttaaaacaacattaaattccctctcaacaaaagccagaactggttcggaaataccgatcaatacgaaatcgccggtcaccacggagtcctcgggcaccacagaatccccggacaccacggaatccccggacaccgcggaatccccggacaccacggaatcctcgaacaccacagaatccccggacaccacggaatcctcggacaccacagaatccccggacaccaccaaatcggatttgtcgttgtcggcgattttataccggctggcgtgtcagttcgaaatcaaggaatgcctaacggacgcacagcagcgatttcaggcggcgatggaccagaaatctagctcatccattccggaggagattcgggaaatcgtgctctgcaggggcattcgtaacggcttggaggttcattggataatggtgcgggatatgttctttgagtccgagaatgataaggagaggagtatccttctaaattctctcagctgcaccacggagtattgggcgatgcagaagttgctcagctgggcgcttgactcaaaaaaggttccaagaacgatgacagccagtcttctgagcgccgttttgagatccccattgggctactatgtgggcaaacagtttctcattgaccattctaaggaaattctgcgaaggtaagtatttaaaatcttttaagataactttaaaaaactgaaaatgaatattcaaactactccagcaaggacgttaaattgattttgaccccgtttatcaatgcgatgtctacaaaagctgaattttcggcgctgaacgatcatttgcataggaaccttccatcctcaatggtttctggcttatcatccacgttggagtctggtttagatagagtgaattggcgaaataacttgtactttgatctgcttaaagccattcgagattttactctggatgatggtcccaaaaacagttctgattcggactccaattaactaattgttaaatcaataaaaatagtagttacacaaggttgaatcgtcaaaacatgggttttattcttgtacaattcgaattgatattactttaaccacaaaaaatgtaaaaaatgtgcagccgtctccttgcaaacaacttggggattgtcgtatcatttagattttaaccgaaatgttatcaatatacatttcgctaatctcaagatttcttcgcaacgtttgcattatatccgtgcaaataatttggcttttaaaaggcatttgtgtatgtgaactatatcctaacttaagctatcttatgtttatgttaacctttgttctttttcatgggaatggtgcataagtatgtacaggaagtatctatctgtctgtttaaaatcgaacatcacagcattgacattgcctaaagctagggataagattcatctggaatattggtttcaaaatcaggcatagcatcgctttcgcaggctgatgtacatcatcactcggaagaacagcatcagcatggccagcaatccgaactgatggagcatcgacaccttttccacatccaaaaatttgagcagcacgcgaggatcgctaaaatgacagtatatcgcatcgcagtcgagttcttcccgctgaaatccgaagacggctaaaaccaacgaaaccacgcccacacgcacatagctgaatttcatcagcagttgcattccgccggatacctgcggcgcaaagtcaaatccgtagacggccaaacccatcagaggagctattagcatcggacccaccacactgccattctgcaatgagaatgaagagttttagcccaaaagtatacctcgtatgcggataggaaactcaccgtaatgctgaaggtggctccaattgccaggcccattccctcggccaccaatgagatcatcaaacccacagccacaaaaatgcagaagcgccagaactgctgcggcaatc

SEQ ID NO: 12929 - DNA, 2664 bp, DROSOPHILA
atgttgcttaaaatacttgtattgttttgcacattattatcggcaaaattggcagaatcctttgtgaaaccactgcgctataatttgacaattcttacgcgcctggggagtgaagatgagcagaaccagtttgagggcatcgtgtccatcgatattgaagcgacacaaccaactcgcgtcatctatttaaattctctcaacataacaatatctagacaaagaacatggatataccgatgggctagcggcagaaaaatcggtgctctccagataaagagaattattaaaaagaccagcttaattaagatagtaatcgaactcccactcagaagtggcgagatatacacactcaacatgttattctcgggtaacctagatcggagtcagcaatatggctactttgccggctactacgacaaaacgccgagggttttctactccgcgactcgcttggaaccggactatgctcacaccgtgtttccctgcttcgatgacccacgctttcggaccccatataacataacattagtgcacgaccggaaatacgttgcactcagcaatatgccacccgtagaggagaaaccatacaaggagatcgaaaactatgtgtcgacgacatttatgggttcaccaccgctagccacacagcaggtcatgtggactcttcatcaattagagaaagtttacagtggtcctgcggctgcgggtgagaatatcaccgtctggtcacggccgcacttggcagagaaactggcgaaggtgccggaaatgacgcccaatttgtttagtaaatacgaaaccttgttcgcatatccattgccaaaaggagcagattggggtggtaaggtcgatcatgtagtgttgcctagatatacagaaatgtatagcggtcagggcataatggtgtacggcgaggatatcgtggactcaggacaaaacggtcttgaaagcctgcaggaaacgcttgcggagctggtagcgcggcaatggaacggattgctggtgaacctcgaagattcggatgaagaatatgtgcggaacggcattaactactatctgagcgtccaggtgatggccatggacaaagaggcgtataacacgactcacctttcaaaaacgcgtctagatgttttgtatcatgattccttggccaaagtaaaatcgatcgctaccgatgtgaaggaatccggacaccagaaactccgcaaaaagaaaatgtgtctgctcatccacatgctaaaggtggccctcggtgataagttgttcttgaagggactgcaagagttctttaagcgatacgccaactcatctgcttcatccaaggaactgtgggaggagttccagcgaggggcacgccgaagtcaccaactgcccaccggtgtgagtttacccactgtgatggagtcatggatgaagcaaccaggtttcccgctactcaccgtccagcgcgacgatgcgaagcaaattgtgaccataacgcagagtcgctattatcagaaatatttggacaacagttccaatgactgctggtgggtcccggtcgcttacatcgtcaggaatcttacgttgcctcaggtggagtggctcggctgtcagaaaaatagtagagatatattggaactcagccacatcgctaatccggaggattggctattaataaatgtggatgctgcagttcctcttcgcgtcttctacgattcatacaacttgcagctgatcagtgaggctctgcgtcaggatttcacccagattccggagcttagtcgcatccagttggtcgatgatgccctcagtctatcgtggtcaggtcggttgccgtataacgtcaccttaaacgtgatctcatatctttcgaatgagaccagcgttttggtttgggaaacagcgcttttgaatttggagaagctacagagtatcatgcgaatgactacgggctttcgtatctttaagctttacatgcagaaacttattgagccagcttttaaaacaacattaaattccctctcaacaaaagccagaactggttcggaaataccgatcaatacgaaatcgccggtcaccacggagtcctcgggcaccacagaatccccggacaccacggaatccccggacaccgcggaatccccggacaccacggaatcctcgaacaccacagaatccccggacaccacggaatcctcggacaccacagaatccccggacaccaccaaatcggatttgtcgttgtcggcgattttataccggctggcgtgtcagttcgaaatcaaggaatgcctaacggacgcacagcagcgatttcaggcggcgatggaccagaaatctagctcatccattccggaggagattcgggaaatcgtgctctgcaggggcattcgtaacggcttggaggttcattggataatggtgcgggatatgttctttgagtccgagaatgataaggagaggagtatccttctaaattctctcagctgcaccacggagtattgggcgatgcagaagttgctcagctgggcgcttgactcaaaaaaggttccaagaacgatgacagccagtcttctgagcgccgttttgagatccccattgggctactatgtgggcaaacagtttctcattgaccattctaaggaaattctgcgaagccattcgagattttactctggatga

SEQ ID NO: 12930 - protein, 887 aa, DROSOPHILA
MLLKILVLFCTLLSAKLAESFVKPLRYNLTILTRLGSEDEQNQFEGIVSIDIEATQPTRVIYLNSLNITISRQRTWIYRWASGRKIGALQIKRIIKKTSLIKIVIELPLRSGEIYTLNMLFSGNLDRSQQYGYFAGYYDKTPRVFYSATRLEPDYAHTVFPCFDDPRFRTPYNITLVHDRKYVALSNMPPVEEKPYKEIENYVSTTFMGSPPLATQQVMWTLHQLEKVYSGPAAAGENITVWSRPHLAEKLAKVPEMTPNLFSKYETLFAYPLPKGADWGGKVDHVVLPRYTEMYSGQGIMVYGEDIVDSGQNGLESLQETLAELVARQWNGLLVNLEDSDEEYVRNGINYYLSVQVMAMDKEAYNTTHLSKTRLDVLYHDSLAKVKSIATDVKESGHQKLRKKKMCLLIHMLKVALGDKLFLKGLQEFFKRYANSSASSKELWEEFQRGARRSHQLPTGVSLPTVMESWMKQPGFPLLTVQRDDAKQIVTITQSRYYQKYLDNSSNDCWWVPVAYIVRNLTLPQVEWLGCQKNSRDILELSHIANPEDWLLINVDAAVPLRVFYDSYNLQLISEALRQDFTQIPELSRIQLVDDALSLSWSGRLPYNVTLNVISYLSNETSVLVWETALLNLEKLQSIMRMTTGFRIFKLYMQKLIEPAFKTTLNSLSTKARTGSEIPINTKSPVTTESSGTTESPDTTESPDTAESPDTTESSNTTESPDTTESSDTTESPDTTKSDLSLSAILYRLACQFEIKECLTDAQQRFQAAMDQKSSSSIPEEIREIVLCRGIRNGLEVHWIMVRDMFFESENDKERSILLNSLSCTTEYWAMQKLLSWALDSKKVPRTMTASLLSAVLRSPLGYYVGKQFLIDHSKEILRSHSRFYSG

SEQ ID NO: 12931 - DNA, 2867 bp, DROSOPHILA
aactgctggaaatgggggaaatggtgctgctgctcttgggcaccgaggaggaagttcgtgtcctgcgtctgaagaggagcaactgtagtctcaccgattggcaatccgtgctaccagcagatgggcgccttatgaagttggttcgaatgggggtagagtcccgacaggatctaatactcaccagtggcatgagtaatcatcgtcctgtcctggccatccattatagggatcccttaaatcataacttcaaaatgcttcagctgatccagggctcatatgacctggcagagatgcagggaaaccaacttctggtcagctgtttgggttgtcgacacatagctatctttaaacggtactctcattccgcggaaattctgtttgagcccatccagcagttgagcttccaggagcgcattcaacaactaactccattcaaagttggaaatgagcaatatctattggtagtaacgcagccggaggaagaacacttttacctcttcagctataatgaagtaggcggttggcaacagcgtacgtttggcattaagaaacaggaccagtgggcgtggtcactggtgaaatctggtcaaatgcttgaagccgccgagacccctattctgctgctctgcggaaagaaacgggaatgtagtctagtgaaagccctactgggctaaaatctgtatcatattgtaatctatgtgtatttgtactgtacataattatgtttattctatgtatcttaataaattgtttatttttgttgaatcaaaattgtattatttctttgggaacgcaaagttaacatatatcattggacttatatcttactagcacatctttacagcatagtttaaaaatgtcaggtgctaatatggcttaagaagattattccactcattggatcggatcgagattatcacactcctcggcattacactactgaaaggccttggatatcttacttggctagtttcccccatgtttcagatctcaaggcatcttaggttgaaaagctctttctgctgatggtgatcacgtagccggtgaataccaagaatcccaagatgccccagatggagctattttgattgccaccgtccccaatcttggccagtatccactccacatggctagccacgtcctcgaaggctccgtcgatgcttcttaggcccaacaaacgatcccgttccgtcagcgtggcaccggcatccatgtaaagccggccacgaatgtagttgctggttttcggctggacacaaatccttggcgatttactctgatgctgatggcaggatgtgtgagtggcattcaatgtgaccagatcgtgcagctcgcgaatatcgccatcatagccccaggtgttaatctgtagaagattatgatgatccgagtccaggatggaagtggctccaggagtaggtagaccaattgcttgaatatatggaagattctcaggcacatccttgtccagcataagaatggcaagagccaggtcctttggaggctggtggatgtgggtcactccgaatacgagtgcctgctcattgggcgcaaatctctgggggcttccgagcacaactcgcagttctgacggatggtagtatgactttttcacttggctgttaaggtgaattaaattgtgagatagcagctcgagaataaaaagatacaaattttactcaactcacctgaagatgcagctagtgacggttagcacaacagagggcgccactaaagcgcccgaacagatgtggcccttgccaaagtagtcccgttccaaggtcaacagtcgtatggatgcctggtgtggagccaccatcttcagctgaaatccttcctttccattttcagctgcaatggcatccatttcggccaggccaataccacgtttggcggccaaatcacgatgggtgtaggctgcgtatggagcaggtaattaatacatataaataaaatgccgaggtgaaggttaagcaggaaggctgattggcccgccaatcgagatccgatccgatcggatccgatccaatccccaatccaatccaatccaatggaaacagtctccgagtgcagttggcgttatcacccaccaccacctatcagcaatcgacgcctggtcagcgccccgatcgctccctgatatcagctgctggccagtgcacaagccccggattcgacccgatcaggccaccactgccattcccggcgtgatcacagatatgatagtatggtatctttagacccggccacgggccgactaagctaaacccaatcgaatcgaactaaacccactccaaaccatttaccccggaagtttggagcgatcacgcgatgatggatagccaattgatcaatttaaagtgacgcactaaaggcggtcagcaatttggataatcgttggattatggccaaatacactaggtactgtggtacataataaacattagttttataaatgtacactgatattaatatcataaataaataagcatgcgtaatgggtcacgtttcattgaagcaagaaaatttcccattgtaaaacgtataatattagaatttatgactacttgaaatttatatttagaaaaatttcggttatcagttgatctttagggtcatcaaaacaaatgtttgcaatgcttgtttaattgcgaaacaaaatacagtgagctataaaagttttaatctaatgcgaaaacaaacttttatatcactctgatttctcaggtcccatgatataataatcactgttatttgcaatcccataagatacttataaccattgcattgcttacttgcaatttcttttgaagtttccactatcagttttcatgttataactgatcaagtacccattgaaaagtgca

SEQ ID NO: 12932 - DNA, 798 bp, DROSOPHILA
atggatgccattgcagctgaaaatggaaaggaaggatttcagctgaagatggtggctccacaccaggcatccatacgactgttgaccttggaacgggactactttggcaagggccacatctgttcgggcgctttagtggcgccctctgttgtgctaaccgtcactagctgcatcttcagccaagtgaaaaagtcatactaccatccgtcagaactgcgagttgtgctcggaagcccccagagatttgcgcccaatgagcaggcactcgtattcggagtgacccacatccaccagcctccaaaggacctggctcttgccattcttatgctggacaaggatgtgcctgagaatcttccatatattcaagcaattggtctacctactcctggagccacttccatcctggactcggatcatcataatcttctacagattaacacctggggctatgatggcgatattcgcgagctgcacgatctggtcacattgaatgccactcacacatcctgccatcagcatcagagtaaatcgccaaggatttgtgtccagccgaaaaccagcaactacattcgtggccggctttacatggatgccggtgccacgctgacggaacgggatcgtttgttgggcctaagaagcatcgacggagccttcgaggacgtggctagccatgtggagtggatactggccaagattggggacggtggcaatcaaaatagctccatctggggcatcttgggattcttggtattcaccggctacgtgatcaccatcagcagaaagagcttttcaacctaa

SEQ ID NO: 12933 - protein, 265 aa, DROSOPHILA
MDAIAAENGKEGFQLKMVAPHQASIRLLTLERDYFGKGHICSGALVAPSVVLTVTSCIFSQVKKSYYHPSELRVVLGSPQRFAPNEQALVFGVTHIHQPPKDLALAILMLDKDVPENLPYIQAIGLPTPGATSILDSDHHNLLQINTWGYDGDIRELHDLVTLNATHTSCHQHQSKSPRICVQPKTSNYIRGRLYMDAGATLTERDRLLGLRSIDGAFEDVASHVEWILAKIGDGGNQNSSIWGILGFLVFTGYVITISRKSFST

SEQ ID NO: 12934 - DNA, 3340 bp, DROSOPHILA
ctgaattttaaacgggtcaaagacctgaacagggccacatatgccgagggtaatgccaccagcattcagtttcatccaaccagtactgctgctctagtggcgggcatgaatggcctagccaccatctacgccgtggatgggcaaaagaacgaaaggttgcacaacatgcgcttcaagaagttcccgctggcgtgctccagaattgctccatgcggcacaagggcgttctttggttctgtgaaaccattctactactcctacgacttgctggaagccaaggaatcgaagctaaagctgccgggcgcaatggaatttatgcaccgctttgaggtgtctccatgtggcaaatttatcgtcactgctggcaagtttggagccattcacctgctcacggccaaaacaaatgagctgctgcacagcttcaagcaggagggcaaagtgaagggattcacatggtctagtgactccaagaggatcctcgtctgcggttccacttccaatgtcagcgtgctgaacctgcgccagaacctcatcgagcacatcttcatggacgacggctgtatacatggagagtccattcaactgtctcccaaccaacgcctactggccaccggcagtcaagagggcgtggtcaacatctacgactacgagagcattttcgcatccaaggccccacaacccgagaagcgcttcatgaacctacggactgccatcacggatctccagttcaatcactcatctgagctactggcgatgtgctccagtgaggcgccgaatgcttttaagctggcccatttccccagcgccactgtgtactccaatttcccggcacagaacgagaaggttggctttgtgacctccatggccttttcgccgcacagcagcttcctggcctttgccactaagggcaaacaggtgccgctctttaggcttaagtacttcaagggttattaattgaaggcagtatgatgtttacaataaattcttaaataaaatcattactctttctgtggttacaatggaaccatctttatttaagttaacaaattaaggggacttatctttagaaaggagctcggaaaatatcgcgtttctgggagtcttgaatcttgccaatgtcttccagcttcttgctgatgttcgtcgactgcgattcgatccactgcaacgaattcatatgggcattaaggatttttccgatctgtatgatgggatcagtggtgtcctggcccttgttggcctcgttcaagttgtctattatctcctttagatcctcggacatctgcttcagttgtgtgtccagattctccaccatcaggtaggtttggctgcgttccatgtccaccctcgggagattaacgaattccttctcaagcggtcccaggctgtcctcaagctctttttgctgcgtggctataaactccagctcctggtccagcacttgctgatcggttttcacttttttcacggcatcgttgagctcgacgatcttcccgttgttgctgatgagcagtttgtcccatgcgttgatctgagtggcctgttcggtgaataccttttcctgttcctcgaactcgagagtccacttgttgatatgctcctcaagttggtggtaggacaattgggatgccgtggaaacggccgatgagtctgtggtcttggtttcggtagtgagattggcaaaagcaccaccagtacttaaagttggggccggtgcagctccctgcgtggaggctatggccgacggagctgcagtcagagttgtggacgcagcggccgtggtcttgggagctcccaatccagacccgcccagcaatccagttgtggtagctgcggtgttgggtgcactggttgctatagttggcaccacagatgccgctggttgagccgtaaagcctccgaaggcgggaggagcagcagaggttccagtcgcggtcgcagaagtggtggacgctggatttgcggcggcttgagtgcccagcgtgaggggagctgaagcagtcccggatcccaggccaaatccaaaggctggtggagcctgcgccttgctgttgtctgcatctccgccaccgataccagcagtaggtgccggtgttccgaaagagaatgtggtttttgtggcgggagccgtggttgctgctcctgaagctggtgctgcggctggtgttcctgtgctgaggccgaaggaaaacgacgatgttgcgcctccggtcggggcggcggttgttgttggcaactggaataccatgcttaaacttaagacgaataatataaatctaaatcaaacgaaacacgccaaaagcaaccagtgtgacccctccttggagttccgcaatgttgtcggtgttggaaatcaactaaatttgagctcaagctagctattttcaagccaaaacacttagcagtttgaagattgggcggcaaaattaaattttaaatttctttgaattggcaatacaaatgaagtactttgctcagtcgacgatacatttttgttactaaaacatgctgaaaaccaaaacatttatattattttaacgtttgcaatcactttttgcacttttaaaatatatttatgtctgtgtccgtttttttaaccagcgatcaactaacttgcgaaatcgacaaacaacactggtcgagagctatgttttagctccagttttagtcgtacatggaacaaatcattccgcgcaacttaaataaaaaaaccaactcagaaagaaaacgtagtcaatcgtacaaacaaaatcaataacaaaacaccggctttaattagtcatcttttgctatctgtaagtgcaaaggcgataaggtaacatttgggtcaaaagaattcaattacaagcccaaagtgcagcggcactcagttcagtaattgcattttgctaaatcagctaaacacatgtgtgcttcctatcagaaggttcgttctgcgtacctgtgtaggttctcttcagagctgccagccacaaaattagaaaaattacctaaggtacaaacgtaatgcggtacaacaattagagcttgtctttgaccttcggttttttttttttttgtaataagattctttttaagattttcataagatctgagatctgatcctcaaaaacagaaattttaaattattcttaaaaaccagatcaaaattttctaataaaagaccatagttcctatgttttgttagtacatgttttcccatcactagtaccgtgctctagtctactatgcttccaactatttccccaactttgttgaccagtgtagctggcaagcagcgccagaattgaacaacaaaagcatatcagaatcaaaagcccctgttctcggtctctcctcg

SEQ ID NO: 12935 - DNA, 1340 bp, DROSOPHILA
caacattgcggaactccaaggaggggtcacactggttgcttttggcgtgtttcgtttgatttagatttatattattcgtcttaagtttaagcatggtattccagttgccaacaacaaccgccgccccgaccggaggcgcaacatcgtcgttttccttcggcctcagcacaggaacaccagccgcagcaccagcttcaggagcagcaaccacggctcccgccacaaaaaccacattctctttcggaacaccggcacctactgctggtatcggtggcggagatgcagacaacagcaaggcgcaggctccaccagcctttggatttggcctgggatccgggactgcttcagctcccctcacgctgggcactcaagccgccgcaaatccagcgtccaccacttctgcgaccgcgactggaacctctgctgctcctcccgccttcggaggctttacggctcaaccagcggcatctgtggtgccaactatagcaaccagtgcacccaacaccgcagctaccacaactggattgctgggcgggtctggattgggagctcccaagaccacggccgctgcgtccacaactctgactgcagctccgtcggccatagcctccacgcagggagctgcaccggccccaactttaagtactggtggtgcttttgccaatctcactaccgaaaccaagaccacagactcatcggccgtttccacggcatcccaattgtcctaccaccaacttgaggagcatatcaacaagtggactctcgagttcgaggaacaggaaaaggtattcaccgaacaggccactcagatcaacgcatgggacaaactgctcatcagcaacaacgggaagatcgtcgagctcaacgatgccgtgaaaaaagtgaaaaccgatcagcaagtgctggaccaggagctggagtttatagccacgcagcaaaaagagcttgaggacagcctgggaccgcttgagaaggaattcgttaatctcccgagggtggacatggaacgcagccaaacctacctgatggtggagaatctggacacacaactgaagcagatgtccgaggatctaaaggagataatagacaacttgaacgaggccaacaagggccaggacaccactgatcccatcatacagatcggaaaaatccttaatgcccatatgaattcgttgcagtggatcgaatcgcagtcgacgaacatcagcaagaagctggaagacattggcaagattcaagactcccagaaacgcgatattttccgagctcctttctaaagataagtccccttaatttgttaacttaaataaagatggttccattgtaaccacagaaagagt

SEQ ID NO: 12936 - protein, 394 aa, DROSOPHILA
MVFQLPTTTAAPTGGATSSFSFGLSTGTPAAAPASGAATTAPATKTTFSFGTPAPTAGIGGGDADNSKAQAPPAFGFGLGSGTASAPLTLGTQAAANPASTTSATATGTSAAPPAFGGFTAQPAASVVPTIATSAPNTAATTTGLLGGSGLGAPKTTAAASTTLTAAPSAIASTQGAAPAPTLSTGGAFANLTTETKTTDSSAVSTASQLSYHQLEEHINKWTLEFEEQEKVFTEQATQINAWDKLLISNNGKIVELNDAVKKVKTDQQVLDQELEFIATQQKELEDSLGPLEKEFVNLPRVDMERSQTYLMVENLDTQLKQMSEDLKEIIDNLNEANKGQDTTDPIIQIGKILNAHMNSLQWIESQSTNISKKLEDIGKIQDSQKRDIFRAPF

SEQ ID NO: 12937 - DNA, 5259 bp, DROSOPHILA
aaagacattaaacgagacgccgaatacggtgcatacaaatcagcccactactctcgcccagatttcgcatagacgggcgcacctgcaaaccgtgctgagaatcccagataagcgcaccagttttatcaattaaaaacacctagacggtagaatggatccgcacggaatactctatcagtgatcgaatatagagttggcgtcattccacaagcctccgagtgtccaaaatgtcaatgggggcgacaggaggcgatttatttttggccaaaaatcgcgacttgtcgtccgtcgagaatggcttaaaatagacccattacttatcagccctaattgattagcgaaggcatgggcttacatcccacgcaatgctcaatcaattcaaccttatcaattgttttgctttatcattcgctaaaatcttgtggcatactttcgcgaggggcgcctaaaagattgaattcaaagcggttcgtcgatgaaacgtacaaaaatctttattacaaactgcaatgcaatgcacttaggtagtaaaatgagggacaaaaacaataaccgaatttttaaacaataagcaacagaagattatatgaaactgctttatatggcaaatatcgacctgaatatcgcacctttggcaaacagttttggcttactttggtttagatttcgaatttaatgagtgcaaaataaatgctaaactagaactcaatactaaactactattcgaagaatttgcactttaggtaaaagtttttgtcatggtttataaatataaatatagaaatatgatagtattgacttcgttctccagtccttgtgatgtacaggtcatgttttccgcttttttaggtattttcgttttttggtattcaggtttaacgagccaagctttctcgttctcaagctttcacatcaatatagagatttaataggtagttatttggagggccaaatagctagatcgttttgaaaaatgattccatttcatttcgatggcagtttagtcctccttctcctctttggcggacatgaagagcttctggcaagtgaaggtcaccgagtctacaaaggaaaaccatataaatgtcggacaatgccacacattggggttaatgtgaagggctactcaccaatcgtgctctgcacccatttcggcttattcttccacacgacgcccacgtagtagaaaggtatgccaattatggtgattaatacccccattccgacctcatagggcgccacatagatgggcacgacaactaagaatgcgcacacgatgacgaatagggcgggaatccacatggcgacctgtgccaggaacaaatatagttagaatagtcttgctaaactgttaggctcaaagacataatcaaagtatttaaatttttgtcagtacaaagatttcgttggctgtagaacgtctacattggcaatactgattacgctaaactcactttaattggccgctccatgcagggacgggtgtagcggaaatatagaaccgccgacaccgacaacattataaagaacgattccacaatgctggcgtaggtgatcagcacatacacatcgctcaccaccagcatcacaatggagagaaagcactgccgagagggacacagtcaaatcaattagggattaattacataatatcatttgtgcgctaattgaggagcgcagctcaccagaaaaacgagcgacggcagtggggtgtagctctttacgctgatgtgcgacagaatcgccggcatgtgtccattgcgggcacccacgaagcagatgcgggaggaggtcatgatgtggacggaaaggccgccaaaagcagatatggccaccatgaggggtatgatcagtgaaaacacgccgagaatcttatcgccaaaggtctgtgaagagaagtgatcaattaaaatcatttgaaaatccactggtttaattgacttttgcgattccgatcaaataaattaaaattcccagcagtctatcgcaattttgcgaatttaagctacaaatagacaaagtcggacattatagggcttgcattatgcttgataactaacagattttaagcttttaagtaaattagtaatttgactgcctaatctgatcggactgcaaatcgtggataaactcttaccacagcgatggcattggatgcgatcatctccgagggcgacagcacggccagataagccacattggccagcacataaatgccggtgaccagaggtagggagatgtaaatggcgcgcggcaggttgcgatatggatcgcggagctcctccgtcatgaagttcaagtaattccatccggcataggaaaagataccggagtaaaaggctaccgacatcttgccgggatcagtctcagtgttatcaaagggtctcgtgaagttctccacgttgcccatcatcatccagaccaggcctaccaggatgatcaagaccagggcggcgatcttggtgaacatgatgacgttttgcatcttggtggtcaccttcatgtagtacgaattcaggtaggttaggaagcagatggtgatggctgccaggagctgtaacgctattttgggaatctcacaggctccgccgaagaagggttccagcacgtaggaggcaaaggtcaggcccataatggcattggtcgttggtctgtcagagataagagcacacaatcagtggaaatttttttgcagactgcattcagacatatgtcctgctgataatgtccgcatgcaaaagtagaaaagcagatattttcgcttatcgccgatcctaaacaacaaatatagcaggcaataaaacgctcaatgcagaactcgcggaactgttcaataaataaacttatatagcgcagattaaatgataaggctcgtttcactttctaatgctctaatacacaacccatggcttaaccttgaaaaaccggatgcatccacaccaatccgaagtattccattcttctagtcttatctgagaagttattaaacttgacccagtctaaaaatcagattctgtaggactacttcacttcattcaatctacatacatatgttatttcgttaaaaaaaacgtaaaaacgcaaaaaagaaaaaaaaatgtcagctattacttttactctaatgggttccttctggcgataataaagtaattcgaaatcaattaccgaaaggaatttgatactgtatttatgtttttcgaaccaactgtgataagggaactttaacggcgaaatattcgcgaatattaaaacaatattgaccagtaagactcacacgaatatcatcatggcatcccagagatacaggaaagccggcagtgatccgtaggcctcgaagatatacgcgtaatcccccccagattttggtatggcagtaccaagttccgcgtagcaaagagcaccaatcatggacagcagtccgcagagaacccagatgaccagcgaagcgcccacggactccacctcccggatgacgcctttcggagaaacaaagataccggatccgaagatgatgcccaggatgatggccactccttcgaggaggcccagctgcttcttgatcacaaccctgctgctgtctgactcggcggatccctcgcgacactgagctttctcggcaggattagccgctggttgggcaatgctggagggaggattgccggagctgggggtcagcaggaccatttcgctggacggcgactgcagttcatcggcggcgggcatggcggctatatatgtacgtattatgtcctagggctatggtattattatcccgctgctctgtgacacaatcttcgcacgcgacgtctgaaagcgaactgtaactgtttctttggccgttgtcccgttaattgattaaacgaggcaagtgtgttcgtgggtgtgactccgtgtacatatgtgcgtgtgtgtatatttcttaatgtgtttttcaattgtattgtatttggcttatctactcctgctcttcctcttcttccttttccgccggctagcgttagtttgttttggtcggctcttcgctagctgccgtctcgctcgcaccagcaacacaccctgcagttgagtctatcgcacataaaactcgcgatttaaaagaacaattcacactctgtctcgcggaattcggttaatgggtctggtaaataagggcagacatcgaggtgtaaccgccaaattgtgcaaactctgcggtttaattgtggaattggcacaacgttgctcaaaggtttttcaaccccacgttttctcgagcatcgcagcagtgtgaccagcgcccggctgactgtagaatatcaattgatgctggggtgtttttcttgcgagctacagggtgcaattttttattcaaaaataatatatatacaatatggccccgccgactttcccgctgtcggtcccgtacataagggtaaaatgaaattgaaaactgaattttatacattccatatattgaaatattaacgagaattaatatacaattactgcgtgagcgtacgtgctctcacgtgctctcctctgatttcttatcgaaacgaaaagtagaccacgtctatcgcctatcgccaatcgatatcagtatccaaatagatgagctaaaagcaaatcgacagagaaatacagatcacaaaatggattttggggacctgctgcgctacgcgaaaaaaaatagtgatgcggtcaccaaggaggtggtgggtatcatgcagatgtccagttcgtccatcgcgtgagattttatgcttggaaaacgcggttgcgcctgcattccctttgtgacccaaaataatttatattcgatctgatcattgtaatttttctcctctatcgccaggggcaggggaaatactacagcaccaagtattcgccccccaagaagcagtccaaggagtccaagcagctgtccagcaacatccagaagtttctccaaaagaaggaggccgaggaggcggaaaagaaacggctggagcgccagaaactcaacgatctgctcgccaaaagagacgaaaagtccaagaacaagatacgtaaaatgctaaaggtaaccaaatcggccaacaaatcagtgctggaggatgccaaagactacgagggggccatcgacggccacgaggcgggcgagggtcagggcgatgactacggctacgtgtccactgaagcgaatgccttttacgataagtacattgaaaaggtacgcgatgtacaggaagacaagggattcacgcccagcaggccacagtcgctaaaagatctctctgg

SEQ ID NO: 12938 - DNA, 2090 bp, DROSOPHILA
cgatgctcgagaaaacgtggggttgaaaaacctttgagcaacgttgtgccaattccacaattaaaccgcagagtttgcacaatttggcggttacacctcgatgtctgcccttatttaccagacccattaaccgaattccgcgagacagagtgtgaattgttcttttaaatcgcgagttttatgtgcgatagactcaactgcagggtgtgttgctggtgcgagcgagacggcagctagcgaagagccgaccaaaacaaactaacgctagccggcggaaaaggaagaagaggaagagcaggagtagataagccaaatacaatacaattgaaaaacacattaagaaatatacacacacgcacatatgtacacggagtcacacccacgaacacacttgcctcgtttaatcaattaacgggacaacggccaaagaaacagttacagttcgctttcagacgtcgcgtgcgaagattgtgtcacagagcagcgggataataataccatagccctaggacataatacgtacatatatagccgccatgcccgccgccgatgaactgcagtcgccgtccagcgaaatggtcctgctgacccccagctccggcaatcctccctccagcattgcccaaccagcggctaatcctgccgagaaagctcagtgtcgcgagggatccgccgagtcagacagcagcagggttgtgatcaagaagcagctgggcctcctcgaaggagtggccatcatcctgggcatcatcttcggatccggtatctttgtttctccgaaaggcgtcatccgggaggtggagtccgtgggcgcttcgctggtcatctgggttctctgcggactgctgtccatgattggtgctctttgctacgcggaacttggtactgccataccaaaatctgggggggattacgcgtatatcttcgaggcctacggatcactgccggctttcctgtatctctgggatgccatgatgatattcgtaccaacgaccaatgccattatgggcctgacctttgcctcctacgtgctggaacccttcttcggcggagcctgtgagattcccaaaatagcgttacagctcctggcagccatcaccatctgcttcctaacctacctgaattcgtactacatgaaggtgaccaccaagatgcaaaacgtcatcatgttcaccaagatcgccgccctggtcttgatcatcctggtaggcctggtctggatgatgatgggcaacgtggagaacttcacgagaccctttgataacactgagactgatcccggcaagatgtcggtagccttttactccggtatcttttcctatgccggatggaattacttgaacttcatgacggaggagctccgcgatccatatcgcaacctgccgcgcgccatttacatctccctacctctggtcaccggcatttatgtgctggccaatgtggcttatctggccgtgctgtcgccctcggagatgatcgcatccaatgccatcgctgtgacctttggcgataagattctcggcgtgttttcactgatcatacccctcatggtggccatatctgcttttggcggcctttccgtccacatcatgacctcctcccgcatctgcttcgtgggtgcccgcaatggacacatgccggcgattctgtcgcacatcagcgtaaagagctacaccccactgccgtcgctcgtttttctgtgctttctctccattgtgatgctggtggtgagcgatgtgtatgtgctgatcacctacgccagcattgtggaatcgttctttataatgttgtcggtgtcggcggttctatatttccgctacacccgtccctgcatggagcggccaattaaagtcgccatgtggattcccgccctattcgtcatcgtgtgcgcattcttagttgtcgtgcccatctatgtggcgccctatgaggtcggaatgggggtattaatcaccataattggcatacctttctactacgtgggcgtcgtgtggaagaataagccgaaatgggtgcagagcacgattgactcggtgaccttcacttgccagaagctcttcatgtccgccaaagaggagaaggaggactaa

SEQ ID NO: 12939 - protein, 517 aa, DROSOPHILA
MPAADELQSPSSEMVLLTPSSGNPPSSIAQPAANPAEKAQCREGSAESDSSRVVIKKQLGLLEGVAIILGIIFGSGIFVSPKGVIREVESVGASLVIWVLCGLLSMIGALCYAELGTAIPKSGGDYAYIFEAYGSLPAFLYLWDAMMIFVPTTNAIMGLTFASYVLEPFFGGACEIPKIALQLLAAITICFLTYLNSYYMKVTTKMQNVIMFTKIAALVLIILVGLVWMMMGNVENFTRPFDNTETDPGKMSVAFYSGIFSYAGWNYLNFMTEELRDPYRNLPRAIYISLPLVTGIYVLANVAYLAVLSPSEMIASNAIAVTFGDKILGVFSLIIPLMVAISAFGGLSVHIMTSSRICFVGARNGHMPAILSHISVKSYTPLPSLVFLCFLSIVMLVVSDVYVLITYASIVESFFIMLSVSAVLYFRYTRPCMERPIKVAMWIPALFVIVCAFLVVVPIYVAPYEVGMGVLITIIGIPFYYVGVVWKNKPKWVQSTIDSVTFTCQKLFMSAKEEKED

SEQ ID NO: 12940 - DNA, 3497 bp, DROSOPHILA
ttatcgtgcaaagattaatttcaaacataactaaaaataatagagttgatagcttgagaaatacgtggttattataatgtattgtagatggtattggtttttcagacttcaacttgtgctcgcagttttcgtccataccccttttatgcaggaaaaagttataagttaacaaaaccaaatataaccacagtgaagccactaattaacgtctaagttgaaaactctcttaattacgcgatgcctaaatacttgattgtaaaatcgagctaaattttcatatggatatggcgaaccaataggaccaaactaaataaaacgaatactataacgaatgggtcggagtccacggcaatgacattcgatatgcatcgaattctagtttaaattgtttatggttcgcatgtcggtacttcatttttcggactaagcgagcttgcaatggtttccgcaaataaaaatcaacaacaactatgtataaacaagtgaagaagttttgatagaacgcaacggtttttgatcggtagcagacaggcaacacatcaaaatcaggcaattcgcattttctctctgctgaaatcgcttgcttgccacgcaactaaacgcaaactaatcgaaagcaaacacaatacgcacttattggctataacggctccccggctaagggccattgaattcttcaactctctaacacacaatgaacgaccaagcaaagtttgtaaaaataacacaagagtacattaaacgtttcatggcaaggcgaatgccaaacatttttgaatgcaaatgtatctagaatttaaggagatctttatacatatacaattgaggcggcagagcgatggattaacgataattagataaactagataacgacgctacttgaactaatcaaattgaattgaaaatcgaaattgaatctgtttaccctgcaattgaatgtgtgcgtacaactttttctagtgcaacattttgaagcattacgaactaaactatcagcatttctgaataaaaaactgcatacatatattgaaagttcgatatcgtctatgacttttactaacacactacacatatttacaaacggtccaggttgctacgttgattcaatcaagcaaactcttcacataggcggcgtcctcctggacgaatttttctgactgctctgcaggcacttccacttcggttttatagttgtccaggccaatctcttcctctttcttgatcagaatgtccaccacgttctcgcaggccagcagacagtcgctgtccttgcccaccttggcctcccacttgtggtactcccgcaggatctcatagacgcccctggagcgcaggatttcccggctgcgacgtgtggagcacagttgcagcaaacactccagcagcattttccgcaaatcgggatcctcttcgcgcgttttactttcaggtaggtactggaaaaccaaaggttgcaaagatggtcgattattttgtatagtatagatctcacctgcagttcgatgggcaacaattcattgtcctcgtcgctgaactcttctggaccgcacagtggctgcaggattgccaccagaatactgctctgctcgtttaggatcacatcgtggtagacagtgtcgaagcaaacgttcttcagaatgccaatggtgccgccacgccgcactacacttccctcgaatgaggcaaagggcagtagtttctccagcaactcgtatttccgatggcagcacagttccctgccccgagaaacctgggtcagattgcagaagatgggcgccagataatgcagcttggccttctttttgttgtagtccaattgcgcgaaggcctttgccaagcggggcagcgtgtgatcgtctctttccagcgtgtccaggatctcgtggaccagagattccactcgcgttaggttgctcaagaccatgctccagggatcagccagatcggattgctcgttggttatttccttggcagccacttctacgatggcaaatggctgaaaagtggagaaatcaatcaatgtattttaattctattacttgaaaacatttaccggttgcaattgtttcgccagttggaaaactttaattgctgcttcctcttcggacgttaaatttattaggcttaaaaccgcatccttggccaccgtttgatttgcatcgaatgtcagtccaaaaatggccattagcatttcatctagtgaaagtattgctgatttgccctctgagctgccagtcaatcctgaataatacgaatattttaggtaaataaatacaatgtgccaccggtgacgtcacagttgcccacaacaaacgcacgtgtagccgtggaaacttatttttcttgaaacacacctaaaacatgtgttagggctactgcctttaagtccagccgctgattcggttgcatgaattgaaccagttccttcacagtctccattttagttgtatttttcgcgtttattcagatttaactgctgtgttttggtttcagttgaccaatgtgaccggcttctagtttataattaatcctgtctgacaataaagctatagattattaaaaatcgtaacaagcagttttcgacaggctgctatgcccaccgcggagtgtgtatttgctagttaaaggagcatgtatttgcttattggtactcaaaccattactgttgttgctaacttgcaaaagctgaatgctgcatctatgctacccaacaaacaaagtgtatagggtattcccaaaatgaactttaatagcataatagtaaaagacatggatgcacacaatgagcttaacgacttagccagagacccgagtgccactcgggtacgttatctgatgcccgttccgtttttggatggctagtgcccttatgctttccactgatcgccttcagaatgaatcgtttaacctgatggatatcggtgaagatccctggtaaattggatctcttgcaggcgggactccaggcgacgataccacaaagctgatctccagcagtcacaggacatccggcgctaaacatacagtctgcgctccttttaaattccttggcacaggcgacagtttcgcgcagaagaaaattgccgtacgccgaatcgcagatcattcggttgagcacctcaatttcttctgttcgtacgttttccgcgggtcctgcgccgtaggacacaacggaaaggcttttgtacgagctcagcggattggtacagagggtaacatagttattccgattgccacgcaggcggttggtcagttctatgacagcgacatccataaaagttccaggccagtgccaatccttcgaaacgattatgttgcggataagggcgtttggaggatcatgcgaatcaagctgattatcctgccggctgtccgacgataccaactccacactgagcgactccatctgtgacctatgactatgcatacagtttgctgaggtgagggcatacaaagcacttaagtacgaggctccgcagacgaaagtaggtccatca

SEQ ID NO: 12941 - DNA, 1215 bp, DROSOPHILA
tcaactgaaaccaaaacacagcagttaaatctgaataaacgcgaaaaatacaactaaaatggagactgtgaaggaactggttcaattcatgcaaccgaatcagcggctggacttaaaggcagtagccctaacacatgttttagatggccatttttggactgacattcgatgcaaatcaaacggtggccaaggatgcggttttaagcctaataaatttaacgtccgaagaggaagcagcaattaaagttttccaactggcgaaacaattgcaaccgccatttgccatcgtagaagtggctgccaaggaaataaccaacgagcaatccgatctggctgatccctggagcatggtcttgagcaacctaacgcgagtggaatctctggtccacgagatcctggacacgctggaaagagacgatcacacgctgccccgcttggcaaaggccttcgcgcaattggactacaacaaaaagaaggccaagctgcattatctggcgcccatcttctgcaatctgacccaggtttctcggggcagggaactgtgctgccatcggaaatacgagttgctggagaaactactgccctttgcctcattcgagggaagtgtagtgcggcgtggcggcaccattggcattctgaagaacgtttgcttcgacactgtctaccacgatgtgatcctaaacgagcagagcagtattctggtggcaatcctgcagccactgtgcggtccagaagagttcagcgacgaggacaatgaattgttgcccatcgaactgcagtacctacctgaaagtaaaacgcgcgaagaggatcccgatttgcggaaaatgctgctggagtgtttgctgcaactgtgctccacacgtcgcagccgggaaatcctgcgctccaggggcgtctatgagatcctgcgggagtaccacaagtgggaggccaaggtgggcaaggacagcgactgtctgctggcctgcgagaacgtggtggacattctgatcaagaaagaggaagagattggcctggacaactataaaaccgaagtggaagtgcctgcagagcagtcagaaaaattcgtccaggaggacgccgcctatgtgaagagtttgcttgattgaatcaacgtagcaacctggaccgtttgtaaatatgtgtagtgtgttagtaaaagtcatagacgatatcgaactttcaatatatgtatgcagttttttattcaga

SEQ ID NO: 12942 - protein, 322 aa, DROSOPHILA
MAIFGLTFDANQTVAKDAVLSLINLTSEEEAAIKVFQLAKQLQPPFAIVEVAAKEITNEQSDLADPWSMVLSNLTRVESLVHEILDTLERDDHTLPRLAKAFAQLDYNKKKAKLHYLAPIFCNLTQVSRGRELCCHRKYELLEKLLPFASFEGSVVRRGGTIGILKNVCFDTVYHDVILNEQSSILVAILQPLCGPEEFSDEDNELLPIELQYLPESKTREEDPDLRKMLLECLLQLCSTRRSREILRSRGVYEILREYHKWEAKVGKDSDCLLACENVVDILIKKEEEIGLDNYKTEVEVPAEQSEKFVQEDAAYVKSLLD

SEQ ID NO: 12943 - DNA, 3602 bp, DROSOPHILA
acgcgatttagactatttaatattatttcacattgatctatcaactagtttcgcgcacatggtattgtcagtcttaataaattggctattaaatgagctggcttataggagtaaagcatttgtatctttatttgcccaccagagtcagcaaaaaggatttcagctggctaactaagatctacctgccccaaatgcgaatagatggtcactacaaaatggtcggtcgcattttgctggtgcctctgcagggaaatggaaaaatagtcatggaaataggtagttgctaatgataattgttactaaatgaatgtaaaccggattttttgccactgacagatgatctggacatactgatgaccaccaaaacacgcctctacgagaagggcggctatacattttacaacgtgacatccgtgaaggtaaaagtggacgtcggcaaagttcgcaccagattggataacctcttcaacgggcacagcaaggaggtggaagatagcaccaatcagttctttaacgacaattggaaggatgtcttcgaggcactgcgtccgctggtggttgaaaccgtggaaagaacgctactagatctactccacaagacatttgccctgtttccggccagcttctttgtggaggacatacccacctccttaaccttgtatggtcgcaagtcacacatgatcacttgaaaggtgttccattgaaatttaatcccacttccttcaaactgccttggaatctgcatcttctctatgaaaatcttactgaaattaatatagaaatatttcgaggcaatcaaaacaatttgatagttctaagaacttttttcatttgttcattgctgtcttttgatgagtttagatttttgtttttaacgcttttattatctgtgagtgcctagactaaatgttagtgtaacttattaaatgcttagtttagaggtatcctaatatgggatggcacagtgctccacatccggctgccagttcgagtcgatagatcagtagaaccagtcgtacttgagatattcgccctcgtgcttcaatgtggcaatcgaggtgtgacgcacgtgtccagtgcgcgcgaagatcctgcgattgcccaccggctgcagggtcctgaaattgtccaccaacgcaccatcctgcgtgtccgacagctgacggaatcgggagatctgcttgggtgaaatgggtatgggatcgggaaacagtatccaggtgacggcctccgaacagggcggcgtggtcagggaacctggagagtcaaaatataatacttagttgagtgacatcatagataaacatcgcttgtagacatcgattccgatgtcagttaatcagtgagtacttatagcttatagatcaaagcgctcactgaatacgaatggcaaatggaaaactatagtaataaacatatcttattggttgagactagaatatcttagtgtacttacccttgtacgtgtagaacttgtccacatccacgccagcaatcagcgaggagagcgagaaagtgacgttcagcgtggcctcctgattggcatcggcaatcagatgcaaatgtcggttaatggtcaccaggccagcaccctcatcctcgtcgagctgtattagaaacataaataggtttataaatcactcgcaaccagctcaaccactaaaccactcacattgaagaagaaacccaggacggcggcaccatccggatgattgagagcctcgccaatggtcgcgtacttcttgttccggtgcacaatgtgcatctccatggtgtagcggatgtcgttaatgacatgctcggatccccggttgttcttgtcgccccagtggaagtggaggccctccacctcgaactcaccgggcagcttggcgccccggatgtagggtaggaaatcctcgcccacctcagtcacattgaccttaggtatggtgatggaaactgcaaaatcaccggattaattagcactagttctctacactgagaaaattggccagaaataggtaatttcactggttgtcaactcaaatcttacccgtgtgtccattgttgatcattttcagtgggtagggcagcaggttgtgatagccaatcatgtccaccgccggcatatgaatggccgttgtctgaaaggagacaaaataggcttagttgggttaccgcttggctgggctttaggtgggctgttcttacccggctggttgtgatggcaatcggggactgggtctttcccgcacagtgaccatgatggcgggcccagcgtcgctggttgggctcggagtagccaaagacatggctgctgacagctggaaagaaggggatgtgggctttaatagacttgcttcacaaaacgtaggacaaatttgcttataaataataaatgcaaataaatgcaatcaattagccgctggaatgcgcacttagtcctgaatcaggcgaactgattaaagtgtttccccatttgcagactgaacgtcatccgcaatctgcgatcttgagtccacgattgatgagtgatcacgtgcccgtgtctgtgttgcctgtgtgctattcaccctctcggttgaccttctcccgattttccggtggctatctctgacatatacgagcacttgtgaattacggcataataaatggggctccgtagcaaatatttaatgtctctttcttattttagtcaatggtgctgggcaaataaataacttaagtgggtaaacaggcttccagggaaagctcggaaagagtgcgaacgccaagggcacgttcgggccaataattagatatcgttgcgattgatattgatttggatccccagataatggggcgagcaaacagttttcattattttccagcgcgattgaaagctggcagcaaattccatggaatcttttgcaaggcgaaaggaaatacttatttaacggctaatttgcatgtgattggtgataatttctgtttgaggagctcgctgcgaattaacatatcatatgacatggttttccattgtgccattgtctgcacaactggtcgatatgtcgatggagcacacatttttgtttgcactgctcgtcgcttgatgaattagtctaattagttgtttatttgtggtaatgtatattatattatttatttcagtcgcggctatcaaagtcttagataataaataagttaaattgagtattttgtcaaatatggccattgagcattatgtcatccactttatatattataaacatattactttgagctattatttgcatttgttcgttgtaatcgatcttttaagtccgttctaattacgaaaataaataaatatttcaaagtcttagggagtagataacagattttcgtttagcatgtaaatagtatttatagagcttccccacagataacagattgattgcattttgagtatggtttgaagtgctaatgcctggccaaaagcagaaacctcaaccacttcaagtccggcaataagtctaaatcaaccggcggccaataaagtgtattaattgacagtttcgagtggtttgaacaccattaagctggtcaaaattagcttcgtgaagtgtgtacttatgactgctaatgccaagatcccacca

SEQ ID NO: 12944 - DNA, 915 bp, DROSOPHILA
atgtcagagatagccaccggaaaatcgggagaagctgtcagcagccatgtctttggctactccgagcccaaccagcgacgctgggcccgccatcatggtcactgtgcgggaaagacccagtccccgattgccatcacaaccagccggacaacggccattcatatgccggcggtggacatgattggctatcacaacctgctgccctacccactgaaaatgatcaacaatggacacacggtttccatcaccatacctaaggtcaatgtgactgaggtgggcgaggatttcctaccctacatccggggcgccaagctgcccggtgagttcgaggtggagggcctccacttccactggggcgacaagaacaaccggggatccgagcatgtcattaacgacatccgctacaccatggagatgcacattgtgcaccggaacaagaagtacgcgaccattggcgaggctctcaatcatccggatggtgccgccgtcctgggtttcttcttcaatctcgacgaggatgagggtgctggcctggtgaccattaaccgacatttgcatctgattgccgatgccaatcaggaggccacgctgaacgtcactttctcgctctcctcgctgattgctggcgtggatgtggacaagttctacacgtacaagggttccctgaccacgccgccctgttcggaggccgtcacctggatactgtttcccgatcccatacccatttcacccaagcagatctcccgattccgtcagctgtcggacacgcaggatggtgcgttggtggacaatttcaggaccctgcagccggtgggcaatcgcaggatcttcgcgcgcactggacacgtgcgtcacacctcgattgccacattgaagcacgagggcgaatatctcaagtacgactggttctactga

SEQ ID NO: 12945 - protein, 304 aa, DROSOPHILA
MSEIATGKSGEAVSSHVFGYSEPNQRRWARHHGHCAGKTQSPIAITTSRTTAIHMPAVDMIGYHNLLPYPLKMINNGHTVSITIPKVNVTEVGEDFLPYIRGAKLPGEFEVEGLHFHWGDKNNRGSEHVINDIRYTMEMHIVHRNKKYATIGEALNHPDGAAVLGFFFNLDEDEGAGLVTINRHLHLIADANQEATLNVTFSLSSLIAGVDVDKFYTYKGSLTTPPCSEAVTWILFPDPIPISPKQISRFRQLSDTQDGALVDNFRTLQPVGNRRIFARTGHVRHTSIATLKHEGEYLKYDWFY

SEQ ID NO: 12946 - DNA, 5175 bp, DROSOPHILA
gttattgatctagtgttgggatactgtataggatttgttatcttgtatacttggcgcctattcccacataagcaccaatgaaaagtaaacttatggtcaccattctggactgttggacagttggctcctcttaattggtttgcagtctgtttgcgcagctggctgactcctttcatgttctcaccaaattaattcaattaattcgatgaaattgtcttttaattgaacacaatcgcgtttcgtcagagggaaaaacgtttttcaagatctgcaaatatataaagagactttaacggtcaatatttgaaaggcatattcgagctaactccgctgcaatcgatcgaaatacatgctaaataggatgctaatttgaaataaacttgaattgatcgctatataatgcacttccgctcgaatattttccaagttgtttcgttctgtctttttgggaacctcgccgtgccgaacatattgtttccaaatggtgaatgtgactgatccgatcacaatgatgacgactgggatgggggcaccattgtggcacaatgacattttatctcggaatatgcaacagcagcacgttctctgaagcggagagtgtaatagatcagcgacggaatctcgattctgaatccgaaaactaccgatgcgtggcccatgcaaatgttcttgcagcgacatcggtgtgggtgcatcccaaagccacttacacacacacatctcccatcaatgcacagcgaaaaatggtatcaatacgtaaaatctccgatatagccagctactcaacccgcctatagagcttgctatcatccattaacaagttagttcgagcagggaaagtatgtgttatagaaattcaacttgaaccatatcttacagcatcgtatagtgatttctagtagtgctcccgctttttctttctgtgtacccatgtgggagaatctccttggcggcgactaatcaaccggcatcggcatgccttatacacaagtgctgggtgctgtccagcgtcagcggcttcttcatcgtcgccccggactcgggcatcttccattgtccgcccctcggggctccactgtacatgtgcgtgtgtgtgtggtggtgcagtgtgtgcggctcaggggacgccaactgtggcttcagctcaagcgatcagttcaaagttgactttgtcgcggaccagagcggaccgttctaattccgacacgcgaccgtgaattatagaattaccaaatcacagtgtaatttaatttaaagaaatatagctaatataaactaagcgaaaataaaatgacgccccatatgtgctcagtggtgaggtgtttgcttgcggccctaatccttggccaagtgcaagccgagctggattttaacaacgatctcgaaaacagtcaaaagttcaagagcataccaaccacagtgaaaacctatgagaacgatacagtgcagcttccgtgcaccttaaacagtaagtgattaactaaatgcggtactaatctcagtgcacattgtgggtatttctggcgattagccccgctttttggggccttgagtcggccaccagcagcaattggccataacaatgagatttaattcgattgaagaaatgaactcacaatgccacaaatggaggtattatccgacaataatagagttacggcggagaaagtccagaagcggattctattaattgaacgcttaacacacttagcggcgcattcaagtcgccgtgcaagaccctcccgagacatattgttaaatggccaattaaaggattattgacataagcaattacacttccaaagggttacaagattacacaaacttacaaattagcgtgtgtgcgggaagccctacgaacagagtcgtccaaatccaccccatgaagaaatatttaactaagcctttcagtttggcatgccaatatatgtaggttatttacaatagttctggtatagaagttattagttacattttaaagtaatatagtatggtataaataatccgggattgataaagtatatttctgtttttaaaacaataacattttgaatagatctgcttagtgtatagaaattttcgttagctaaaacaacgtatactttttattgttcatatatcgatgatcaatgcaaacaatttgggcttcgagcggatgcttttgtttattcttatttatcttggcagtgagataagcgccagataactgttaagattcgagatacaattctgctgaattctgtttcgttcttttaaatatttggtagataaaaatggaattcgcgaaaacataaaaataaaacacataagttcatcaaatttattacctcacatacccagctcccttccgctacgtccgttggcatcgggacgatgtggctctggtggactccagacacccggagctcccgccgccggatcgcataatgctctggccgaatggcagcctgcaggtggccaacgtgcagtccagtgacaccggggactactactgcgaaatgaactcggattcgggtcatgtggtccagcagcacgccatcgaagtgcaattggctccacaggtgttgattgaaccatcggatctcacggagcagcggataggtgcaatcttcgaggtggtgtgcgaggcccagggagtgccccaaccggtcatcacctggcggttgaacggcaatgtcatccagccacagagcaacacggggaatcggcaaagcctcatcctggagatcaaatcgaggaaccaggcgggcctcatagaatgcgtggccagcaatggagtgggtgagccagcggtggccaatgtctatctccatgtgctatgtgagtaattaagcttcaagtcaacttgagcaattaactttaacttactgaccttctcgaatcgacagtttcgcccgaggtgagcataccccaacccgtggtgtacaccaaactgggctcccgtgcccatcttgagtgcattgtggaggcggcaccggcggccacggttaagtggttccatcacggactgccggtggcactgggagcccactccaccactcacgagtcggagttgcagacgaaccggtcggtggatcactacgtgaacgccgtgcgtcacatgctggtggtgaagagcgtgaggaacgcggatatggggcagtacgagtgccgcgccagcaatcagatatccgtgaaaagcggaagtgttgagctgaccggccgtccgatgccctgcctctttaagattaaccccggcacccagagctccacgtcgcatgtcctcgtttggcagaccgagagcctgctaccgatcatggagttcaagctcaagttccgacagatcccctcgaacaatgtcacccgccaggttagaaccaactggacagagctcacgatcccggctcaggccacaaacggtaaggatactcttaagcttatatccttagattcttcttttcatgttcataacgttttatttaggactcatctatataaccacatacactctacatggcctccagcccgctagtctctacgaagtttccgttttggccagaaatagctttggttggagcgacaatagcaagatagtgcgttttgccacaggcggagaaggtgaattaatgcaaattacatatgaattcattgattaattgtcctcttacttccacagttgaactgcccaactactcgactgaatcggagcttcaggacgattttaccgaagaggacttccacaacgaaatcacccagagatctgaggttctatcggccagcatgatgttcaactcgggctcggttaatgggcgcggcggaatcagtgcctttatatattccttatgtcttataaatatattacgattaataagttagatctaatcctaaaaaatcttaataaatgaacattcaatgttagcgatagcgcatatatgattcatattgagattgcttttgttgaataatacttccgtaaaaaaggtgagataacatttttctgagcagtgtatcatagtaaacagtaagtaatgctggtgactatgatactatatttatcattgactgcaatgaaatatacataagtcaaacgatggcatttcctttttctaaaaaaaaataataaactaaggttattttgtaattttagtattaaatgtattcgaaagacaacataaatagaaatataaaaaaaaagcgtaagaaccaattttaaacttacaaggagttaaaatatgtatataggcggcctacagtgcgtatgtgttatatgtttaaatgaagacttggtaactttaaaaagaaaatctctgcattgatgaacccataagccccagcaaacaacttcgagggtactctttcagtatagggcttcctctttaaacttcaattggcagtgacattgcggacagctaacgcatctttcaggccccaagacccaaagactcccgctctctctccctctccctctctctctctctctctcattatccgaactctctctccctctctctgcaaatggactgttatttaaaggccccaatgcatcggagagcgaagcactaagtgtagagagatatggagagagctgttccgcttattccaatcgtttcgaagtgcttttggcatcagcacgcgctcgacttttagttctcgtttgaacagcttcgcgttcggttctccacgcagccccagcgcagaaaaaaggtctccatccacagctccaactgaaccaatagccattgcctagcgcctagtgccccgcaaaaccctaggcttaaggccaattaccgacagctgtaaacgtaaacgtttgcattcgacctggctaaaacgtgtacaaatcgcttgggaaatggcgtgcgggcgaaagcgttaccaacgcgcgagtgctttaaacgtaattcgtaccaaaatcgggaaaaacaaaagggtgaagaggaagaaaccacttttgtaccgcttcggccgaatttcaactcatctcgcgtcggtatctggggaccagaaaccagttttcctcctctaggctctccgggcaaaataaatacgaaacaaaataacaatctcgaacgcagcgcaccgcatccattctgtaactctggcggccctgagaagctgtgccgaaacctaaaagattttgtgatttcgtcttcgggccaaaacgacaggcgatgattcatgaaaatggcctacgat

SEQ ID NO: 12947 - DNA, 2113 bp, DROSOPHILA
ctgtccagcgtcagcggcttcttcatcgtcgccccggactcgggcatcttccattgtccgcccctcggggctccactgtacatgtgcgtgtgtgtgtggtggtgcagtgtgtgcggctcaggggacgccaactgtggcttcagctcaagcgatcagttcaaagttgactttgtcgcggaccagagcggaccgttctaattccgacacgcgaccgtgaattatagaattaccaaatcacagtgtaatttaatttaaagaaatatagctaatataaactaagcgaaaataaaatgacgccccatatgtgctcagtggtgaggtgtttgcttgcggccctaatccttggccaagtgcaagccgagctggattttaacaacgatctcgaaaacagtcaaaagttcaagagcataccaaccacagtgaaaacctatgagaacgatacagtgcagcttccgtgcaccttaaacactcccttccgctacgtccgttggcatcgggacgatgtggctctggtggactccagacacccggagctcccgccgccggatcgcataatgctctggccgaatggcagcctgcaggtggccaacgtgcagtccagtgacaccggggactactactgcgaaatgaactcggattcgggtcatgtggtccagcagcacgccatcgaagtgcaattggctccacaggtgttgattgaaccatcggatctcacggagcagcggataggtgcaatcttcgaggtggtgtgcgaggcccagggagtgccccaaccggtcatcacctggcggttgaacggcaatgtcatccagccacagagcaacacggggaatcggcaaagcctcatcctggagatcaaatcgaggaaccaggcgggcctcatagaatgcgtggccagcaatggagtgggtgagccagcggtggccaatgtctatctccatgtgctattttcgcccgaggtgagcataccccaacccgtggtgtacaccaaactgggctcccgtgcccatcttgagtgcattgtggaggcggcaccggcggccacggttaagtggttccatcacggactgccggtggcactgggagcccactccaccactcacgagtcggagttgcagacgaaccggtcggtggatcactacgtgaacgccgtgcgtcacatgctggtggtgaagagcgtgaggaacgcggatatggggcagtacgagtgccgcgccagcaatcagatatccgtgaaaagcggaagtgttgagctgaccggccgtccgatgccctgcctctttaagattaaccccggcacccagagctccacgtcgcatgtcctcgtttggcagaccgagagcctgctaccgatcatggagttcaagctcaagttccgacagatcccctcgaacaatgtcacccgccaggttagaaccaactggacagagctcacgatcccggctcaggccacaaacggactcatctatataaccacatacactctacatggcctccagcccgctagtctctacgaagtttccgttttggccagaaatagctttggttggagcgacaatagcaagatagtgcgttttgccacaggcggagaagttgaactgcccaactactcgactgaatcggagcttcaggacgattttaccgaagaggacttccacaacgaaatcacccagagatctgaggttctatcggccagcatgatgttcaactcgggctcggttaatgggcgcggcggaatcagtgcctttatatattccttatgtcttataaatatattacgattaataagttagatctaatcctaaaaaatcttaataaatgaacattcaatgttagcgatagcgcatatatgattcatattgagattgcttttgttgaataatacttccgtaaaaaaggtgagataacatttttctgagcagtgtatcatagtaaacagtaagtaatgctggtgactatgatactatatttatcattgactgcaatgaaatatacataagtcaaacgatggcatttcctttttctaaaaaaaaataataaactaaggttattttgtaattttagtattaaatgtattcgaaagacaacataaatagaaatataaaaaaaaagc

SEQ ID NO: 12948 - protein, 496 aa, DROSOPHILA
MCSVVRCLLAALILGQVQAELDFNNDLENSQKFKSIPTTVKTYENDTVQLPCTLNTPFRYVRWHRDDVALVDSRHPELPPPDRIMLWPNGSLQVANVQSSDTGDYYCEMNSDSGHVVQQHAIEVQLAPQVLIEPSDLTEQRIGAIFEVVCEAQGVPQPVITWRLNGNVIQPQSNTGNRQSLILEIKSRNQAGLIECVASNGVGEPAVANVYLHVLFSPEVSIPQPVVYTKLGSRAHLECIVEAAPAATVKWFHHGLPVALGAHSTTHESELQTNRSVDHYVNAVRHMLVVKSVRNADMGQYECRASNQISVKSGSVELTGRPMPCLFKINPGTQSSTSHVLVWQTESLLPIMEFKLKFRQIPSNNVTRQVRTNWTELTIPAQATNGLIYITTYTLHGLQPASLYEVSVLARNSFGWSDNSKIVRFATGGEVELPNYSTESELQDDFTEEDFHNEITQRSEVLSASMMFNSGSVNGRGGISAFIYSLCLINILRLIS

SEQ ID NO: 12949 - DNA, 3138 bp, DROSOPHILA
ggttcatcatgcccagacgcttggtgtcctcctctgaagctcgtccatcagcggcacaaacgcggaaacaggccattatgcagtcggcagccttctccaatacgtggccaggtgtgaatccttgacaatgcttctcgcaggcctgcgccaagtaccttagatccaggcacacgcggtacattagtggcaggcaccaattctcgtccttcagctgctgcaaaagcctcacaacggctccgcaggctgccgactgttgggtgtaggcttccatgtaaccaggaggctcctgtgccaggtgatacagcaccttcaggtgggcggacacaacttcgtccagtggcggtttcaggaatcgatccaccaacttttccggctgggcaatgtacaaattgtggttctgaacgtgcacgtctcgtaaggagagatacgtggccaaggactcgccatctaaatcctgggcggcgtgcaaaacgccggataaatagttatttacggtgccgaacattgtttgtgtttttcgcaggcggcaaaattagagatggtaggtcaggcactatctgcgaatgcgatgttttcatcggaaacttctatcgattgtctttgttttttataacgcgataatacaaagaatattttttcaaaagttttttttttaacattttattttattttattaaaaaaaggtatttatttacattatactcggtttataaaataaaactctgaacgcagaaaaagagttttttgttttaaattttaaaatttccctctgcagcgaatcgattatattccgcgaaggtcttttgcttgcccaaaagattctaaatttaaacaattttcgtacatatagttgtgatagcagagctgtcacaagacatgctgtttctagccagtttaataggcctttgagtatagttcacttagtaaattacaaattaaagctttccaaaaacgaagccagtgcaacaacatatttcacaaggagcaaaaggattcaaacatgtcgacaccgaattttctcttgagcaatggtaaaaatatgcctatgttgggtctcggaacttggcgggtaagtacttttacatagatatatattgttattaaataatagccagctgaaatgtgcatttccactgcatatttcacggtcaatgtcaaagctcttcggggtcaagcaaaagcttttgatgcacctcagctttttacgttttattcgccattttagagcccgccggaagtggtgacccaagcagtaaaggatgctattgatataggctatcgccattttgactgcgctcatatctatggcaatgaggcgcaagtgggagctgctctccgggagaaaatggacgagggagtggtcacacggtaagtgctgctttcaggcctaatcaatcgtttatctaagccataaatacatattgcactgcagagatgaactcttcatcacgagcaaactttggaacacacaccacaagccggatttggtgcgcccggcatgtgagacaagcataaggaacttgggagtcaagtacctaaacctctacctgatgcactggcccatggcctacaagtcgggcagtgacaacctatatcccacgtgtccggacaccaataaggccgcattcgaggacatcgactatgtggacacgtggcgtgcaatggagaatctggtggacgagggtctgtgccaggccatcggtgtgtctaacttcaatgagcagcagatgaatagacttctcagtgtggccaagcttaaaccggtagttcttcaaatcgagtgccacccgtaccttagtcagaagccattgattacgctgtgctatgacaatgccattgctgtgaccgcctacagctgcctgggatcgggacatacgccctacgagaagcccggcgcttatccactgctccagcatccgaccatcttggctatagctgagaaatacgaaaggactgcggcacaggtgctcctacgctttcagacacaatcgggtataattgtcatcccaagatcagtaagcaaacagcacatgttggacaactttaagcgaatctgggactttgagttggccgtcgatgacatacaggccattaacgaattggactgcaatgggcgttttatgaccatgaaggcgtaggtgttgctcttttcatttcctaggttttaacttgaaatatctcgaatctttctatttttctcctagggcctatggacatcctcatcatccatttgaacccaaagccaaagtagataattaatattaattaatattagaagtacaagtagttatttaaactgattgcctttaatgtgataagtaagattgtatgcggcgatctgcagagttatactgatgatgtccaggtacttcctttatactgagaagtctagcataattattgttatacaatataataatataatataattaaactgttttgctgtgtgtaaaatcgaattgtagcctttgagttggtgggcattttaagctgtatttaaaatgtggctgtttatttttatatacacatttattttgctatttttcatttaggcttcaatactaaaaccaagtagccattgcattccatccgtcaagaagtctctacacaaataattaaaatttactggcgtgcaaaatgaacactctaatgaaaattcaattggttaggcctgtttttcgcattacgttgaggaattatgggaaaccagagcgatttatgtggtaatatataggaaaatcaaatcgaacaaagcatcaaaagtataatttccacaaatattgtaggtgtcagaaggagtatgctagagctcccaaggtggtttgcttggacggaaatgagattccagtaattgggctcggaactttcaatgtaaatattatgacaatgtctgttttttcatatctatgccatagttttgataaataatcatatttttacgaagatatggatataaaaatttttacatagcgatcataaagagcctatatggttgaagggcttttgaaattttatagcgatcataacatatgtaaaatgatacattttagtatcatttattgaaatcattaaatgttttaattgatttagtttaatatatattttcttttatgctatatagagagtatatcagcactc

SEQ ID NO: 12950 - DNA, 918 bp, DROSOPHILA
atgtcgacaccgaattttctcttgagcaatggtaaaaatatgcctatgttgggtctcggaacttggcggagcccgccggaagtggtgacccaagcagtaaaggatgctattgatataggctatcgccattttgactgcgctcatatctatggcaatgaggcgcaagtgggagctgctctccgggagaaaatggacgagggagtggtcacacgagatgaactcttcatcacgagcaaactttggaacacacaccacaagccggatttggtgcgcccggcatgtgagacaagcataaggaacttgggagtcaagtacctaaacctctacctgatgcactggcccatggcctacaagtcgggcagtgacaacctatatcccacgtgtccggacaccaataaggccgcattcgaggacatcgactatgtggacacgtggcgtgcaatggagaatctggtggacgagggtctgtgccaggccatcggtgtgtctaacttcaatgagcagcagatgaatagacttctcagtgtggccaagcttaaaccggtagttcttcaaatcgagtgccacccgtaccttagtcagaagccattgattacgctgtgctatgacaatgccattgctgtgaccgcctacagctgcctgggatcgggacatacgccctacgagaagcccggcgcttatccactgctccagcatccgaccatcttggctatagctgagaaatacgaaaggactgcggcacaggtgctcctacgctttcagacacaatcgggtataattgtcatcccaagatcagtaagcaaacagcacatgttggacaactttaagcgaatctgggactttgagttggccgtcgatgacatacaggccattaacgaattggactgcaatgggcgttttatgaccatgaaggcgtag

SEQ ID NO: 12951 - protein, 305 aa, DROSOPHILA
MSTPNFLLSNGKNMPMLGLGTWRSPPEVVTQAVKDAIDIGYRHFDCAHIYGNEAQVGAALREKMDEGVVTRDELFITSKLWNTHHKPDLVRPACETSIRNLGVKYLNLYLMHWPMAYKSGSDNLYPTCPDTNKAAFEDIDYVDTWRAMENLVDEGLCQAIGVSNFNEQQMNRLLSVAKLKPVVLQIECHPYLSQKPLITLCYDNAIAVTAYSCLGSGHTPYEKPGAYPLLQHPTILAIAEKYERTAAQVLLRFQTQSGIIVIPRSVSKQHMLDNFKRIWDFELAVDDIQAINELDCNGRFMTMKA

SEQ ID NO: 12952 - DNA, 3186 bp, DROSOPHILA
gtccgtaaacggtagcgcttggaggcaaaaacattagatcccagataaatacgggcgagttcattgtacaaatgtcagccacggaacgcccacaatgcacgaccgccaacataatccccatcatctacatcatcatgatgggatcgtaaaaatataaagtggagaaaagtggtggggatatgatgggggagggactctggaaggaggtacaatttgttcaattgcagcagcctcttgggcgtcgcaaacgcgaatctgtctgcatctaaagtagtttttccactctgacacagtgacctcgtgcttggatttttccatttccccccagttttccgttctccattctcttttcgcaccatttgttgttgttgttgttgttgttgttgttgttgttcggcttatgactgattatagctcacgttttggctagtctatgacggagtctggagaatttgtcatcagacaaacaatggctcccactttggttttcttggaacccattcattcattcatacggctgtaaatatttgcataactcattaggagagatgcttaagatacgagtctctatacgccgagtcgtttgcagtaggtcgcgatcgcaaaaggcgaaaatattataatttatttatatattattataaatatattagttttaggggagtggtgcggacagttcccaatcggtatttagctgctggtctttagtgctcagccttttggaaagattgtgtaaacagtttaggctgttatgctataaactgttatacggaaacatatatgcaaatttttggaaatttgaaaattagaaaagaacatggattccttgaaatataattaaaatattacataaacacttcagatgtttaataaaaatgactttggcaatcctaaagcaaataaatcaaatgtcaattagttatcgtcgataaacttaaggcccggccagtccgtgacacttcgttttaacagtcagtcgaatcgagtgatttgcccaaaaatgaatacctacgacgaagtcttggcaacagtgctggacaatttgctggcatccaagaactgtgaggtggtcgacgacgtactgcgtcagtcgatgctggaacttttgcgtggcagtaagtagctagaagaaaattcgtaccatgtcaatggtattgttaatcaatgtgttcctcgagaattccgtgagattgcacgtcagactaccaattggtccaatcacgctggtcgctgtgcacccagctacttcgatctggagcgcaccttcatccggatgaacatcaaggtgggcgagctaaaggccatgtacgagggtcaaccggattcgttggtcttggttgagtgcaatgcaccggagacacaagaccaggacttccacagtgtgccgcaacccgtgctgagctccacaaaggccgtggaattggcctccaccacgtatattccggaccatttgccaccatttccaggggcgcacacctataagagttcgaccattgagaaggttacggatcgcagctatgtggccatgaggaatcgccatgccgagaatgagctgaacacccaaaacgccttaaatcaatactacctgaggtgcaaccccaatatatcgctgttcgaagaaacccaacgcgatggaagtggccacgttttggatctaggtccacccaagaaacttccttattcggacgccctgatgccaagaaatcaggtctttgatacggacatctatgctcccatcgaggtgataacccacaaaggtatttaattactatacatacccagtaatattggtgcataaaacgcttttacacagccattatatgacattttacgtaagacagggcagagacaggccctagagtttaagtctggaaaactgattttccttaaatcccgcggactaaaacggacgtattttgtgaaataacttagagactgcactgagtaaccaaagtggaacatttaatacttttgatcgcttttgcctgaccaagcttatttcattgcgcagccatcactttcacatggtcctaacaactttgatcccgacagccctcgactgccgttacttggagaagcccaagttgcacagttcacgcccatcctcaggaaatttcgaagaggaagacgtggaaatggaggagccctgcagtccagggggactaggtattgaaaaaccgaattaaactgcagctcagtaagaggtgaaaagcacacgaaatgtttccattgccagaccaagctactccacggaataaagtgtgaaaaaattaatttatttcaattacatttcattaaacactgccacacgttgcgatgatgctgcgagagttcgaaggagcaagaggtcctgcgcctgctgtagcagcagatgctcctcctgctgcttctggcgaacgcctgcgattccaaagtattaaataactttgtaatttaattaactttgacgtcggcatcgcatcgtctgctctgcgacgcttaactttgattaacgtttgcaatttttcaacaactttcgaccgaactttctcgccatcgagcgggcgacactgcgtccaaagcgtccgtagccaaaggattgtgactgtgatttcttcgcctggctgggattacaagggatttgcctcctcctcttatcttccgctaaagggcactacccttagttgcttgaaattttatctgacgattggaagggttaagattcaggggggaatattgaatgcaattagagatgctgggtgatgtttggatggggtggaacctccctggatgacaagctaataatcccggggaacgagcacaatcacttggaaaactaattacaggggaagagtcgtggcaataatcaataagtagagccactgccgatttttacattccgataggtataaccattcaagagttatatgtcaacttgttgttggtagttaaagacctaccagtttttccataacatttatgtcccttttttataacacgctaaatatttattgactgctattgcaatatacattttatatgtttaaaatacctgttttctaattatatattccattgagcgttgagcaaaaacgtttgtgtgttatttgttttagccagaataaatcaagtcataagagctttgccagttaaatttggatctaaaaatgtattcaataaataagtctaatgagctggaaacatgac

SEQ ID NO: 12953 - DNA, 828 bp, DROSOPHILA
atgaatacctacgacgaagtcttggcaacagtgctggacaatttgctggcatccaagaactgtgaggtggtcgacgacgtactgcgtcagtcgatgctggaacttttgcgtggcaaattccgtgagattgcacgtcagactaccaattggtccaatcacgctggtcgctgtgcacccagctacttcgatctggagcgcaccttcatccggatgaacatcaaggtgggcgagctaaaggccatgtacgagggtcaaccggattcgttggtcttggttgagtgcaatgcaccggagacacaagaccaggacttccacagtgtgccgcaacccgtgctgagctccacaaaggccgtggaattggcctccaccacgtatattccggaccatttgccaccatttccaggggcgcacacctataagagttcgaccattgagaaggttacggatcgcagctatgtggccatgaggaatcgccatgccgagaatgagctgaacacccaaaacgccttaaatcaatactacctgaggtgcaaccccaatatatcgctgttcgaagaaacccaacgcgatggaagtggccacgttttggatctaggtccacccaagaaacttccttattcggacgccctgatgccaagaaatcaggtctttgatacggacatctatgctcccatcgaggtgataacccacaaagccctcgactgccgttacttggagaagcccaagttgcacagttcacgcccatcctcaggaaatttcgaagaggaagacgtggaaatggaggagccctgcagtccagggggactaggtattgaaaaaccgaattaa

SEQ ID NO: 12954 - protein, 275 aa, DROSOPHILA
MNTYDEVLATVLDNLLASKNCEVVDDVLRQSMLELLRGKFREIARQTTNWSNHAGRCAPSYFDLERTFIRMNIKVGELKAMYEGQPDSLVLVECNAPETQDQDFHSVPQPVLSSTKAVELASTTYIPDHLPPFPGAHTYKSSTIEKVTDRSYVAMRNRHAENELNTQNALNQYYLRCNPNISLFEETQRDGSGHVLDLGPPKKLPYSDALMPRNQVFDTDIYAPIEVITHKALDCRYLEKPKLHSSRPSSGNFEEEDVEMEEPCSPGGLGIEKPN

SEQ ID NO: 12955 - DNA, 6373 bp, DROSOPHILA
ctgatccaaagtgcagcattgcttacactgaggcctgaaatgttaaaaatgttttggatgaataaaaaagagcaatgggctcaagcagaaactataaaaagttaatataatttttgttattaaaaactgaaggaagaatcatatttagtcagtggtatggaggagcttactaagtcaagctaagcatttttggttggaatatttaaaatgaggtatgaaatttaacctgatctaattagattaacatattaattaaacaattttcaggtcttcttatggaatgattatagcatagttcatgggtatctttacaactccaaagctagattaattaaatgttattgaacccacttgatggtatccaatccgaaatcatccagtttttcgcaactggaacacattaactgggccttaataaaacccaacgcccggcagtcggcggccgtcaattcggcttgaatttgctggcactgtagggtataaaatatatattaaaaacatgtcttagcttcagacataacttacacttaaagccagtagaagaaatatagcacatttatgcatttttgtggctaaattctaattaaatttactacgtccacgtcgttgtttacaaaattttcttagcttagtgatgagtagaagggaaaataacattatttaggcttatcgattatattcgggttgcttgtcttttcatcgtttagggtattccgtatactgtttatgaattagacaattaatcaaacttttgaacagctttaataaacttattattattatttcttgatattttttcagcaatttgaaacttttgtcactataaaagtgtacaaaataatttcaggtttttatattcaagtacgcaagtttattttccgatgttaataactaatttcatgtgattcgatagcttatcacgcttacatccctacaatcgatacggactgcccagcagctggccaccactagctcagaaatcgaagattattcgtggtggtgcatttgtttttttcgcttcgctcgcgaagtgagcccagttttaaattatttaaattgcgtatagtgaagccacttgaaagcgaaacgcctactgtcgcagttctgccaaaaaaccaacagtattagctgtgtgcgtgtttggcaacaacaagtcaacaaaattcgaacaaaatcaataaaacggaaacgtgagagagcgctgcgcaaaagagaaaagcgaacgcaatcgcaatcgaccaacgcatagaagaaaacaaggtgaataaatagaacatggcatagaaaaggcgaactagaatcaaatcgaattaaaatcgggtacagaaatagacgtgaaaagaaagggcgaagaaagggaaacaaataaccgttacaggagcactcctggagatttaaggctctctctccccctcctcagcactttagccccagttgtgcgtttgtgtgtgtacatgtgtttatgttttgtttagcacattaataatcttaattctgctagatttcgccactcaggtgctaaacgctaaaaaaaaaagtgcacactccgataagtctacccctgtgtcggtgtacttgtttatttaattcatatttactcaagtaaattaattcatttgcccttgtacaataacaacaagcgccgtttgcttggaaactcgttctcgcagtcgaccgcctcccctcttcgctcctaatcttattctttctctattccactgcaataccactgcagctgtcggtgcctgtgtgtttttcattcaatccaggaaattgccccttgagagaccttccattcagacagctccatctgcatcttcttcagcttcttccgcttgcatcttcatcctctctcttgtgctcccggtcccgtttaactggtttactttatgctttattccactgatgcctcctctatcgccctctcccttgcgcacacctgctgcttggcagctgtccacgcgctcaaatttcttatcaccgaacaaactccggctgaaacccaaaacctggcccaaactgcgttgttacttttccacggcaattccctaatttccaacgccttttgtcacggccctgttgctttctccctctcgagagctctaactccctctccaatcctatttttacatacacgcatacgcagtaaaacttggctatgacaaaccacatattattctatagataccaaatactgtttttttaatactgtatattgttagatacaaaaacacttttggaattacaaatccagatggaattattaaaaaaaaatatgtatatattttgcacaaaatttctcatctgtttcaaaggtaattccatatgtgttgacatttagaaatgtaaaagcttttctatttattttaaagattcaaaaattatttttagccgaatgcatacgcattaaaagcaaatcgatttattcggtttaaacatctattgtttttcaatggaaaaaccagtgtattttccagagaaccttacctaagtttttatatgtatatattacattgaaaataattatatgccagctttgaagcatgttaacgataagtgtacttgagcccgattgttagtgaattcttaaaaaataagaatgagcaaagtcgctttacattgggattgattgtgaaatcctccaaatctttgtgtgtcactatagagtcttatttaaaatgatattaccaaatgtattggcaaaacgcagataagttcaactgtacaatgtgcaatctctcggtttcgtgcaattttgcaatttttcaaatgcccgcacatctgactcatccacaggtaactgtaattactgcctagcatccacttgctttccgcacctgtggatggtatttgtcaccttatcaatacggtttctctgtgttgactgtgattttagatattcctgcgcacgaaaaaaattggacacctctaaatttaattatacaaatagtactgtttatgttttcctatatttattgaagtattttaaagtgtgtatacaaaagtaattattgagtgcatatgaaaccaaagtcttttgtattctgatacaaaaatcatatcatatatgatatcaaaatttatttctgtgtactctgctgtttgtgaggtcaatttttgataagccaccaggtgctcatttagctcgttggcgcctattagctcattattcaagcttacgtccggctcacccacatacccacagatataaaaaaaaactatacaaaaaacccatatatgcactcgcagaaattagggccaacttaagcccactcacgcagtttctttattggcttgaactatttttgttttgctcgtttggctccgtttatatttcaattgaccgaaaggtcatcttaattgcatttgtgttttgcgactgtcgcactgtcctactcgcactcgcactcgcactcttctcctgccatttcagctgtcaactttcactcgtgagctttgttgttgttatttttagacgtaggtgcgtgccacacatgtgatgggaggaaaggggaaattttatggggcttagggctccgttgagctttacaaagcaattggacacggtttagtccaaggactcgcgactgtggattgagattccgactagtgacgagagtcctagaaaataaaagctaaatgctatcttatatataattgactgtttgaaataaagtacaaatattagatttaatgtgctaacatccaaacaggtgacgaaagcaaaactttttaaaacgaagtgtatatttattataattgcaactgtttcgctcttctttccttcacttccaagtagaagaatataactttagttttgattaataatgtaatattgcatgtttgaataaaaaaatagttcaatttcactgacatatttcctaatataaatttagacagttaagttggcatgactagcgtttattgaaagcacttagaaagttttaatttacgttaagtggaattccgaaaattagtgtttctgaaaacgacactgttattgtggatcacaactaaggcgagcactaatttgtttatgttttttacgcccactcaaatggtcgccactcaaatgttgcttacaaatgatgtatttgtttcagcagaattactcaacatcgttgtttctgttgatcattcgaattattttgtttatatacgcaacgggatcagttacattctaatgaagctcattctttctccggaaaagatcttgtttataacaaggcgtttcgaaatcctaaggttaaatcaattttttatacgtttaaatacatcttgtattaaacagtttttatatattgaagtgcctgaagtgttcgctatgttaagtgagagtgtaaacagaaaaaccaattgataatgaatgcaggctgtgcaaatgccacagccgcttgggttccgctcgcgattccggccaggtaaataaacgatgtcatttttttgttaaaaatttatgaaattcgattttctgtttctcgttctcacttaggtcgaggagcataggttgtaattgtgagaaggaggcggctggcggtgctaggcaggcaattaacccacacagacccgaacacgagcttacatttttgatttgtttttaattgcacttcgtttttgttttgcagccgcctgccagccaaagccaagaattccacattacaaaacaccttaaactgcattgccacattcccaagtaagctgccatgagttaagatcaagatgcgagcccaggatctgctgctgcttgccaccgctttaatcggcgcttacctaccgctcaccgccgcctgttcctcgcgtgccatcgctaagccgcggccaacagctgcaccgatcctgccgccggataatgtggaaatatccacaacgccgagaccgaatgtcaccttcccgatcttcgcctgtccaccgacctatgtcgcctggtattgcctgaacgatggcacctgctttacggtgaagatccacaatgaaatcctatacaactgcgaatgtgcgctgggatttatgggtccgaggtgcgagtacaaggagattgatggctcgtacctgccaaccaggaaccgtgtgatgctagagaaggccagcattgttagcggagcaacgctggcccttctgtttatggccatgtgctgtgtggttttgtatctgcgacacgagaagctgcaaaaacaaaagctgcacgacagcaccacaaccacaacgaccgacggtggctgtcagaacgagggcatggacgaggtggatggcttgcgacccttacgtccagtgagacgtccctttggaccctgccgcatcctatcgctggaggaggcccaccttcaagcgaaagcctccaatcgccccaggcattgcaacgaacttttgcgctaactaattagcctggctgctcatttgtttttaaatgtctaacatgtccaactgtttattttaactgctaaacgaaactattatttttgccatctgattgagatggcgaatgccgtagttctaagtgcctactgacgtgcctataacacatttagatcaagtattaacgaacgaaaactgattgctcagagagagataaaaataaatctagatataattcaatgcaattttggcagctagccgcccatttatttattatacacctaattttattaaaaaaaaaaacgcgtgaactaatatcgtcaataaaagcgagaactaaatcaccagctttactttcaatttagataatgcaaatttcgaatacctttagaatttgattgggaatagtttgcacaaaattcaccatggccttgattttccttttatttcagagatgcatgtaaatactaaacagttgatctgttaagctacacgaaaataaggatatcttaaatttagtatgtaagaaagaaaagaatttcttaagaatcttcttttctgagacgtcaccttaggctgtcaaaaaaattcatatgctttgtaaccccttaagcactgaattaattttcccgttttccgtttgtaatttccagtcatgccgcacaacaaccagccgtctcccggggatgatcagttgggaccgccaaaggcggacttcagtgctccgccaccgtacgaggcgaacgttggccatggccagcaggtagcactgccggctcagatgccaccgctggccttggccacacccgatcccagtcagatcccgatacagatgcaagtgcagctgccgagccaggcggaccttatgaatgcacaactgccgccagaaatacacgggaagttgcccacgtacgaggaggttcaaatggaaaagtcgctgaacggagagctgccgcccgcctttttgactttaccctcctcgcagcagctaccgccgccgccgaatccgctactgccgcca

SEQ ID NO: 12956 - DNA, 1008 bp, DROSOPHILA
tgcatttgtttttttcgcttcgctcgcgaagtgagcccagttttaaattatttaaattgcgtatagtgaagccacttgaaagcgaaacgcctactgtcgcagttctgccaaaaaaccaacagtattagctgtgtgcgtgtttggcaacaacaagtcaacaaaattcgaacaaaatcaataaaacggaaacgtgagagagcgctgcgcaaaagagaaaagcgaacgcaatcgcaatcgaccaacgcatagaagaaaacaagccgcctgccagccaaagccaagaattccacattacaaaacaccttaaactgcattgccacattcccaagtaagctgccatgagttaagatcaagatgcgagcccaggatctgctgctgcttgccaccgctttaatcggcgcttacctaccgctcaccgccgcctgttcctcgcgtgccatcgctaagccgcggccaacagctgcaccgatcctgccgccggataatgtggaaatatccacaacgccgagaccgaatgtcaccttcccgatcttcgcctgtccaccgacctatgtcgcctggtattgcctgaacgatggcacctgctttacggtgaagatccacaatgaaatcctatacaactgcgaatgtgcgctgggatttatgggtccgaggtgcgagtacaaggagattgatggctcgtacctgccaaccaggaaccgtgtgatgctagagaaggccagcattgttagcggagcaacgctggcccttctgtttatggccatgtgctgtgtggttttgtatctgcgacacgagaagctgcaaaaacaaaagctgcacgacagcaccacaaccacaacgaccgacggtggctgtcagaacgagggcatggacgaggtggatggcttgcgacccttacgtccagtgagacgtccctttggaccctgccgcatcctatcgctggaggaggcccaccttcaagcgaaagcctccaatcgccccaggcattgcaacgaacttttgcgctaa

SEQ ID NO: 12957 - protein, 217 aa, DROSOPHILA
MRAQDLLLLATALIGAYLPLTAACSSRAIAKPRPTAAPILPPDNVEISTTPRPNVTFPIFACPPTYVAWYCLNDGTCFTVKIHNEILYNCECALGFMGPRCEYKEIDGSYLPTRNRVMLEKASIVSGATLALLFMAMCCVVLYLRHEKLQKQKLHDSTTTTTTDGGCQNEGMDEVDGLRPLRPVRRPFGPCRILSLEEAHLQAKASNRPRHCNELLR

SEQ ID NO: 12958 - DNA, 29046 bp, DROSOPHILA
ttcatatctgaattacatcctgtatgcattattttccatctctactataataaccaaaagtcttaatatttgttgaaataacacaaacataaataggtataagtgtttcttggaatatttaaaaattcactgctgacgaaaagtctgctggtactcctacacttgggaaaatcccacatttattacaattttccgacttttcgcaggcaatgtgtctgttaaagcagttaaagaaaaaccaatccaaaaactacccaacattaggattatatttatttaataatcaggtaaaatcgtaagataaaaacgtctataaaatctattattaaacgttgttaaaagataaaaagatatttcataagaaatataattttgcattttcttatttatgatagtaatgaaagttgttattacacaaaaaaaatatgataagaacagttaaaatatgtaaattattgtcttcgcagcgacaaaatatctacttttttgtcaatgtatgtatcttctagattaattattatatatatatgtatgtatgtagattttggtcgctgcaaagactttcagttccgtgatggtgttgtcaattagggcgcacaccatgctggccgccttatcgccatcggtgattccggaccgcctccgccatcctgatggcgatgatcctgttgccgccaaagcgtttaggccctcaaatggaacggcactcgggacacttggccaaaaccaaatatctgcacacatggagagcaaacacaaacacatccgactatcaagcgagcatcccgaagccatctctccctctccccttggctgccagcagaagcatcattattaccatcgtcatcattgcccactgccccgcccctcccgaccaggccgcccccttttccgaaccaccacgactgtgctgccaactgcgacgctgacgtcgacgtcgagagctgtggcaagcgattcgcagattttacgtttcagtttcgtgcaaaacgtggaagcggctggtcaacccaagaaaaacaccacagaacactcagaaatcattcgaaagaaaattggaaaatttgacattggtcttcagactagtcaacaaaaaaaaaaacaaaacctattcaaagtttgcaatcatcacgtttgattaattgcgctcagttggactaatttggcaatctgctggttcagcggaggaaactaacaaaaaaccgaagaaaaactgcaagttgcgctgtaaaaaccggaaattctagatctctcggatctcacgatcccagcgtatataaacaaaacaaagcggcacctttagacacacaacaacaactaaaagaaaccgaagaaaaacccacgaaaaaagtgacacaaataaagcaaatcgcgatcgctgtgtccagtcgatccgcaaaaaataatacctatggcccccgtatacctataacacccataatacctatacctataccccctcccgccgagaaacgctgagtgttgagtttatttctgtttctgtgtcggcttcagcggttttttcgcctttttttctgttattattgccggccagaagcgaaggaaaaatcgaaatcgacggctagtcgcggaaaatcgtgcgctcttaaagtaacatatttatttttaacaatttcgcaagcgttcaaattttgctccagcaaaaaatcagaatcagaactcaccaaccaaccagacaatcgcaacctgaacaacaacaataaatatagatcggctgtgggatcgttaagtaggaaaaaaagaaaaacaaaaaccaaaaggctaaaaaaaccaaaaaccaaaacaaaaaccaaaccaaaaggcaacgacgacggccggcaaatttggatctcaaaatttagctcggtgagtaatcgtgggtagtgtaaaaagtggaagccagcagccagcaacaaatcataaatgcttgctttccaaaatagaaacaaaatgtggagataaattcgtttgatgattaagctttgagtactataattaggcgagccgatttaattagtacaattagcaaattacacctcacatggcgggctaaatcttgatatttggagtggaagtggaagttggaaagtgtgggttttttagatactttgagatcttgctaatgcagtcattaagttcgttagattcgtagattaatgcgtctttaaacatttaaatagaggtggaagatctaactcgtcataatgttaaaataaatatgataaatataaataagaataaaatgctaaaatgtctgatttaatggtatatatcccatatatcccacatatatataaattaaaaaaggcgtgtaaaatattttgaattttcttgaacatttcaaagttcagaaagcgtgataaattattagattcttcactgacaaatggtaaatatataaaaaattccaaaaatgtatgatttacttatgcttaataattcaagaaagataatattcgagttttccgcttctttcaaaatctgccagctatttgcattcaggtgaccccatttaaattgcttttcttcatgtcgcgcttcaataactcttcgccaactcagtcaaggactttcgaaatctattccccaacttctccatacgcataaatgtttatatgtttgcctagccaattacagcagtggcaacttaagtgaggaactagcacaaggacaacggaagtacttgctccataaaaacaaatccaagaccataaatctgtatcgtccttatgtgagtttgggaaaaccaaccagatcccagtgaaaatactcgtaaggaaaacaaagcgtgtcgctgtatttatgttatgattgcatttagccggcattatttttgacgattattgccatttgggttttattagccagaaacgcatgggagcgacaatccttatttcgtcaaccgaaaatggccaatgaattttcgttttcgtaacacccccatcattaattcaagtgaatgcacttattcagttaattacatatcctggcgtatgaaaaatattattaatgacaacgcctacagcaaattctctttgactgtttggaaattcgaaaatacaccgatgacgatgatattaatatgagacgctttctttttatgaaaaagtaagctatctataaattcgtgaacacatatttttaaacaaatcgcctcgcgctgttctgaattaattaagcacacaatttatgccttaggtcgcccaacgaattaataaatgttgcaaacattgcaccccaaattaatttcccctatcaaaaggtcaattggcttgcagtcacaagattaggaaatcttcttttgctcagcattttaaaatatattcgctgattttccgaataaatcaagtgtctttatgttaggtgagctaaggcccatgggaaaagtttcataattttttcgaggaaatttccttaagcataaaagttataccgaataatttattgaattcagctcataaatgggatttgtgtagaaatattttgaatggattttataggaatataagtaatttcaagttgttaggggttccattctctggaaaaagtgcaaataggaagatattatctcgaaatttgtatattatttggcgtagcttttctaaagtaaacgtcataaaacgtttattgacccttgcacggaatccgtctcttaatcagaatttgtaaatccatttctgcagaagcagataaccctgatcttgcgaaatctcacaccccattcacctgatcttagcatcttatctcgcaggcactaattcttgagtttaacgttagtacgagccatatacaatagtatatactttttattgcgttttccattcacgaaaagtagaagcgactacaagagaaggaaaaaaaaaaaacagagtgctggccaccggaagattaggcaacaatttaacatttggctggctggctggcaacgacgaccccaatttccatttccattttcaaatttggcagccgccaaggtgaatggggccgatcttcagagtgtaagtgggtatacatatgtgaatatatatgtatatatatatatatctgcatataggactgaacgatcggctgagatcggttgtttctgcttcttggttcttttggtcgctttgctaatttacagcccgagtgattgtctacaataatttttgaaaaattattctcaaaacaatccatgcactttgccttagacaactttaatttatatttccgcactttaatgcgttggcgtttcattttcatattttcctaccgaaaaagtccaaacatttcgaacgcgtacgtaaataatcctgagtgacagtcgttcataaaattaatgtatgcgtaataacaataataataaaaaaaaacaaagcgattgcttaaggaaatattccaagaaattgttgagtggtatttttcgcaaatatcaaaacgttctacaattgcaaggttacaataggttacaataaagcgatatagatatgcatatccatacgtatacttaatatttcttgagacgcagttaaatatatttacgtaaatccaggtttatcagcggttgccttttgaggcgtgtcaattgcaatgggggaagacatttgttacgtaggtaagacaactgcgaagttaagcgagatgatacaaggtttaaaaactaaaccattttaaattagtcaaaaaaagcatggaaaagccaatcgattttcgagctacgtataattggaatgactgggaagtacttctttattttacataattgctttaatgttttatgcatttcttgtctttttatatttgtgtgaactatattacgatttcatcactttctcatccattgtgtatagtacttatttgcacttgagcttgatgtttctacatttctgcaaatatattccctttcaccgaaattggcaataaacccttttgatgctcggtagtcaaatgccacgcctgactaatctattgtcatcttcttggccttcgaacagccaaagctgtagttaatgatgcgcatcaattcctgccctccagtgcacattttggttggcgctattatgcatcctcgtcgagtcaatcgaatgctcttctatggaccaactggcctagattgccccggccagcgcttaaacaataaaagccactcaggccagccaagaatatgcggatagaagcgccatgtagatggatattgattttatagtcggatgcgtccatctcgattttgcatttcgggtggaccgacctcaataccgttttatcgactttattatttcttgagttaaatgcatcggggcattaaggcgaacctcaagaaattgcctttgtgtctggggactcgggcgggggattgccttttgttggcgcagccgggcagccatcaaattgaatcaagactgcagccattgttattaataatattagtatgtgatattaacgggactgcagcctccattgtgccggcggtggaaaccctttggcacgcgaactcaattttcctaggctgacagtttataattccttttgttcggacgcctgtcgctctgttgataaaacacttgttgctcgaagcatagtagtacacatgtatgaacatatagtaccacacacacatctgaccgacggccattccatttcactttcaatttacgaacactacaatgattggaccgggcccaaaatacaaagccatcatcactatcctcggctggttaattaaacgaccatggtctggcaatgggagctgactgggctggacttggctggtttggatggtgggatttggcgtataaatacaccccaaggcaatttgaaagaacaatggaggcggcatttagtcgagcgtattgggcttttaatggatatgtgaacagaacttaaagaacgggaaataaatggaaagaatgcaggttatagcgtaattgtttcctcaaatgttttgaggtcaaaggcaaagatatctatagtgtactaccgtaatataaataaaatatacagtataaatgtattgatttgctgttcaggaatatcaaaatgtcttatttatctgttttagtatgccatgtaaatactcttgatacgattaagatcaatacttaaattttaaattgaagtttaagaggcgtactcaacataaatagaacttagaaattataatacgacttttcagttatacggttatttagtcttgaaatgatttacttgggtagttaattatattttgacaccgtaatacattgtacttaaatcgttatgtgaactgttaaaccaacagagaaacgttacagctttgtaattacggcaagtgtaacccctttcccgaactgccttcaatcaatcacactggctatttgctttgttatccaaatataactcgacaattcatttccaatccattcgattgcaggaaaagcgacaggagacaacgggacgacaggaactccggcaaggacaatcggaaaaccgcaggcgaggattgcgacagcgatgtccacggcgacttgtgcccgcttctgcacgcctttgtcatccggcacggcaggatccacatcaaaattgacaaccggaaacggaagcggcaacacgatgacgtcggcgtacaaaattccatcaaacaacagcacaacagcaaatgacagcagcaacacagagacaacattcacattcaaattgggccgctcgaacggccgaagtagcagcaatgtagcctcaagcgagtcatccgatccactggagtccgattacagcgaggaggatccggagcaggagcagcagcgacccgatccggcgaccaacagccggagcagcagcaccgccaccaccaccaccaccagttccgctgaccatgacaatgacgtcgacgaggaggatgaggaggacgacgagaacgagggggagggcaacggccgggatgcggatgacgccactcacgattccagcgagagcatcgaggaggacgatggcaatgaaaccgatgacgaggaggacgacgacgagtcggaggagagcagcagcgtccagaccgcgaagggagtgcgcaaataccacttggacgactaccagataatcaaaacagtgggtaagtcggatgctgtttacattagccccacgggtcgtatgattgatgttaaggtcccgcgcctttcaaccttcaacttgtcgcgcggttgcggatgatagtgtactcggctcggtttcgatcaatagtttggcgtgtttgttgattttcccaggcaaactgtttagactgatgccaacaatactctttcgcttctaggtcagattgaaagtcatggtttgatcaggtcaaaggctgatttatggatgttgttttaacccaaatagcgcagtttttggttttgctttaatacctttctaattgtagtaaaatcgtttggactattataaaatgtttggacttaaaaatgtgtattaactcctctcttaaaataaaatcattgttttacgaaacatttccaagattcctcaaagcaattatccacttgctgtctggactgcttcgtttgcagttagccaaacatttgtggctaaattcgtgggaatctcttttattcctgtcaaaaatgaaatttctttactttgattataccatttaattaaaagagttttctcacctgttcaatcaattcgtttccatccccgattgtttcatctgcagaaggaaaaaaaatgtattcaaataccattgttttactttttctatgccttttgtttggtattctttgatttcgctcaacgatttaatttcaaatatttattacctcatttttcgagcacgtcggtatgactgagcttcttgtggctcagcgtcagcttcagttttctattgctttttattggctttatgcataaataaattcttattgattacgcaaattgaatgaggcagtgaggaagactaggagctcgtacgagtattatgattattatgagcttttcgcaccacagcgggccagggaattgttttcattgctccgcggcgatctggcttgcgtaaaatttaatttagacaatatttaaagtgagttcgtttacgtacgattatatattcttggactctgcttaggatcatcaatgggtcttacgtactcgcatagacgctcggccaattaatgcccataatattttgatttgttttcccattttgacgtcttccgtatgagcaaagcagtcctcttttagtagccgactaaatttagtatactattcaaacactcattaagtcttgtggcataaatatttacttcagtttgaggtgagttcagggcattttcctgatatattaccacaacatttcctctgctacacgtgtgatcaatttggttttcccttactatcaaaatcatttaaatgtttcgttccaaaatgctaaggccaactcaaacaatcaactaaatattgtgggagtaactaatggcttttctttggactacaattaccttttaaattgttttacgtttcgccgtcttttgtactttaacaaattaatgaaagctatatgttttaagaatccattgtgggagctaatggcttttagctgcctacttaaaatcgcttctgggaatattgtaatttcatttagcaatcactttttcattgtttctaagtaattaaatttaatggatactaagttttcgcactctcgataccatctcaaatcaaatgcttttatcaattacaagttattacaaagttttctataggtatttttataaaattaatggccagtcagttaatgcaaaaaggctttgtataataaatgtcaatcattatcgtgtataccttataaatcttgccctatgtcaagggataagatatactgaccatttcgactatgttcgatcattgtttaaagttaatcaatcaacagcacttccgcgatatgagtaattccgctgagttcccttccgtatctgctttccaccgtatttagagtgtaccacacgccgtatgagtaatatggcatggatttcaaacaattgccagagcccagaaggtattgagtgcgattttcgagagaaatccgtaagaagtaaataaaccagaccggatatcatgccatgcgtgtgcatggtatcccagatgaaatgggaatgggttgggttgccggattataaatggcagtgagtcacgcttctattagggcatgcggataatcagccggtctagtttatcccattcccctgccgataataacaataagaggcgatggatagaagtgaacatatcgccataattgaggaaaagccagtgtatgctgaaaacaatatggcaagaaaatatgaacaaaaaccgcactgaaacgaaacaaaaacattgccaactctaaacatgtgcccctcaagatttactataaatattgatagttgtttcgcaaatcccattgatgaaaccagcgacctcaggtctcctttaaaaaagggggttttttctgagtgaagatttcccaagaaatgttttcaaattttcgaaaacaaaacagtataacttttgttttcctctcgggaaacaaacaaaacatgtttttatttgttcacgttctggctgcatgtgatacgatggatcaacaatcagaaaatgccattagctttggccttaaacctgtcaaatcaacagtccaggtgcaattaacaccgcaatggaatggactttggctgtaaatcgaaaaggaaatgctcgtctcgggaaactggattgaagttgaagtcttgcctgtctcagcagcaatgcatttatttgagtgaaagtacatgtcttatcattgctaaagtatccgggaagaaagttcgcatttctttaagaagccaaaccaggatcttttgagggattgtaatgaaaatgcatcaagtaatcaaagtatgaactaaacttaaaactttgatgtgtcattaaattatttttaatgatgcacacatccctcctttaataaccaagatcgtttgcggatccttaaccaaaatcccgaaaattggcacacccaaaaaaattcgaaattgctgaattaaaagcgcaaaacggtctgatagtcattactttggaaatgtgaaatgtgttctcgggcaatcaattgggtcattaaaaattctcaaatttgcctagtgctcgaacattgtataaattgttggaaagtgcgctatatattcggaaaggatcaataaccccatcagttagcgacgaaaaagttataaattttgttcggtggcccacttttttgactaagtagaacaaatgcggaaatctctgacaattgaggtgctgaccttatgtttccctcaggtctccgcagccaatatatcaacttgacaaatattcccagtgggggtgtctgtactctgcggactttttaacggatcgtgatgaggtatatttttgagctggcaatccttttagtctgcccattgattgatggatttggcaaagataaatatttacgcacgattctgggaaacacaattcagatgggacataaaattggccaaaacaaaagagtccgatgccgtttgccaattgaaatcaaattgaaatcgaattgaaatcaaattgaaatcgccgagtgtctgacggcgtgtgtggcagggattcctttcgggactgtcttttgtgcttttagcattaattgatttttaaataataaaggccaatcaaattttttttttgtcggatagcgaacacatgtcccagtgttgttggtccatgtagaacaacaagttgtgtgtcgacattgcgtctgcaaagtataactcatagttcaaatggaaaatggcataggtattcctgatcgcttttttgttgtgtgctaagtgcctaacaaaatatatctgtattttctgtataagtaataataatttcgactgtgctcgccgcatgaaaagacaaaatcagtcaacgggaaatttacgatcgcatggaaaatttggattcgtctcgccggatctctgtaaactttgcgaagctcccgaggaaaatgtgaatttcatttcaacaaaatcgagtcagcgtataagcaaatattatagaaaaatattatttggcaatgtgccgaaaaccaaaggccccccatcactcgaccccccttttttttggaggggaggggggctgtggtctgggcgatttttgagttttcggggacccagttcggatccaagtcttttagacattaaactagcatatgcatataaaactgcgttaaaagcacacttttcgcctcttttgtgtcttatttaaaaaggtgacctaaaaatgcatattgcatctggccaatataagcaaattgaactgaaatagacggaatgggcggaatgattttctatatttcaacatcagatttatgttcgatcacgcccccaccacttggcggtcttgtaaagctgcagtgtaaaaacttgacaaatgtgaaaacatcatcgacaggcagaggcaggtgggctaatttctatatgccatgtggtaaatggtaaacatctgcttcgaaagtgtcataaatcgatgtcgcaaatgaaagggtgatggggcaaggtgagaggtgttctgtgggcggataggtaatttccgcagtacagatctttccccattcgtgcaaggctataaaccaggaagaattgtaaagaaacccttctagaaagttgatatatagttgaaagttcatggtatttatatttacatatacatactactcaaatttaaagcttttttgtttgtttgaacgcaaattaaaagaactatgtatatattatagttctgtccattaatatcgtattttataaatgatttcctagaaaatcacaattctaaatatttttctgctttgataaaatctgcaattgattctgagaattaagattttattttaatttatcaatttattttactctctgtccagtgcaaatgtatttttatatatgaccatgggcagatatgatttgcaaatatttttgctttcttccatttttattttaatttgcgtcaatatttaattaaactggaaatttgcaactgaagtgctagctttgacacccctttattattacaattagcaaagagtagaaatgagtagttttgtaacccatttgtttcctacctcaataaggtatgaaaacagataaataatagccggaaagatcgtatcttaaaagtacgaattgcaatatcaacaatgactttcagcggagaacttaattagaacagtcagtcagcaattatcacgcgacctaaattttcgttgtttattattatttacaacagcttaaaaatccgattttaatacctatttggaaatgttgaaacttacgatcgtgccagtattatttttaacctggcctctgaagctgcgagtctttatttatgaatctttaaacaaactttgcctcgacgaactgcataaaacgcaattaactttatttaacttggtgcggcagctggcgagaactgcaaatggtgccaagtttatattcgcatttacatgctctgcgtttcgcgaaactttttacagtattttgacttttggcgtacacaattcattaaatacagaaacagatacgcaatgatttttatttgccagcgcaaacgaaaggcatccattccatccatccatccattcatccatcagatgtgcactgtcaggcggacggacgaactgcatccatggtatggcaatttcactggacagtttatggcatcgtttcgtcaaatagaaagtttcgtgtattatgtaaaatatgtatcgcctttttccacgcactttttgcagttgcatctctgcaactcgtgtgctccgtctgcctctcgaacgccaacaggtttggccacatctcggccagactttaattgtggccgcctatcgacttggtcggtcgtctgcggctgcgtctgaagactgagctggcactgagcgaaacttaggcattctatcgttctaaatttgggtattatgtatctctatctggatcattatcttttatcttattattactttatagactaggcgcatgtatttatttctgtttttattttcataagcaagaaagaagtcctgctgatatttttcagtgcactatttagtctcgagcttgtctgctccacagctgtcacaatttcactttggccagacatttaggatcagccggcgggcagttggcggctgaggtagtggaagtggtagttaaaacattggtaaaagcactttcctttgcactagtggagtgtgagttgagctgaagtggatcgtacacatatgtatgaggtgctaagagatctttttaaatgtttctcaagtgcgaagatgtagcttctttttggaaagccaccttgaagagtatttaagattgagcattcacacagtcattgtactgacattaaccagcggcttatgcggtgttaattcagcattaggatggatttaagatccactgtaagtaaaaggcagctcatttttctgacatattcatacttttcagtggaaaaaactaagtttcaatgatacttggtataaggataatcatccctttttctatatgacagttagttaaatgtaaattttcaagtactgtacgaactgcactagagatttctgattttaaacaaagcctttcagttgtttattttaccagcacccttctacattccctatcagaaattatgaatatggttcgacaaagttttccactataagagcgtgtaaatatttaaaaaactattttatccgaagcaaagccgccggaattattccacactagccatgtgcccccatgcaaggcatgcaacttgttgccagccagaactttccgattgcccataccttttcctcaaatatttttcattatttcctgcgattttcttcacgcttcgtaatcacaataccatgcaaagtgccggtgtctgctatttacactacacatttgaattcaaatcgtgaaataatccatcattggatgtagatatatgtatctgattgatttatttcgtttggcatgaattaaatatttattttccgcttagccaagttattaattttgaatgccaaggcaattgctaagcatttatcttataaatatttgccgcgtatgcatgttttatgtgctgtttatttgtgatggtttaattagtgtttgcaacttttagtagtggtaggttttaaagttcgattttggggattcctcatgctcgagttggtttgcacttgaacaatgtgcctataaaaatgttttaaacattccacggccaatttgtttggctattatagaatgtttctgtggaatttctggaaatttggagatttgcttttaaggcatgaatttcaaactcatttcgctagaagtgttatgaactcattaatgcgtcttgtctctgggatttatcactaaggctcttagacatttcaccctcactttccccgcttaccgcaaaccttatataataccactgacttgctgagtcatttgaactacgtaatcgaagagagcaattcattaattacaaagtcgggaatcatattttgatttgcacgcgtaatgcttgcctgcctcgtcaaggtgtttccatatgggtagaacttagcccaaccacccacgccctcgcacagctgtaggcaaaatagtagtaccaatatgataaaatatgatctataatttctgaatctataacaatctatatatttctttttttgtaattatataaattatatggtagaataatactcagaaaatccacttcttcagtagcaattatcttagtcattcctttttaactacataattatttaattttcttgcattgcaaactttcttagttgtttggacttctttcctgttttgtttgcctgaccgcagctgttaggagccaactattctggcaagttgctcggcctgtgttgtttgatttttcgtggaggaacgcacgtggcatataactgtggccgagttcaataatctgctcacttctgttttattacattgaaaatcacggctaattattgttggcatgaacgggaacaccgaacatcgcgtacacacagggaaaacgtgctgaaaaactaaaagcagctgcagaaagcgaaacttttcccactactcccccggccgcttcggattcgaaatgatttgattgcgtttcggcttttgatttataagacaaatcaatttgtagccgttttgttgcttcggcatgccatggaaaacaaaacagagaaaatgaaaagaaagaaattttcagccgtcgctcttggccacaagtgtatctggccaaagtgtttacgtgaaatgcgagaggctcacacgctccgtgtttcctttcctgcaagttagtcactcgttggcccaccgagtgcccagcgagtcgggcgttagcccaattaaaaactcaaggttgagaaaatctcggccgggcgtgtaagccaacacccatgttggtcatattacctggtagtataagtagtaatggtagtggtagaagcgagctggctttcgtagcctcaaaacgtgctcgacagtgaaaacagtaattatgcaaacaattgaggttcgaaaagtggttctaaagatagcgctcattaaatgggaatataatatagggaactggaagaattgcgtatttaaaacttacataagttaattttgtggtaaaaattataggtgttcacacatgaacacgaatatatttaaagacttacaattttgggctccgttcatatcttatgtaaatgaatcgagagcgataaattatatttaggattttgttatctaaggcgacatgggtgcattgctcaaaaacatgtaatttaagtgcacactacatgagtcagtcacttgagatcgttccccgcctcctaaaatagtcccttagtgggagaccacagataaggtcctcgccgctcaagataggcagatgtgcccgagcgtgggacctcgataaggcggggactatttacgtaggcctctgcgtaggccatttactttaagatgcgattctcatgtcacctatttaaacccgaagatatttccaaataaaaccagtttcttacaaaaactcaaccgagtaaagtcttcttatttgggattttacatttggtcaatcgagcctttaatcgactctgcagtttccccctaccaaaggtaaggaactcagagaaaggccagctcctttaagcatcttacagctaaaggtagcaaaaataagtaactcttgtttccccctaccaaaggtaaggaacagagtataaatataaaaagcaaaaagatacaaaagaatcttttatgttttaaaacaagcaccttatagtctaagctaaaggttgctttgtgtaccattataaattgggtaaggcgtgcttgaggccatacatcagcaattgtgaaattaaaaagggcataacaaaagtgccttataaatgctctaatagcattaaatcagctcataaatagagtgcagtgtatatgccataagagcataaattaaataaaaagtgcctgaaaacagtgccttataaatgctctaatagcattaaatcagctcataaaatagagtgcagtggtatatgccaaaagagcataaatgccgaaataaatggctaaaaaacaaaaaatctgactgggactacaaaaataataaaacggtgccaaaaaaaaaaaaaaaatcatctttaaacatcgacggagccttaaagaagagaaggaagtcaaattcaaaggagcctctaccagcagcagaagcagcaacaacagcagcagcagaagcagcaacagcagtagcaacagcagcaacaacagcagcaacagcagcagcaacaacaacgacatcagctaagtcaaaacaagaattttctgtttatccaaacacaccatatatatataaatacatataaaatacatataccaccgtactatatatattaagaaattcaaaaaatttttcaaaatgatgtcagaaagactattcaattccttaagaagcagtccgaaattattttggaaattagaaagttggaagtaaaaccaacattacagatgtagaaattctaaaattaaatgagcttcaaaaaatgtttcattggtaatcatagcaatttgttaaagatcggcgtgtcgatcatgaatattttaacgcgaagcagtatgatttaataatgatggtgtagaaaaaattaaaaataaaaatgaaaaaattaaggggcgagtcggtagaaaacactttccctaaatcaaacactgtccctaaatcaaaccctccccctacattaaaccttgaaatgcgtggtcaccctgaaaaagagggtatagcacaaaacaacgctttaaaagtagagcaggcatttcgtaataatgttggccatttcgagtatatctagaagatacgtctaaactaatagacagtagtccagatttccttaaaataaggaaaaataaaattgaatttttatggcataaaatagataacctgatgaacaggtgaatagtcattttgagagttcgctattcgaagaagaaattagcgaacttgaatttgacaaacaaaatattcttacagccattaatagtcgactcagtggcacaataaataaagtgaaatgtcgcggttgttaaggcggaggagttaccaaccctgcctaaaatacagattcccaccttctttggtgattccaaagaatggggatctttttaatgaactctttacagagctcatacatgtgagagaggatctcagtccttctctcaaatttaattatctaaagtcagcattaaaaggagaagccagaaatgtggttactcatttactgctcggctctggagaaaattatgaagccacttgggagtttttgaccaagcgatatgagaataaaagaaacatattctcagatcatatgaataggcttatggatatgccaaatttaaatttagaatccaataagcaaataaagacatttattgacccgattaaccgagtcaatttatattataaaattaaaggcacaattaccagaagatgtggatgcaattttcgctcacataattcttcggaaattcaataaagaatcactcaatttatatgaaagccatgttaaaagacaaagaaatcaggcactttctgatgtcatggactttttagagcaaaggctcaattctatatcatcattctacaggaagtaaaacctgtaaagaaaatgattaataataacaagaataaaaattatagtgacaattgtgcatattgcaaactaccagggcattatttaattcaatgccataaatttaaaataatgaatccagcagacggtctgactgggtaagaaaaaatgggatttgcctaagatgtctgaggcatccgtttggtaaaaaatgtataagcgagcagctttgttcgacttgtcgtaaacctcaccacacagttacttcactttgcaggtcataatccagaaaaagtgaataccgtgtagaacaacaggtcaagccttgttggccacggccttgattcaagtaaagtcgaggtatggaggctttgaacaattaagagcattgattgatagtggctctcaaagcacaattatttcagaagagtctgcacagattctaaaattggaaaaaatttcggtctcatactgaaataagtggagtatcttccacagggaacgtgcatctccaagcacaaagcggttatttcgataagaaattctccgaaaaatttagaaattgaagcaattattctcccaaaacttatgaaggcaccttccagtcaacacgattaatgttgatcagaaaaaatggaagaactttaaattagccgaccacgattttaataaaccgggtcgcattgatttaatcattggagcagacggtatatactcacattctgcaaaatggagttataaaaatagacggtctccttgggcaaaaaactgatttcgggtggatagtttctggatgtaaaaaatccaaaggaaaagaaaccattgtagccacaacaatagaaataaaagagttagatcgctactggggaagtggaagaagaagaaaaagatgatatccgagtctgaaatctgtgaaaataaatttatcaaaaccgacaaaaaaagattcagatgggcgatacattgtgtcaattccattcaaggaggatgtcaccttaggagattcaaagaaacaagcgatagctcgttacatgaatctggagaaaaaactaaaaagaaatgaaaaacttaaggttgactacactaaattcatgaatgaatacatggatttaggacacatgattgaagtgagtgatgaaggcaaatattttttaccgcaccaggcagtgattagagattcaagccttacgaccaaattgagagtagtttttgatgcttcagcaaaaactacgaataacaaaagttttgaacgacataatggtgggttgggccacgagttcaaaaagatatttttgacattattattaaatggagaaaatgggaatttgttgtttcggcagacattgaaaagatgtaccgacaaattaaaatagataataatgatcaaaaatatcaatatattttatggagaaattctccaaaagaaaaaattaaaacatataaattaaccacagtcacttacggaactgcatctgcaccatatttggctaccagggttctggtagatattgcagataaatgtaaaaaccaagttattagtgcaataattaggaatgatttctatatggatgacctaatgactgggagctgattcggtagaagaagctaataaattaataacattaattccccatgaattgcagaaagttggattcaacttaaggaaatggatttccaacaattccaaaatattaaccactgtggaggacacaggggacaataaggttctcaatattatcgaaaatgaatgtgttaaaactttaggactaaaatgggaacctcaaaaggatttatttaagttcagcgtaaattgtaatgatgaatcaaaaaatataaataagcgcgttgtgttatcaacgctagcaaaaatatttgatccgttaggatggttggcaccagtcacggtttcaggaaaactttttattcaaaaactttggataaataaaagtgaatgggatcaggaattatccatagaagataaaaattattgggaaaaatataaagaaaatttattattgttagagaatattcgaatcccaaggtggattaattcaaacagttcttcagtcattcagattcacggatttgcgggacgcttccgaaaaagcatatgctgcagtagtctatgctaagtagaacctcatgttaatataatagctagcaaaagtagagtcaaccctataaaaaataggaagacaattcccaaactcgaggctgtgtgcagctcacctgcttagtgaataatccaaagactaaaaggatcaattgacaatataatgggagatctatgcttgggagtgattccacgattaccttagcatggattaacagtggtcaaagtaagatcaaatttataaaaagaagaacggatgacattcggaaattaaaaaatactgatggatcatgttaagtcagaggataatccagcagatttagcatccaggggagtggattctaaccagttgatcaactgtgatttttggtggaaaggtccgaaatggctagcagacccaaaagaactttggcctcggcagcagtctgtagaagaacctgtcttaataaatacggtattaaatgacaaaatagatgatcctatttacgaattaatagaaaggtattccagtatagaaaaacttatacgtataatagcatacataaatagattcgtgcagatgaaaacaagaaataagcctattcatcaattattttcagtaaaggagataagaatagcggaaacagtttgttattaagaaacaacaagaataccagtttaggcaagagataaagtgccttaaaatcaaaaaggaaatcaagacaaataataaaatattggcattgaatccatttttggacaaggatggggttctaagagttggaggaagattgcaaaattccaatgcagaatttaatgttaaacatccaatcattttagaaaaatgccacctaacaagcttattaataaaaaatgctcataaggaaacattgcatggagggataaacctaatgcgaaactatatccaaagaaagtattggattttcgggttgaaaattcgttaaaaagtatttaagagaatgtgtaaccgtgtgcaaggtataaacaaaatacagctcagcaaataatgggtaaccttgccaaaatatagagtgaccgatgacattcccgtttcttaatactggaatagattaccgcaggtccttattatgttaaatgttcaaaaaatcgtggccaaaaaacatttaaaggatacgttgctgtattcgtttgcatggccaccaaagccatacacttagaaatggtaagcgatctaacttcagacgcatttttagcagcactcagaagatttattgctagacggggaaaatgttccaatatctattcagacaacggaacaaattttgtaggagctgcaagaaaattagatcaagagttatttaatgcaatacaagaaaatataacgattgcagcgcagcttgaaaaggacaggattgattggcattttattcccccggcaggacctcacttcggaggtatttgggaagctggagttaagtcaatgaaataccatttaaagcgtataatcggcgacactattttgacttatgaagaaatgtcaactcttttatgtcaaatagaagcatgcttaaattcaaggccattatacactatagttagtgagaaggaccaccaagaagttttaacaccaggtcattttttaattggaagaccacctttagaaatagtcgaaccaatggaagatgaaaaaatcggaaatttggataggtggagacttatccaaaaaatgaagaaagatttctgggttaagtggaaaagtgaatatttgcataccgctccagcaaaggaataaatggaaaaaggaaattcctaatatagaagaagggcaaatagttttattaaaggatgagaattgtcatcctgcaagatggcctttaggaaaggtggaaaaggtgcataaggggaatgatgataaggtccgagtggctaaagtaaagatgcaggaaggatatatcacctagacccattactaaaatttgtcccttggaaggaataaagtctgttgacaaaaatgaggctgaccaagagccaaaaagacgaactagagcgacatcgggaatgtccaagatcggaatcattatggcaatgttggtggttgtgttaagttgtcaagtttctagcgcattacctaaagatatagcaccaagatattctatagacaaaaataaataaaacctcagcaatatatctagacccgctaggagatgttgagattgtgagtacttcttggaatttggttatctattataaaatggatccatattttaaaatgttaacaaagggtaatgcgcttatacaaagtatgaggaaagtttgcgaaagacttcatagctttgaagagcaatgtagtctagtcttagataatatgcaaagtcagttatcggaacttgaagaaaacaataaattgtttatgatgcagtctagatctagaagcaagccgtgctcctttcgaatttatgggttccttgtatcatattttatttggtataatggatgaagatgatagagagcaattagaagaaaatatgaagaatttgttagataaccagaacacccttgataaactaattcaaaaacaaacatctgtggttgattcaacttctaatctattaaagagaacaacagaagatgttaactccaattttagaagtatgcaaataagaattgagaacatgacagaagttcttaaagaaaattattatgtttataaggaatcaataaaattctttatgattacgaaacagctacactcattgattgaagaaggcgaaaaaattcaagcaggcattataagcctgttgattgatattaatcacggtaggctaaatacaaatattctcaggccaaatcagcttaaaaaagaaattgccaaaattcagcagagtctttcggagaacctagtaattccaggaaaacggtcaggtacggaacttaaggaggtgtatacaacgtccgaatatttaatttataattttgagatagattcctatcacataatgacggaagccacattaaatcaatgtcagaaatggcaacctaaataagagaatatgcacaggaagttggccctggaattcagcgaatgataattgcatgtgagattcagcctctaaagccagataaagcggcgaactgcatctataaaacagtagtcgactctaaaagttactgggtagagttagaaaagaaaagtagttggttgtttaaggttcctgcgaattcaaaagtccgtctgcaatgtactgggctctcaaattgaattgtttgatttgcctcagcaaggagttttaagcattgcgccatattgtacggcaagaaccgacgataaaattctagttgccccccataacattcagtcccgaaagtgaagaattattatcaacaccttatatagggagaagttagtggagtgcccgaagattattttgggatccgctgaaactatcaatattaaatcatactgaggaatttgaacgattgaataatgaaattaatttatgaaagagaccatcaaaaattgaaagatttacatttccatcatatttccggacatgctggattaattattgctttaatactaatgatagtttaataatatatttcatacggaaatgtgctgtgcaacaaagaatgcaagcaataacctttgcaggtccgttgccagtactataaatatcaatagtaaataagcaataaaataatataacaaataaaaatatacagtccactatatagaaaatgtacttctacatagaaaaagcaaaatgtttaaaataagttaattgagtacaaattgttgaattaaaaataatataaaccataattgtaatccaataaaattaaaagccagaaaaactaggcccattgaaatcttagttgcaaaataaatgaacatatatcaaataaatacagcccactactgttataaatgcaactaatatactaatgtacatctcagctttgctggccctttggcagaatgttcacacatgaacacgaatatatttaaagacttacaattttgggctccgttcatatcttatgtaaatgaatcgagagcgataaattatatttaggattttgttatctaaggcgacatgggtgcattgctcaaaaacatgtaatttaagtgcacactacatgagtcagtcacttgagatcgttccccgcctcctaaaatagtcccttagtgggagaccacagataaggtcctcgccgctcaagataggcagatgtgcccgagcgtgggacctcgaataaggcggggactatttacgtaggcctctgcgtaggccatttactttaagatgcgattctcatgtcacctatttaaaccgaagatatttccaaataaaaccagtttcttacaaaaactcaacgagtaaagtcttcttatttgggattttacaataggttacaaagtaattgcaaataaatcttatttgtaactattaaattttgaaagattaatgcgtttttacccgttctgtagagatttaaaacaacttttgaaatagttcgaataagtatgaaataaaaatggaactgagtactataattttcacctcgtctgtcactcattcacgttttgtttaagctgagacctttgccatatcgtttgcaaacacttaaatggggcatgccccgatatttaagaacgctgtttgcggttttggcttcgatgcactcgattatacgataccctgcattaccaccaccttttccctttcaggcacgggcacctttggacgagtttgcttatgtcgcgatcgcatttcggagaagtactgtgccatgaagattctggccatgaccgaagtcattcgtctcaaacagattgagcacgtcaagaacgagcggaatatattgcgcgaaatacgacatccgtttgtcatcagcctgtaagtaaagcaatatggaaaatattccaatttaatttttaaaataattttaaaaaaatatcgataataaagctgtcatactcttgaaaaaaagaacgcgaaaaaaaaccaaatctattatatgtaaaaagttaaccaattttgattgtttattttgaagggtacgaaattgtaaaatttaattaacattacttgcatatatatataaatttttttgttgtggtcaattaaaggtcaatatcacttaataaaggggaaacaaaaattgcaatacttctttctttgtttgcagtttattttagttgttaatttattcaaattgtttacgcatttctttattaaattatatttttccatacagggaatggtccacaaaggatgactcaaatctgtatatgatcttcgactatgtctgcggcggcgagctgttcacatatctgcgaaatgcgggaaaattcactagtcaaacctgtaagtacataactattctattaaatcttttaaatcagaaatcacaaaattgatttcgattttagccaacttctatgcggctgagatcgtcagtgccctagaatacctgcactcactgcaaattgtttatcgcgatctgaagccagagaatctgctgatcaatcgggatggtcatttgaagataaccgattttggatttgccaaaaagctgagggatcgcacttggacattgtgtggaacgcccgagtatatagcacctgagataattcagtccaagggtcataataaagccgtagattggtgggcattgggtgagtctcaattcgatcacttacaaggattgcaattgtaatgttggaattcttttataggagttctcatctacgaaatgctcgtgggatacccaccattctacgatgaacagccctttgggatctacgagaaaatattgagcggtaaaattgagtgggagcgacatatggatcccattgccaaagacttgatcaaaaagctgctggtgaatgatagaaccaaacgactgggcaacatgaaggtgagaatcatagattcagaatttttagatctataagcttaaaaaagtctcaaagatctaacatgggaatggaatagataaacaaataatttggagcataaagtttgttcagctgccgtactatccatcaagtcattcggtttttttttaatgaaaattaaaattagcactgtcaaagtttatttatttgttttcaccccttcgatctcctttactcttgccttagatagtctcataaaaatacttggcaaggctttcgttaacattttccggcttattaggcagcatatttatagagaattgtttacacttgtcgcggtcagattttgttgctggcattaaaaattgcatcgcatatatcaaaaattaattgttgcctatcacaaatagatctgcacatgctcgttgtcagttagcctaatacattttcttcgaaatcatttttcaccttcccccgaattttcgtttttgtcgccataactttgcttttattttattagatttgtcgcgcgtttttttttttttttttgcaacacgagctagccaaatgcaaaacgttatttatgtccaatattttgtatttcactccacagaatggcgccgatgacgtgaagaggcatcgctggttcaagcacttgaattggaatgacgtctacagcaagaaacttaaggtaagcttcaagggtccactctattttccgagttttcctttttaatcatcagtaattgtgtgggtcattactttgtgtggatttttggcacactgattttttggctcagcttttgtcagacggccaatgtattttcatacgttctcgtaattaaaggcaaataaacaaataagttttccaaattagctgtgcctttagttaatgaccgcagcgtctatttcggccttttgggtgggtgttggacccataaatctagcgattccctctacccagcccagttggtccaagtgcgagtgaaatgtaacaaaagggggcatttcgcatccgaaggagaaggtgttaattgcccacatgaacgcctccgtccagcgggagacaatgggttaaatgcgtcacaagtgattgttacaaacgtgttgaatttttgcgcacatttcgcaacttttatccgtttgccagccacgtatgtttgatgtgattttcaaaatcacatcacatctatttcatggatctaaatatagaaacaaatagaactaattatggtagaagtcaactttataaatgatagtttatgaatattttcaaatttctttaacatgtttttgggcggtctttatgtattcttaattttacttaagtttaaacactcataaatatgcgataattggctttaaatataatatatgtacaatcaaagcactaatttttcaaattttcttcatttatagccaccaattttgcccgatgtacatcacgatggggataccaaaaattttgatgattatcccgaaaaggattggaagcccgccaaggcagtagaccaaagagatttgcagtacttcaatgatttctaaataagagccgagaaattgtagttttttgttttctgttgaaaattttggtataatttgcgacagcaagaacattcattatttatactggcaattaagtgtttaaagtgctgtgttgatgcaatgatatgtaatggtacatatatttatatacataaattatattataaaatacgactatacataaacaatacacccgtacatagtaagaataagtttatacccgtaatgttatgtctagcgagtgacgtctaaaattatttatatatacttaattgtttaaatgttcaaattgcgagcagtccccaaaactagaaagcaacacctataaaagtacagctaaagtacagtaaagaatatattattaaaaaacaacaaaatattaacgtaaaacgttgaataaagtgatacaaattgaaacttggccaagtctttgtattttaatttcgaatatatttctttactttcgggggattagttttggatccgtaaatctgtcagatctcgaacacgagtcgcttttgctgacgagcgtgatctttgtttgacgtttgctggtatatattttaaattattttggtccagttcatgtttttcgcattgttttaaaaatgtgatttttccattttgaaataaattaattgaattaattatttataaattaatgtaatcaattttgatgtaaggggttttcagagtgcgaaaaaggaatttaataatgctattaaatttaagggcaataactataattatttatctttttaaatctttggtttgggaagcttgcctttccttattcagacacaaccgtttttcacattttccggtttgtgtatcggaaaagtggaaagcgattttaatcgatagaaatcggagggaattttcaaatgaacgaaatgggtatacaaatgtaaggtagtgcattgaaataaatagaataatacgatacaaatctaatattataaatataatttaagttttaaatctttagctgcatttaaagctctgtcggatattggttttctgaaacccttccactctcgtagagcttctcgattagtaacatgctttgcaaatttcaacatattttgaaattcaaatttgactcctactggaattggcccactgtgccttgcgcatgttgtctcttccacagggtaaacgctacgtgcgggagtcaccctgtggccgcgaaactaccaccacggcgatagcaacaacaatacggcaagtgctttctctcagagagcgctctcttccttttggcacggcacgcttttacagttatacagcagagcgcggcttttcacaagcctcgctccataaaatcattcagtttgtagacaacgtttgccgtggccaaaaaagaacggacaagccacctactttagttggagcaccatttccaac

SEQ ID NO: 12959 - DNA, 2661 bp, DROSOPHILA
gctggtcaacccaagaaaaacaccacagaacactcagaaatcattcgaaagaaaattggaaaatttgacattggtcttcagactagtcaacaaaaaaaaaaacaaaacctattcaaagtttgcaatcatcacgtttgattaattgcgctcagttggactaatttggcaatctgctggttcagcggaggaaactaacaaaaaaccgaagaaaaactgcaagttgcgctgtaaaaaccggaaattctagatctctcggatctcacgatcccagcgtatataaacaaaacaaagcggcacctttagacacacaacaacaactaaaagaaaccgaagaaaaacccacgaaaaaagtgacacaaataaagcaaatcgcgatcgctgtgtccagtcgatccgcaaaaaataatacctatggcccccgtatacctataacacccataatacctatacctataccccctcccgccgagaaacgctgagtgttgagtttatttctgtttctgtgtcggcttcagcggttttttcgcctttttttctgttattattgccggccagaagcgaaggaaaaatcgaaatcgacggctagtcgcggaaaatcgtgcgctcttaaagtaacatatttatttttaacaatttcgcaagcgttcaaattttgctccagcaaaaaatcgaaaagcgacaggagacaacgggacgacaggaactccggcaaggacaatcggaaaaccgcaggcgaggattgcgacagcgatgtccacggcgacttgtgcccgcttctgcacgcctttgtcatccggcacggcaggatccacatcaaaattgacaaccggaaacggaagcggcaacacgatgacgtcggcgtacaaaattccatcaaacaacagcacaacagcaaatgacagcagcaacacagagacaacattcacattcaaattgggccgctcgaacggccgaagtagcagcaatgtagcctcaagcgagtcatccgatccactggagtccgattacagcgaggaggatccggagcaggagcagcagcgacccgatccggcgaccaacagccggagcagcagcaccgccaccaccaccaccaccagttccgctgaccatgacaatgacgtcgacgaggaggatgaggaggacgacgagaacgagggggagggcaacggccgggatgcggatgacgccactcacgattccagcgagagcatcgaggaggacgatggcaatgaaaccgatgacgaggaggacgacgacgagtcggaggagagcagcagcgtccagaccgcgaagggagtgcgcaaataccacttggacgactaccagataatcaaaacagtggggcacgggcacctttggacgagtttgcttatgtcgcgatcgcatttcggagaagtactgtgccatgaagattctggccatgaccgaagtcattcgtctcaaacagattgagcacgtcaagaacgagcggaatatattgcgcgaaatacgacatccgtttgtcatcagcctggaatggtccacaaaggatgactcaaatctgtatatgatcttcgactatgtctgcggcggcgagctgttcacatatctgcgaaatgcgggaaaattcactagtcaaacctccaacttctatgcggctgagatcgtcagtgccctagaatacctgcactcactgcaaattgtttatcgcgatctgaagccagagaatctgctgatcaatcgggatggtcatttgaagataaccgattttggatttgccaaaaagctgagggatcgcacttggacattgtgtggaacgcccgagtatatagcacctgagataattcagtccaagggtcataataaagccgtagattggtgggcattgggagttctcatctacgaaatgctcgtgggatacccaccattctacgatgaacagccctttgggatctacgagaaaatattgagcggtaaaattgagtgggagcgacatatggatcccattgccaaagacttgatcaaaaagctgctggtgaatgatagaaccaaacgactgggcaacatgaagaatggcgccgatgacgtgaagaggcatcgctggttcaagcacttgaattggaatgacgtctacagcaagaaacttaagccaccaattttgcccgatgtacatcacgatggggataccaaaaattttgatgattatcccgaaaaggattggaagcccgccaaggcagtagaccaaagagatttgcagtacttcaatgatttctaaataagagccgagaaattgtagttttttgttttctgttgaaaattttggtataatttgcgacagcaagaacattcattatttatactggcaattaagtgtttaaagtgctgtgttgatgcaatgatatgtaatggtacatatatttatatacataaattatattataaaatacgactatacataaacaatacacccgtacatagtaagaataagtttatacccgtaatgttatgtctagcgagtgacgtctaaaattatttatatatacttaattgtttaaatgttcaaattgcgagcagtccccaaaactagaaagcaacacctataaaagtacagctaaagtacagtaaagaatatattattaaaaaacaacaaaatattaacgtaaaacgttgaataaagtgata

SEQ ID NO: 12960 - protein, 233 aa, DROSOPHILA
MSTATCARFCTPLSSGTAGSTSKLTTGNGSGNTMTSAYKIPSNNSTTANDSSNTETTFTFKLGRSNGRSSSNVASSESSDPLESDYSEEDPEQEQQRPDPATNSRSSSTATTTTTSSADHDNDVDEEDEEDDENEGEGNGRDADDATHDSSESIEEDDGNETDDEEDDDESEESSSVQTAKGVRKYHLDDYQIIKTVGHGHLWTSLLMSRSHFGEVLCHEDSGHDRSHSSQTD

SEQ ID NO: 12961 - DNA, 4501 bp, DROSOPHILA
gaagccaaatacaaatgtggctcgagaagctaaaaggtaaaaaaaaaacgatttaattgtaatgcccttgacatggccgaattataacgaggccaggtcgcccaattcctggttcaggggccttcagtttgtttcacatttctctttttttttttttgccaggcaaggacgttccatcaacaggtggttagctctactatacaggacatgcgcattggcatttactagtggcattgaaagagagccaaacaaacgcggaagccactgccagggacatggccttgaaaattaccagagccaggaactttcagcccatctacgtgggtgggtgtatatttcgcgcttttacgcaggagtttttcctgttttttttttcttaccgggaacttgctttttgccttggctatcagcatttccagggaattggctccgattccgtatttcctcgttcgctcgttgtcagtaaccttgtagccacgcattggagcacctgctgttcccctggattcggatgagctcacatccttgagaacttcgcctgttggctggctgcttttcttgttattcgagctgctgcgtgttgtcggtgacatgattgcatctctaatgtagctgatcatcgttctggctcataataaagtcaactttggaatgtagtcctcgcagcaagtttccttatccgcggacaaagcaaaataaactagcagaacaaggcatttttcgcgcttctcaacactagattctcattgaaagattctttagttgtgctgcaattttagctaaaaattgcaaaaagctatataataataatttattttttcccgtgttttgtaattaacgaaatattttttatatttttattaatcaattcaaattgataaaattttcatttattcttaaattaaataatgtgtaaattaataaaatgaaaatagccaaattaataaaatacaagttgaacggcgcatttcccaccactattgccttcagtgttttgcagcacttatgcatctaaaaacagctgttcgggtaatcattttttttgttaaaagtttctgtggaaaaactataacaaacgtagtcttagtgtacaatgatctgggctacgggctccgcgtaatccgcagctcacccggaaaggcgttttacgatgaatctacggccgcgatgccgcaagtggctgcccctagccacccagcaacttcgactgcggaaccttaacagaattcagggattcaatattgagtcctggccgcatgagaagtcgctggagctagatgatccggatgatgtgctcctctactacacactacacacggacaaggctagcgaagcgttctacaccagcgaaaagctgccgcagcgtcaccaacagcaaaagtgggcggagatttgtacggacgacgaggcctggcggaaaaccaatgcgcagtgtgtctgtgtcaaggtgtggaagcactattcggcggaaagaagagatggccaaccgcctgaggttgagcaaagacataaggatgttttcgggtaaataggagactttgcttgcaaatagaactctgctatcatcaaccaacttacttccagaagatcccagttaacgcccagcaggctgccacgccctcctgaactactgttcagctggggcgtctacttctccggccttatacctctgtctcccctcacattgtcccagtgcggacgaaattgcttggtctttcaattgaatggcgagcaatttgcctccccgtcgatgataagcgagcaggccttgcagtcgcagctgcatttgcactaccaaaagtatgcggaggaagagaaactagaagagccgcaggatgagggcataaactcgccggccgttagtcgtagttcgagtcccgtgctgcgaatgagtacgatgcgctatgcacagctgaagtgccaacggcaggagattcggcgaagcaacaacctcgaaaagcttctcacgttgcaacgtctgcaacgcttgcatcagcagaagcggcgtcaaatggccgaggtttgccgagaaatagcccgcctcagtgtacactgtgtgaccaggaacgagctgcgcttgaagccccgcacgacatcgctgtccggcgactactccgcccatcagtaccattccatgggccgcgccctgagcgtgttgctcgccgagcagcagcagatcgcgcccctcacgctttataatgcccagcagctaactagaaggatagaagcgctaagcagtcaacagcggctacttaaagcggagcgggaaacgtttcgccaacgaaacgagcgcacccgtcaacttctgaaggagatgagagaacagcgggaggcacagcaatgggagctccacagccagcgacatcgactggaaaaagaacgtctggagctacgaaccctggcacctcaacatctggaacagcgcgatcaaaaaagacaaatagaacggcaggtggggctgcggaatcaaataacattaaacaagtatattaataaaccttttcacccttttaaggtggagcgccgaatgtccacactggtgttggagctacaggagatctataacatccagaatgtgggcggtcggcaatttagtatctgcggcatcgccttcccccacatggagcaatacacgagcgagtcacgtcaggcggcaaacgcacagcttctggataacgtctcgccgctggcagtgagtgcggcactgggttatgttgcccatttggtgcagatgttagccatcattatggatcgacctctgaggaaccgtattctgtacgagccatcgaaagcaaggatagtggacgatatcaaagagttgacgtacacaacaagagagtaagcacacagactaaatattaccttttggtatcttattgttccatcttagatttcctctgtatacacgctccattttgccgtcgcagcaaacaaagtatgccatctaccttttgcgccagaatgtttcgcagctgtgcttcgacatcacgggccagtgcgatctgcgaaacacttttggcaatctgctggagctattcagcactcttcgctacatcgaacgaacgcaaagggatgaggtcgacgaacgggatggaactgcagttggagctggctgtggagaagcacgcttggcaaatgggttgacggcgccgcacctgtcgcaatcgcactcttcggtcgacatgaatcatgtgccactgccgactggcgtcaatgcggtcaaggatgcactgctccagcagctgttgccgccgggtgtgagtgaggcactggcaatcgaaggctatgcgtcaactcaacggtaatctatatatacatatatttagagccaaaaacaaaaactaccggataaaatttaataataatatattgtaatattcttgcagcatttgccgttcggtggggtcctattcagatggcgaggatgagtttcgcccgcgactggagcataactattccaattcggactccaacataactctgcaaactgagcgcagctgagctaatgcacccaaaagtgttatatttccagcgtttatatccaatatccaagatagcattgtttagcggctcctcctcagcgggtttcttggtattggccgcgtattgtatacttttaaattataaaagtcaatggtgaagtatatgtgaacggtagtccattgcgataatattatttttagttgtttaagatctctgtgtaaattcccttttattgtttgtttgctaatataagctacgaataaagattaaatattttatacatgacaaatatttatttaatatggatgacaaacattagaaacacgtcgatagagattaagtcgaacaatatccaaggtcacaataaacgaagtggttacgatgcggaaaacctaagcctttcttcatatgttctgaaataatgctgagccccaaaattagtttatttgtatattctgtttgaaaagtatttttatgagttttaattatagtttgaattaggcgccaaaaagtgttgcaaagtatgaagataaattgctcctttaacttataaaaattataccatgtgctactgttactacataatattgtacaatctgcttatattaacttttgctttataatttaaaatgtaagttttgctttaaatccttaataaactcaaaatattacagccactgcttggtcagtgctgcaaaacgttccgttccgttaacagtggtctgtaaagccagctgattagcatttcgccaaaattatttcgctggcaacttgcttccgggatttgaatgtttttcgggctacatccgggctattaataaataaaaaatgtgttgtcaaatacccaaacaacgtccaaacgtagtgcgataatcgatttaataattgaaaacgcgaaaagcctgcaaaccaacgtgctaaatgaagtgcatgtgcatatgtgtgtgtggcccgggccttggccttttatttatcgaattcgtatcaattaaattaaaacgctgagcaatagtaggca

SEQ ID NO: 12962 - DNA, 2241 bp, DROSOPHILA
cacttatgcatctaaaaacagctgttcgggtaatcattttttttgttaaaagtttctgtggaaaaactataacaaacgtagtcttagtgtacaatgatctgggctacgggctccgcgtaatccgcagctcacccggaaaggcgttttacgatgaatctacggccgcgatgccgcaagtggctgcccctagccacccagcaacttcgactgcggaaccttaacagaattcagggattcaatattgagtcctggccgcatgagaagtcgctggagctagatgatccggatgatgtgctcctctactacacactacacacggacaaggctagcgaagcgttctacaccagcgaaaagctgccgcagcgtcaccaacagcaaaagtgggcggagatttgtacggacgacgaggcctggcggaaaaccaatgcgcagtgtgtctgtgtcaaggtgtggaagcactattcggcggaaagaagagatggccaaccgcctgaggttgagcaaagacataaggatgttttcggaagatcccagttaacgcccagcaggctgccacgccctcctgaactactgttcagctggggcgtctacttctccggccttatacctctgtctcccctcacattgtcccagtgcggacgaaattgcttggtctttcaattgaatggcgagcaatttgcctccccgtcgatgataagcgagcaggccttgcagtcgcagctgcatttgcactaccaaaagtatgcggaggaagagaaactagaagagccgcaggatgagggcataaactcgccggccgttagtcgtagttcgagtcccgtgctgcgaatgagtacgatgcgctatgcacagctgaagtgccaacggcaggagattcggcgaagcaacaacctcgaaaagcttctcacgttgcaacgtctgcaacgcttgcatcagcagaagcggcgtcaaatggccgaggtttgccgagaaatagcccgcctcagtgtacactgtgtgaccaggaacgagctgcgcttgaagccccgcacgacatcgctgtccggcgactactccgcccatcagtaccattccatgggccgcgccctgagcgtgttgctcgccgagcagcagcagatcgcgcccctcacgctttataatgcccagcagctaactagaaggatagaagcgctaagcagtcaacagcggctacttaaagcggagcgggaaacgtttcgccaacgaaacgagcgcacccgtcaacttctgaaggagatgagagaacagcgggaggcacagcaatgggagctccacagccagcgacatcgactggaaaaagaacgtctggagctacgaaccctggcacctcaacatctggaacagcgcgatcaaaaaagacaaatagaacggcaggtggagcgccgaatgtccacactggtgttggagctacaggagatctataacatccagaatgtgggcggtcggcaatttagtatctgcggcatcgccttcccccacatggagcaatacacgagcgagtcacgtcaggcggcaaacgcacagcttctggataacgtctcgccgctggcagtgagtgcggcactgggttatgttgcccatttggtgcagatgttagccatcattatggatcgacctctgaggaaccgtattctgtacgagccatcgaaagcaaggatagtggacgatatcaaagagttgacgtacacaacaagagaatttcctctgtatacacgctccattttgccgtcgcagcaaacaaagtatgccatctaccttttgcgccagaatgtttcgcagctgtgcttcgacatcacgggccagtgcgatctgcgaaacacttttggcaatctgctggagctattcagcactcttcgctacatcgaacgaacgcaaagggatgaggtcgacgaacgggatggaactgcagttggagctggctgtggagaagcacgcttggcaaatgggttgacggcgccgcacctgtcgcaatcgcactcttcggtcgacatgaatcatgtgccactgccgactggcgtcaatgcggtcaaggatgcactgctccagcagctgttgccgccgggtgtgagtgaggcactggcaatcgaaggctatgcgtcaactcaacgcatttgccgttcggtggggtcctattcagatggcgaggatgagtttcgcccgcgactggagcataactattccaattcggactccaacataactctgcaaactgagcgcagctga

SEQ ID NO: 12963 - protein, 696 aa, DROSOPHILA
MNLRPRCRKWLPLATQQLRLRNLNRIQGFNIESWPHEKSLELDDPDDVLLYYTLHTDKASEAFYTSEKLPQRHQQQKWAEICTDDEAWRKTNAQCVCVKVWKHYSAERRDGQPPEVEQRHKDVFGRSQLTPSRLPRPPELLFSWGVYFSGLIPLSPLTLSQCGRNCLVFQLNGEQFASPSMISEQALQSQLHLHYQKYAEEEKLEEPQDEGINSPAVSRSSSPVLRMSTMRYAQLKCQRQEIRRSNNLEKLLTLQRLQRLHQQKRRQMAEVCREIARLSVHCVTRNELRLKPRTTSLSGDYSAHQYHSMGRALSVLLAEQQQIAPLTLYNAQQLTRRIEALSSQQRLLKAERETFRQRNERTRQLLKEMREQREAQQWELHSQRHRLEKERLELRTLAPQHLEQRDQKRQIERQVERRMSTLVLELQEIYNIQNVGGRQFSICGIAFPHMEQYTSESRQAANAQLLDNVSPLAVSAALGYVAHLVQMLAIIMDRPLRNRILYEPSKARIVDDIKELTYTTREFPLYTRSILPSQQTKYAIYLLRQNVSQLCFDITGQCDLRNTFGNLLELFSTLRYIERTQRDEVDERDGTAVGAGCGEARLANGLTAPHLSQSHSSVDMNHVPLPTGVNAVKDALLQQLLPPGVSEALAIEGYASTQRICRSVGSYSDGEDEFRPRLEHNYSNSDSNITLQTERS

SEQ ID NO: 12964 - DNA, 5843 bp, DROSOPHILA
ttgtctgcttaaccaggttctttgggagcggagagggttcgtttaaaattacgtaacaaagtgtttgaatatttaactccatgcccaaatcccagacaatcaattcatccattcgatttaagactaattctacagatacacattggccggcacacacgcatatatacatactacacgcacacgcatatgtaaatcaagtgaaactagcgacttttgaacaattttaatttggtaggcccagaaaacccatctagaaaggactctggtggattgggcaacctgctggttgactatatcctgacatatgggcacacaacaacaattcgctaagaaaaaacactttcgctagacacgcacgttctgctgcatcgattacgaattaggtaaaacaaaaaatttaattacaataggtaaggtaaggtaaggtaaggtgtgcatgcgggggggtgtggtgaaaggtcttaggttacggaaacacatgttcgtaggtaaactgcagtatcgttaagttagcgagtaaactagggcataaactaaatcgtaaacataatattacatctttaaattacaaacataattacattgtgtgtccggcagatagaccctctgtcccttccatccggttcggttcgattaggtttggtccggttcggcccgtctgcatcccaacaacaacaacaacacgatccccacagttaatgtacacgctaccacatgcagcatcccatgcgtatagaaatcatgatatgcgaccggccagcggcaaggatcgatccaccattgttgtccagaacagaacggaatagaacagagcggagcgaagcgcagtgatcgccgtaaccgtaaccgtaaccgttgccgtagccgtaaccgtagccgtaactggaggcggaggcgcaggcggcgccagagccccgcccacattcaatcgttcttggtctgacagtagagctccttgagcgacttcagctcctcgatgagcgctttgttttggttctctagcaccgccactcgattctccaggcacttgatgtactccttcttcttgcgccggcactcacgcgccgcctccctgttcttctgcagccggatctcgcgcttacgggtctgatcctccgctatcccgctgttgtctgcaaaaggaaaaagttttcaaggattggataatcagtcattcagctggctgtaagcgatgtgtgtgtgcacatctcccaaagcggaactctctgtaactcgaactgaactggatttcatagtcattgatggtttggatttggtttcacttcgatgtcaacacaaattgcatgcaaaaatgattgaacacaccatccatgttcaactaaacaatttgaataaaaacgaaaataatgccagcatggaatggagcattatcaaagttatcaattacaatcatttgagtccatatgctgcagttaggcgatgaagcagttccatggacgctgattcatcgcctacattcagctcgataactcgataacttcaatttgatagaccctcgattccagttcgatttacgagtggtcctgccaagtcgcaactaaaggctagttttggagcgaggctattactggtgttgtaggacatccgattggacaggtagtacgtgggatccaattgcatcagggagctgttcgccgcattgccccccgctccggtccccgccagctgggaattgagcacgccgtcggacatgggaagcgatgcgcctgggatggggttcgattcgatttgattcgagttcgattccgattcgagttcggtttggggttttgattgtcgtttgttgttgttgttgttgcagttgttgttcagaacattatcgaattttatatatcgtttttttatttttgtgggttgggtggaggaaggcgttcgaaaagaaaacaatgaaaaaaaaacaacaataaaaaaattataagaaaacatattttccatttttcagttttcaattggaagcttttgaaaattcggattggtttttttttgttggttggtttatgaacttgagtggtgtgtgcgagcgagaacggcgagcgagcgagcgagataggtagattggttagtcaaagagagtggagaaaagcttttgattaacggttaaagtactgttaggtgagacgtttgcttgtacttcttcattactatttaatatttggcataatgggttgtgtgtgtaacaacggcaacaacaacaacaacagcgattacagcaacaacaacgacagagaggcggcgaaagagagagagaggggagggcgatagagagagagatagagaattgtgggcaagaagacagcagcaatagttcaaatgcttaaattattgtaaatattaatcattattcttgctgtcttccctccctgtctatgtacatatgtgtgagtgtgtgtgtgagttggtgaagttgtgcgcgagtgtgtgtgtgtgcgagtgagaggtttatttacaggggagaattggaaaatcgtggaatctctacaacgcgtcctctttttctgctccttctcgggccaagttttccggccttttgtttttctttcattattttcacttcgttaaagcaacaccaacaacaacatcaactaaatgataatgggggtggtggaaaggggcggggttcccgcttgtacggctgccctaaatggcattcctaatgatgtacaaaggacaaggctggcagtccttcacaatctatgtgttgtatgtacaaatacagttgagatccaaacaaaaacacaatgttagctaactgggttccattagtttctacctctttcctctgtttcattatatttttaagaaactatgtaagaaaataaacaaccctctattctgttctggttgaaaataatagtttcaaatggaaagcttcggaaatgtatatttaatgctttttttttattctgtccacattttcgttactttttagctgggcaaggttttggctagagaatcttattgcactaggagaaccatatattgctttataaacaatagcaacgtaatgaatgttgcaaatgttttccttttgtatatttacaatatagatttcataaggatccagtgagcaacttggaccttagacttttctgataaaattgtaaatgcactttttgtggcaagagtataattttacagtacattcctctcgtctaatcatttcgatatggatcatttgctaaagcgcactacaacgagtgttaacagtgttacttagccaacagctactgtacaagatgaacgggaaaggtgatcgatcatggggttacaaacactgagaatggaatggtgtctgatggactgaccgattccccagcgttatgagagttgctgggaatggtcgaaagattgccaggcgcaagtgcatcgtgaaatgaacgatgagtggcgatcagctcgacgatgcattggattgttaggcgatgtggtggtttaaagagcgacagagatgtgttcgagtgggtgtgtgactggtggagagatcgtcccccggatttaccgctcatgtccggaccgctgatctcggtgaagatcttattgtacgacggccgtcgcgtcagctcgctgcggtggtgctgggaatcgtcgtccgacagactctcgtcgctgtcctccgggtgctgcgtgttcggttcgggcttgatcttacacggaaaggttggagggatctgtgtgcgaggtgatcgagttcattagtagagttcggttcggcgggtgctccgtgctccccgttctacgcactttgttacgcacttgcactgcattgccaggcgtcgtgtggatgaccgtcgagttcggcggcttggccacgtagaccaccttctgcatcgctgtggcggcggccagcgcctgttgctgctgctgggttccagctgctgtctgtatgactcccgagggattggcctgtatcacggactgcacctgcggatatagaaggtcactacattagaaacgctcgcggtcagggttattggcctcaacgggactgacatagtaagttttgtaggctgtagtgtaactaacaaacaccgcaaattctcgatattctaatgaataaaattaaaagtcctgtgaatgtgtaagtgtagtcgacatcctaataacagctatatggtctatatcaatttttgtgaagcttaactataaagatttattatatgtattatgtagtccatatagtcataccccatttaatatatacattggtaaacgaaatcgattttagggatgtagaataagaaacgtattgaaatgattgaaaaatgatggatgcataatctatgcagtaaactttataaaactttataataaacagtattgtacttgtttgtttgctattagttaaagaacactaagctgccttatttccggtaataactatccctatctacactcagttcccataccaaaggaggctttgaagtgcttctgcactaacatccttggtagccacttctggctgggatccgtaacacctgacactcgacagttgacaccaagcacccggtccccaaatgctcacctgcagtccgtgctgcgccagcgtctggatggggtattgtatgttgcagttggcggtggtggtcagcacggaggacactccgcctccctgggcgttgttcgtcgcacccgttggaccgccggccgttgtactttgtgggttctgttgctgctgctgggggttaccaccgccgccgcctcctcctcctccaccgccgccgcccaccgctgccgccgcctgttgggcaacgacatcgaccacgtcattggagcccgatgccgccgacgagttgccgttctcctcgacgatgctgttgtccatgttgccgatcctggcgatcttcagcagcaccgagacgctctccgacaagtgcttcagtttggctaccgtttccgcttcaatttggccagcttgaagacgtttctacaattggattggattggattgcttttggattacgctgtcagttttacggtttatcaatttgtcatccagtttgtgataccgattcagatcggaatccgtttcagtttaagtttcaatttctgtttctgggcgggattggcatgggctcgtttttgttttgggccgatgacgagtgtgcgttgtgatgacgatgattatattgtggctgtggtgccgattgctgactgatggaactcaagttcccccaaaggaaaacaacaacaacagcaacaataacaacaacaccgagtcgtgagtatttcggttgaatgacgtcatgacaacgttgcgcgcgcttgtgtgcgtgtgcgtttgtgtgtgtgccaagaggcaacaaaaaaaacagaaaaacacacagcacacagcgaaaaaatcaacttactttctgatgacatcactaaaaacgttgctgctgagaggcttttgttgttgttgccgttgctcactctctctctctctcactccttcctgggcgcgtgtgtgtgtgtgtacgcgcgttgcacgctgcgctggcaacttgttgaaaagtcgcggtgtccaaccaaataaatatttatgtataaagcagcagagtaagcgaatcgaagttcgaaccctaaaacttcagatacgtttcgaatggcatcgcgcaaaggtttcgtatttgtttgctctttttgggagaaccccacagaacacacacgcacacttaagcacagcagcgaattggtgcgacaagttggcagcacgcacacacacaacactctctcgctctctctctctcccgttctcgctcgctctcactgcctgttgttatcgttgcttacgttcttttttctatttgcagcaccgaaacgcgtttcttttggcggcaaag

SEQ ID NO: 12965 - DNA, 1080 bp, DROSOPHILA
atggacaacagcatcgtcgaggagaacggcaactcgtcggcggcatcgggctccaatgacgtggtcgatgtcgttgcccaacaggcggcggcagcggtgggcggcggcggtggaggaggaggaggcggcggcggtggtaacccccagcagcagcaacagaacccacaaagtacaacggccggcggtccaacgggtgcgacgaacaacgcccagggaggcggagtgtcctccgtgctgaccaccaccgccaactgcaacatacaataccccatccagacgctggcgcagcacggactgcaggtgagcatttggggaccgggtgcttggtgtcaactgtcgagtgtcaggtgttacggatcccagccagaagtggctaccaaggatgtgcagtccgtgatacaggccaatccctcgggagtcatacagacagcagctggaacccagcagcagcaacaggcgctggccgccgccacagcgatgcagaaggtggtctacgtggccaagccgccgaactcgacggtcatccacacgacgcctggcaatgcagtgcaagtgcgtaacaaaatccctccaacctttccgtgtaagatcaagcccgaaccgaacacgcagcacccggaggacagcgacgagagtctgtcggacgacgattcccagcaccaccgcagcgagctgacgcgacggccgtcgtacaataagatcttcaccgagatcagcggtccggacatgagcggcgcatcgcttcccatgtccgacggcgtgctcaattcccagctggcggggaccggagcggggggcaatgcggcgaacagctccctgatgcaattggatcccacgtactacctgtccaatcggatgtcctacaacaccaacaacagcgggatagcggaggatcagacccgtaagcgcgagatccggctgcagaagaacagggaggcggcgcgtgagtgccggcgcaagaagaaggagtacatcaagtgcctggagaatcgagtggcggtgctagagaaccaaaacaaagcgctcatcgaggagctgaagtcgctcaaggagctctactgtcagaccaagaacgattga

SEQ ID NO: 12966 - protein, 359 aa, DROSOPHILA
MDNSIVEENGNSSAASGSNDVVDVVAQQAAAAVGGGGGGGGGGGGGNPQQQQQNPQSTTAGGPTGATNNAQGGGVSSVLTTTANCNIQYPIQTLAQHGLQVSIWGPGAWCQLSSVRCYGSQPEVATKDVQSVIQANPSGVIQTAAGTQQQQQALAAATAMQKVVYVAKPPNSTVIHTTPGNAVQVRNKIPPTFPCKIKPEPNTQHPEDSDESLSDDDSQHHRSELTRRPSYNKIFTEISGPDMSGASLPMSDGVLNSQLAGTGAGGNAANSSLMQLDPTYYLSNRMSYNTNNSGIAEDQTRKREIRLQKNREAARECRRKKKEYIKCLENRVAVLENQNKALIEELKSLKELYCQTKND

SEQ ID NO: 12967 - DNA, 2932 bp, DROSOPHILA
atttaactagtgtggatgatagaagtagcaggaagaaagcacttgtagcctggtattgcgccattttatcactacggaattgaaaaaataatatggggaatacctgttattgcattctatactatatcttttaaatgtaatatttcctttttctgaccaaattcatagaataccccccgccccccccccccccttaaatatgtgaataggaaactctattcattatgttgaatgaaatttatgaatgaattgcctttttatttacatatattatatatatagctgatgttcctcgtaatgagttagtccaagttcaggtctgagtgggctcttcacgtgaagtactgggcttgttgttgtatttgctggtgtttttatagtcagcgattgtggcatcgacattgcgtcatcgacttggatgcggcacgtgtccgcatcgtttgttaattgaatttgcttgggccgagtgcaaattatacggagacgggaggagcagcagatgtttggcattcaattcctccagctaccgtgtaattgccgcacgttttggcgattatgttgcttaggctaggccttcgtctccctttggcatactgcagtttccttaattgctttcgaaccccccattttcccgggtcctcaattgcacgatttcagtcttagcccccaacattggccagaatgtctgggtcggggtctctgtatttattgactgtcgttttatcaacgcttagtttattatttgtttaatttactgcacaccttcgcctgcatttcgacacatgaaaggccattgataattttcctggagttgaatggctgtggggttttacaatccaaggccccgatttcgtcaccgatcataaagtacccactttggcgatatcaaaagccagaagtgtattaagttagtctataagagttattatgaaatctgattcattaaacggtaagagagtagatctcaatctctagacattatttaaaagtctaacatgtgtaaaatcatgattacagttttatttataatattttgcagttttcatatttcatacttcaacacttagataccggaagtttccttgatccaatcgcgatagtaagtgatacgggtgaaagcagctggtgcgccagactcgcaaccatcagcggatccaaaggaggtggcaccgatgaggacaccatcgagagccaatgggccgccggaatcaccctggcaggtggaggccttgttggtggtgtcaacgcagaggaccctgctggtcacgatcaggcttccgaaggtttcctggcatttggagttggagatgatggtaaggtccacgtactgcagatcgcgagacacggcggtggcttggtcggaggtgagaccccatccggaggcaacagcggtctttccctcgtaggtggagtagctgttggagacggcgggcaggctgatcttgttcacggtagccgagaaggacacggacgaagtctggatcagggagatgtcgttgcggatggtcaaagccaggtagctttcgtgctgcctaaactttgagctgctgacgacttgggtgaactcggggctagtacggacagtggcaccgtagtagatggtcacggaggcggcactatattggaaatactctcattagacctggtcttgaaggacggaaaatgcacttacccgtcggtacagtgagcagcagtcagcacccactcgtttccgatgatggagccaccgcaccaccaactgccagcagagctggagaaactaagtcccacctggtaggggaactggccggcaacggcgtccttgccgttggtgatgcgaccggtgatggatggggtcgagaccctgtcacggggatgtacaggggcaatattgggcaggagcccagcggaggcggaggccagagccagaaccaaaactacgaaaaccttcatgctgatggttgctcaaactatgagtgattttccctttccaacacggcctcttttatacccagactgagaaatcttatctgcatagatggctgggcaagtccacttaaatgttctgattaagtgtcgcaaaaatttttttaagtttattatatggcgcttttgtaaaatttttctatttgataagatattaatgtagctactggcatttatttcttcatcacaaattagggactttcaaattgtgcgaataaaagataattactttggtagcattaccacttttgtgcttttgttttgctagttgggatttgcttggttaaaaacaattatttattacttatcaatatttctttatcttaactgcctatttacgttgtaacttaaagagtaagccataaagaataggactttataaaaagattccaaagcaaacatttgcttttattttatttaattcttggtaaattggaagcaatattgccataatgatgtaaggtacagtggttttaagacctttttaagcctatttaatggttaaagatttacaattctgttgtttcgctgctgatttcaaagacaatataaaatgatccttaataccagaaattgctcactctttaaagtgtattcgatccagatgaaggtttttgctgtcttggtcttggcaattgccacagtttctgctgatatcctgcgccaggacactccagtacatccccgtgatagctcagctgttccgtccatagatggtcgcattaccaatggaaacaaggcagctgctaaccagtttccctaccaggtgggactcagttttaaaagctcggctggcagttggtggtgcggtggttcaataatagcgaatacatgggtactaactgctgctcattgcaccaaagggtgagtaatttttttaaaaaatcgataatcgatttaagatttattctgttagagcctcttccgtgaccatctactatgggtccaccgttcgcactagtgccaa

SEQ ID NO: 12968 - DNA, 876 bp, DROSOPHILA
atgaaggttttcgtagttttggttctggctctggcctccgcctccgctgggctcctgcccaatattgcccctgtacatccccgtgacagggtctcgaccccatccatcaccggtcgcatcaccaacggcaaggacgccgttgccggccagttcccctaccaggtgggacttagtttctccagctctgctggcagttggtggtgcggtggctccatcatcggaaacgagtgggtgctgactgctgctcactgtaccgacggtgccgcctccgtgaccatctactacggtgccactgtccgtactagccccgagttcacccaagtcgtcagcagctcaaagtttaggcagcacgaaagctacctggctttgaccatccgcaacgacatctccctgatccagacttcgtccgtgtccttctcggctaccgtgaacaagatcagcctgcccgccgtctccaacagctactccacctacgagggaaagaccgctgttgcctccggatggggtctcacctccgaccaagccaccgccgtgtctcgcgatctgcagtacgtggaccttaccatcatctccaactccaaatgccaggaaaccttcggaagcctgatcgtgaccagcagggtcctctgcgttgacaccaccaacaaggcctccacctgccagggtgattccggcggcccattggctctcgatggtgtcctcatcggtgccacctcctttggatccgctgatggttgcgagtctggcgcaccagctgctttcacccgtatcacttactatcgcgattggatcaaggaaacttccggtatctaagtgttgaagtatgaaatatgaaaactgcaaaatattataaataaaactgtaatcatgatttta

SEQ ID NO: 12969 - protein, 270 aa, DROSOPHILA
MKVFVVLVLALASASAGLLPNIAPVHPRDRVSTPSITGRITNGKDAVAGQFPYQVGLSFSSSAGSWWCGGSIIGNEWVLTAAHCTDGAASVTIYYGATVRTSPEFTQVVSSSKFRQHESYLALTIRNDISLIQTSSVSFSATVNKISLPAVSNSYSTYEGKTAVASGWGLTSDQATAVSRDLQYVDLTIISNSKCQETFGSLIVTSRVLCVDTTNKASTCQGDSGGPLALDGVLIGATSFGSADGCESGAPAAFTRITYYRDWIKETSGI

SEQ ID NO: 12970 - DNA, 2647 bp, DROSOPHILA
acgtgtcacaggttggtggaaagtcctgcacaggttgcagttcactggagaggccttctttgatgcggaatcctggctgaccttgcctttttgcaactgcgaccaggaggtgaactctgtccccttgggcagtgccagctttggatccaccaccgaggcaatggaatcaacatccactgtcatcgatagatttatggcaggatagatgaggaaggcaaagaaccaggcgaagaccagcaccagaaaaggcacaaatacggcaaaatacttgtccggcagatacgagtgcagaccaaactccactggcagcagcgcccaagtcacgtatacgaggaagaggaccgtgaacagcatatagaaggcgaaaccatagaccgccctatggggagtcggagctggagtgtgttccggcattgtcgttgctctcggggattagtttctctttcttggagtctccgaactggttgatggtgtcctggcacaggagcaggcactcaaagaaggaggtgatggcagtgcgcaggctcttcacttgatccgactgaaagtgcacaaccagaacatcgttctccaggctcaaagtttttttcacgaaattccggcgcggctcctggtcgacaccgaggactttgtaggcgatctcggccaatcgtggcgtctcaaacggcactcttattatgctaatgaggcgaatatttattactaaatttatgtttatttctttgttaaatggttaaacttacgattcatttggtttatttgcaatttgtggcatcataaaagttttaaccaatctgaaatgctcacatgtcaacggagaaagttaatgacaatttatgaagaagaagcattcaccggctgtttatctcgtgaacagctgattgaagaattcaaatgtttaaaaatgagcattcttcataatcacatttatgttttaaattaagcgcttgttaagtttttgaagttaataacaatgggaaataagctgtcaattaaaacgttaatttcttcaatttgtggtttctttattacaaaaaaaaggtgttcaatatcattgctccaaacaaatccttctggtaaatggttacttcttggacttgacgactcctttaggagcgcccttgggagcgggcttcttgccggcgactttggcacctggctttccggctgcctttcccgcgggcttcttggcggcagccttcaccggcttcttctccacaaccttcttgacgggcttgaccaaagcctcgcgctggctcttcagagccttgacgatcttctgctcttcgatgaggaaagcgcggacgattctctctcgcaggcagctgtggcacaggacacctccgtaggtcctggagacggtcttcaaacgcttggacatcctgggacgctcgctgggccgggagggggtgatcccgtggagtttctccttgcactgaccacagcgtggcacagtggggttcttcttcacgtactggtacaccagacggcctccgggagtgcgcacactgtaaacaaatggaaaatccttagttatcgtgggatatacagcatatctcctgctactcacatgcgcctcttgttggagcgggtgttgtacgacagacgtcgtctcagagtcaagcgttggaccattttaaagcttctgaatccaattgaccacccggaataaacaccatttccaaggaattcatggaaaaaaacagaacaaagacgaaacatcagaagtgcgttgccactacatggtagtctagttttgcatcgcaattaacgtcactaaagcgctttttgcaatcaaaataatcattacaattaaaacacaaacctctccggaaatcaaaagaaggaagaagagaagctagagctggaagaaaaattgatgatattaattgctatcgataatttcaaaacatttatctcgaacacatttaactgacacaatatatattatttagtaccaaaaccagttgtttattcgttctactaaactttttagtatgtaaacttccaaaaagtacaaatatgcattattggactttgtgtagccctgacccgccactttacttaaacttatcgatagcctgttgattaccaaacttccatctctattgcttaaacacgcggctattttgtaaataaaaaaatcttcttacggtttttaactaaaaacatgagttttctgaaacccaagacccacatagaaaagggcgatgtggtcatcctttatttgagtgtcagttccatgcatgccatcgaagcggtgcccgaaatagtgaacaaaaagggcgaaacaataccgcatatttttcagaccaattatggatcgctaaaagttgaaagtaagttaaagttatagatttaacggattctcctaatcccaattcctattccagatatcatcggcgtggagtatggtagtaaagtggagctctccaagggctgggcccatgtccttcagccgacgccggaactctggacacaaacactgccccaccgcacacagattatttacacgccggatattagtatgattatccaccagctggaggtccgacccggtgccgtggtggttgagtcgggcacgggatcggggtctctatcgcattactttctaagagcactgaaacccactggccacctgcacacc

SEQ ID NO: 12971 - DNA, 585 bp, DROSOPHILA
agaagctttaaaatggtccaacgcttgactctgagacgacgtctgtcgtacaacacccgctccaacaagaggcgcattgtgcgcactcccggaggccgtctggtgtaccagtacgtgaagaagaaccccactgtgccacgctgtggtcagtgcaaggagaaactccacgggatcaccccctcccggcccagcgagcgtcccaggatgtccaagcgtttgaagaccgtctccaggacctacggaggtgtcctgtgccacagctgcctgcgagagagaatcgtccgcgctttcctcatcgaagagcagaagatcgtcaaggctctgaagagccagcgcgaggctttggtcaagcccgtcaagaaggttgtggagaagaagccggtgaaggctgccgccaagaagcccgcgggaaaggcagccggaaagccaggtgccaaagtcgccggcaagaagcccgctcccaagggcgctcctaaaggagtcgtcaagtccaagaagtaaccatttaccagaaggatttgtttggagcaatgatattgaacaccttttttttgtaataaagaaaccacaaattgaagaaattaa

SEQ ID NO: 12972 - protein, 162 aa, DROSOPHILA
MVQRLTLRRRLSYNTRSNKRRIVRTPGGRLVYQYVKKNPTVPRCGQCKEKLHGITPSRPSERPRMSKRLKTVSRTYGGVLCHSCLRERIVRAFLIEEQKIVKALKSQREALVKPVKKVVEKKPVKAAAKKPAGKAAGKPGAKVAGKKPAPKGAPKGVVKSKK

SEQ ID NO: 12973 - DNA, 10036 bp, DROSOPHILA
tagaggcttaacagtcacacaatccattaggtttgaacaatcaaaaattccttctgtttcggctttcccataattaccaaagtaataatccctttaccacacgtacatttactagaaacagaatgtgtacctttaattaaacttaatggccaagtaattgaaaacgaaacacttcaaagagttgagattattacgaaatttaaatgaaccaccaacagacactaaaatatatgtgcttctcacctgattatgtgttcgtatgtgtgtgtgtttgtgatgcttttcctgttcgcaggaagatgtcgaggtcataaattcgctcctgaaatggccgagaggagaagcaaacacacaagcacagctggagggttttaattagaacacctgactaactaaaatacacacaacgtcacgaacgtagttatacggcaacatagttagttgttgttccatttatttcaattaaaaattcagttgggccaagggggaacataaatattcattggtaatcgcattgaccttagtcattctctctgtctcgctctctctctctcactatctcaccatctcttatcctcttccattgcaggcagtattttgtgatgaagtcatgtggaagtagcagtacaattataggcaaaagttaattaaacgctgcatcatttgcaaactgcaaaaaggaattcttaacaatcgcaataaaacttttgtcgaacaaaagtaattaaaggacctcacacccatactcaagcccatacccaatacccatactcacttgcagctatgcgacaacaaagttggtaggcgtggcaagggggcaaggcggcgaggaggcgagtggggccaggtggagcacaggagtacatggccaggagtcagttgacgctgccagccgcaaacagctaacagctaacacccaggagccccaagcagcgggcgccaaggacgcagggcgcaggacgacaggacgtaggacgaaaacgaagcgacggccagcaaaatgcagaaggagaacaatgtcacggcggagaattgccaatttgtggggccctatcgcctggagaaaacccttggcaagggtcaaacgggtaagtgcaggaaaactctttccttttacgagaaactaagtgggtggtggtggctgcaacgggtgaaactatcattgcattttctaggcggagtggctattcactcgagacttatttactgtaattgcacttgagtcagctataactatgtgtttgaaaccctaaagcaagttattcaatagtcatcatattggacataaaaataataattcaataattgaaatgaaatcaaattggctgcaatgtttgaaattcaacagcgcacggtaataaaactgttcaataatcattaaaggcatttaattatattaaatttatgcaatccgacagtagataatttaacaattatattagtaaattttatattaaatcttttcagcccagttagactataattgcaattaaattgtagtttagtcactcataaagttcacttaattagccatattaatggatttaccttcttcttactaaaactgagaaaccaattaagatatctgcaattctcggaaaagtaattgcaattacgatttctaacttattcttattgtttcgcaggtctcgtcaagttgggcgtgcattgtgtgattggcaagaaggttgcgattaaaataatcaatcgcgagaaactcagcgaatcggtgctaatgaaggtgagtagtttttcgctggcatcggtttattgttttcccacagtttatgattttgtttttcgttttcttttcctattttttgttgttgctgtatttcttcttgtttgtcttctcctggcgtacgggtcataaaaaactgtgacaataaaatttgttttgtggttcgttgttttattgccctgctccatggaagtgttccgcgttttttttttgggctgtatgaagggcgaatacgaggatgtaacgttgcagtcaaacttacagccatttgaacttttggtcttatatgacatgatagagaaaaggggaaatgcttttggggattaaacaggcttgcggcttcagtgtgccaaagtcagggaaagtcaaaagtatacttttcatcttttgtgagactttaatctgttgtcctttaagtttttaatcaagaaagcttccatcacataaatatcaattattatacaaatgtacggcaaattatctgtggtaaatattcatttattccccaatcgattttctgccatactccagaacgcaccacgtccattgtaatgagtgtcaaacactctaaatagatttcattcattcccagactcgccgccattcattcgcttccaataaaagtcagagtaaggctcaactatttatcttttctctgctgtcataatagaaccaccacccactaccactattctatatctaccgaaaatgtggtgcacttttttgtaggacactgaaaggacatgggacaaattagtgcgtgcgacaacaaagtaaaacaaaattgactgccctccatttctggggtggagttttcggggaggtggtgagaaaagctcagacatgtagcacaatcgaaatgcaaggtatggtcgagggggtgcaaatgaggataaagaaccgccgatgattgcgtgtggtgtccatgctgtagggtcagctggtcgggacacgcaatgagaaatcggacgccattcggaggacaacaatgggctattatggttggccaagcaccaggcactttgaatgcattctaaggataagtgcacttttcaaaaatacttgaagaaaaaaacactacttaaagaggaatataaaaaataatatgagcttttaatagattataataggattaaaatagatttttaaaataatattcgttttttactttaagttatttaccataatctttttttaaatatggttttgttattcttattgatttgattggtttattttttctccgagtgtgggtgtggggacttacgaggaacctggcaacattgtcgataagtcgattaaaatcgcttgtgtgctccactctcctctgctctactcttcacgcaaaggttgaacgtgaaatcgccataatgaaactaatcgatcatccacacgtccttggcctgagcgatgtgtacgagaacaagaagtatttgtatttgatattggagcatgtatccggcggagagctcttcgattacctggtgaagaagggtcgattgacgccgaaggaggcgcgcaagttcttcaggcaaatcatctccgccctggatttctgccactcgcattcgatttggtaagtccctgttgaaagctcccctcccagaacttcaatcaatattggatttattctgcgtttcagccatcgcgacttgaagccggagaatctgctgctggacgagaagaataacattaagatagcggactttgggatggcttccctgcagccagctggcagcatgttggagacctcctgcggcagcccacactacgcgtgtccagaggtcatacgggtaagtctcgcagtgaaaaatggccaaaagattgccagcccagccagaccaggcggctactcgcatcccccaatccccaatccgcacgagtgcggcaaacgcgtaaacgtcaatcaagacgaactttttagcacattttcagatgcagcagcggtggcttcaactgtgcagaaagttgaaggaggcggctcctggagtcgctttcctatgcaaatttcttcagctcccttctatgcaaatgcacgtcatgtgcgcatatgatttcccatctcgggatgcactgcgttctctacacccagcaaaaagttgcgagtcgccccttaaagcgttcgattttccgccaaggataaacgaactggttttctggttttccccaaagaaacattttactgcgagttaaaagtcagttattttacttttcagcatccttcaatttacggcatcactttcatttgttgctatacaacttttaaaattgaaaccaagccaatttactttgtccctaaagtagcttctgaagtgtttcttagatatttattaagaagaaggaccctttatcaaatttgtcgaccttagaaacataatgcaaacctaagaaagattaaatagtaattttacaattttcttagtgtaccctgcatcatatccttttgagcagagctgctgcagcttctggcgaatctttatagcttctgcacccgtaataaattcataaggggaattttaaaatatctcctcgttcagtcttatcatatactctggctgggttataaatctggcttgctacgtgatgtttagcttatctgcacatatacgagtatatcttttttttataaatattcaacagtcaaagctgtgaggggaatgggtgaagttcctttccaacgtctaattgatgactgctaaccaaatctgcactgccaggcaaaaaccttgacaatttgtaggggaaaattgcgtggaaagcccatgtactcaatcacataagtggtcgtttatcaatctttggaaggtggcaggggttgtggctggaacaaccagagctgcaaagccggtttagggttaccggaaaaaaaaacttggcttgggtaatcgagcgtacatcagagttataatctaacaaattggagtttcgagactagctgtaattggaaagtgtttatgagttatgggtgggtttggattcatgagagcgaatacaagtggcttagagattttcattcctcatcgaaataaagaaagcttttgaatagaccaatgccaaattgtaagataaaaggctgagtaacttaaatgccttgtactcagtggggtgcaaataaatccgatgaaatattttgagaatcattaaaaaataacactccttcgtgcagcaagtcttaaatatctcgctctaaggggtaactacgtggccagctatttacaatcgtgctacacaattacacattgtagtgggcaacaaactacgagtcattgtcccatttacctgcaaagtcaataaccgtcccgtaggaaaaccacgattcgtcggagtggggcaaacttggcatttgatggacacgtcaatggacgtcaacgagttgaacggaccagcccctctgtccgtctttaaatagaaaactttttaaattagtaagcattcgattggggattatggcaatcccatacgaatgcggttcgataaaaaaaagggataacgatttgaggccacgcacaaaggccaatcgaatttcaaaataatcaagctaaaagcaaacataaaccgaatatccaaacaaacaaacaaatgctcgtcttggaaatgtctcaatttctgatttcgtatttcccccaaccactattatcatttttccagggcgagaagtacgatggccgcaaggcggatgtctggtcctgtggggtcatcctctatgccctcctggtgggtgcgttgcccttcgacgacgacaacttgcgccagctgctggagaaagtcaagcggggcgtctttcacataccgcactttgtgccgccggactgccagagtctgctgcgcggcatgattgaggtcaatccggaccggcggctcacggtgagtcatccccgccacattcacacccgaaatgcagtcagtggtgatctgatccgacaatgtcaattcccaaaacttggtgtcttgctaagtgcacctgaaaaaatatattgggtctaatgaatatttgctttaaccttttctaactatttttattttatgtcagaaattgcaataataatattaaaaacggtatcaattaaacacattaaaaatgttcattttaaaatccatttaatgtagtacataaattttgaaagctaattgaaatacactagcctgttgcgtgcttattttttcgagtgtgggtggtgagtcattttgaaagccaccccaccaagcgttggttggtttttgggtcaccacgttgccagctattttacccaacccctttgcaattcctcccctcaactcgttcttgcttcattttcgaccgcgtccagctggctgaaatcaaccggcatccgtgggtcacagctggcggcaaaggggagctggagctggagctgccaatgatggaggtggtgcagacacacgttattcccacagccaccgcggtggatccggatgtgttgaacgcgatttgctcgctgggctgtttcaaggagaaggagaaactcatccaggaactgctcagttcaaggtgaatttaaatgtctttaatactttcttttcgaattatatctaacttgattgttttacataacagtcacaatacggagaaggttatatatttcctgttgctcgagcgcaaacgaagacgacctgcgctggaggatgatgatgagattgcgcaaaagtcccgcagcgaactggacgcagtggatccgccgcgtaagcgtctggacacctgtcgcatcaatggcaccaatgcacccagctatgggcagatttcggaaggttcaccgctcacgccaagacgacaggcctttaagtgagtatataaattgaaattgaatccttcgaacaccggactaacttatttattcctatcttacagtttccggtcgtacagcagcacccggaaccaccaacgccgatcgcccacaacagttacctcgtcggtgcggagctcctcatatcacagtcccacgcgctgcaactctccgatgagttcggcacagcagcaggcgaatgccatatcccgaccatcttctccggcggcgggcacccggcactctacgtacggtgatcgagatcgttccggacaccactcctccgtaagccggacaccgtcgcacagttcgcagaagagcatcgagggtgatgtggtggtggtgcgggagccgaggatcgagcggagggactcactgcgtcaggagcgcggcggaggatcgccgagggatcgaggcgattgcggcataccgccgggcagtccgggcggcaactcgagcggatccacttccgcctcgccgtcggtgcaccaccgtgccaactcaggtccgaccattgccattagtatgttccacgatccagattcgaatagtggtgtgtgcatgccccgtagatcccttgaaaaatagcaaaccaatacagaaacaagatcagatttaaatatgaatatagaagatcttgtttcgtgtacattctgtaccgatctgtaatggttattttagtattttcaagtatcaaatgagcctaattcatactttaatcaataacatgtgcttgaacatatcaaattaaccataaaacacatcggttagataactgatatcaccttttctgtacaaggatgttctcaaataatctttacaattcttacttacagttgtgaatcccaatggctcgcccatgatgaacaacagcagtccgggaatgcccggatctccttgcaatacacctggtggtcagttgtggaagacgcggctgacaaacatcaaaaacagtttcttgggcagtccgcggttccatcgcagaaaaatgcagggtaggtgttccaagcaaattgaaagaatgaataataattataataacttttcacagtttctgccgatgaggtgcacttgacgcccgaatcttcgccagagcttacaaagcgctcctggtttggaaatctcataacaaccgagaaggatgaaacctttactattttggtcaagggcaagcccattgccacggttaaggcgcatttgatacacgcatttttatccgtaagtagctatatcttttgggactcattctcatattaacttcgaatatttctttcttacagatggccgaactatctcatagtgtggtgtcgcccacctcgtttcgggtggagtacaagcggaatggcaatggacctgtcatgttccaacgccacgttaaattccaggtaagtttaaagccatcagcaggaattcagtgatctaatgatatatgactaatttcaggttgacatcagtgccatttgcaaacaaggtgacatagcggatatgttgtttgctttgacatttacgctgctatcaggtaatcaatacgttgttgctcaactatgtgtacagtcttgttaaactttccgtttgtgcaggtaacattcggcgttttcggcgcatttgtgagcacatccaatcccaggtgtgttccaagcgatttccgggtcccagtagtccgccaacggtgaccagcgtgacccaggccgtctcggagagctcctcctgcggatcggtgtccagcgagagattatcgtacaagcgacaggtggtgagttcccttctcgatagcaattcccaagatcgtgaaactaactgagttatatttagattgaaaacgatatggagaacgattccatattctcgtacaagtcgggcaatggacgtcgggcctcgaccacaaataacaataatgccaatccagttgacattcccggaagtcccattgcagtgcgatccaagtaagcagctcgcactttgagagcaaactgtaaaattgtatagttccgaaaatattcttattttatttgcctaagaataaatatacaaaatagtattctcaatcatatatttgctttataaatcatatataagaacatttcattgaccttgtaattaacttgagtttgaaaatagtggacctgttaaaacacctttcgcctagaaaggtttaagaaatagatatttttggagctacataaattgttgtacattattattaatatatcaaaaatatattaattaattgtctccactttttttcagctctgagaccgctgagcacgaacgcaaccgcgagctgcagagtgagcgtcaggcgacaacgatgtccggtagtgcaatcgcatgagaattatttctctgatttagttacatttttctcaaggacatttgtttcgatatggcactagtgagcgagaaacgcgaacagatattgttaaccaactagcgaacgaatcagccactcaaacagtattttttctagagtaccatcagccagagatcttcaaactacgtaaacacacacgaaaatccgaataatataccaaagcaataatagtggaatttatatgaactagcgcatacatatatgtaacgaatctgaatcagaatctgaacttttgaatgccgaacgaatgaacagaactttgctagctgctctagcttttatcgaacttgattttctattaattgttaatttttttattgactttttgtatgtgttcttttgagggacattgttgccgccgcgcctaaaaagcttgcaaataaaaacaccgtgtaaaaatatacaaaaaaaatcaagttagcactagcctaagtcgaaccagttattctagtcattttctttacctagactaggcctcgtatttagctacgcaaatgaggaatgctactcaagaaaattcgccgacgatttgtatagagtgtataaaggatattacgcaaatgcactgatctttaattactaactaaagtaacagaaatgaaacaaaaaacaaaagaacttttgcattaccttagcgttgctgttttttctaacaaaccaaatcgatataactattttgctagctataaaaacaaaaaccgacgaagcaggacgtaaaaagcaaactatttttcctaataacaaaatactaaacaaaaaaaaacgcgtcaactttcgaacttcagacatgcatatatgacgatcaaaagagtgttgtgcggtagataaactcaacagatattggacaggaaagaaggaaaaccaaaatatataatgtatataagacaccgaattactaaaatggcacagcacatgccctaataaagcatataaagcacattaaagtaacgacattaaataccagaaacaatatattttgcatgggcatcaaataaagctttcttaaccgatacttgtataaatcgattgggacgaaatatatatctatgtatagaacggatcggggattgtacaaattgctgggttgcatcagagacaaaagaaaacctaggagagaaattcaat

SEQ ID NO: 12974 - DNA, 2720 bp, DROSOPHILA
atgcagaaggagaacaatgtcacggcggagaattgccaatttgtggggccctatcgcctggagaaaacccttggcaagggtcaaacgggtctcgtcaagttgggcgtgcattgtgtgattggcaagaaggttgcgattaaaataatcaatcgcgagaaactcagcgaatcggtgctaatgaaggttgaacgtgaaatcgccataatgaaactaatcgatcatccacacgtccttggcctgagcgatgtgtacgagaacaagaagtatttgtatttgatattggagcatgtatccggcggagagctcttcgattacctggtgaagaagggtcgattgacgccgaaggaggcgcgcaagttcttcaggcaaatcatctccgccctggatttctgccactcgcattcgatttgccatcgcgacttgaagccggagaatctgctgctggacgagaagaataacattaagatagcggactttgggatggcttccctgcagccagctggcagcatgttggagacctcctgcggcagcccacactacgcgtgtccagaggtcatacggggcgagaagtacgatggccgcaaggcggatgtctggtcctgtggggtcatcctctatgccctcctggtgggtgcgttgcccttcgacgacgacaacttgcgccagctgctggagaaagtcaagcggggcgtctttcacataccgcactttgtgccgccggactgccagagtctgctgcgcggcatgattgaggtcaatccggaccggcggctcacgctggctgaaatcaaccggcatccgtgggtcacagctggcggcaaaggggagctggagctggagctgccaatgatggaggtggtgcagacacacgttattcccacagccaccgcggtggatccggatgtgttgaacgcgatttgctcgctgggctgtttcaaggagaaggagaaactcatccaggaactgctcagttcaagtcacaatacggagaaggttatatatttcctgttgctcgagcgcaaacgaagacgacctgcgctggaggatgatgatgagattgcgcaaaagtcccgcagcgaactggacgcagtggatccgccgcgtaagcgtctggacacctgtcgcatcaatggcaccaatgcacccagctatgggcagatttcggaaggttcaccgctcacgccaagacgacaggcctttaatttccggtcgtacagcagcacccggaaccaccaacgccgatcgcccacaacagttacctcgtcggtgcggagctcctcatatcacagtcccacgcgctgcaactctccgatgagttcggcacagcagcaggcgaatgccatatcccgaccatcttctccggcggcgggcacccggcactctacgtacggtgatcgagatcgttccggacaccactcctccgtaagccggacaccgtcgcacagttcgcagaagagcatcgagggtgatgtggtggtggtgcgggagccgaggatcgagcggagggactcactgcgtcaggagcgcggcggaggatcgccgagggatcgaggcgattgcggcataccgccgggcagtccgggcggcaactcgagcggatccacttccgcctcgccgtcggtgcaccaccgtgccaactcaggtccgaccattgccattattgtgaatcccaatggctcgcccatgatgaacaacagcagtccgggaatgcccggatctccttgcaatacacctggtggtcagttgtggaagacgcggctgacaaacatcaaaaacagtttcttgggcagtccgcggttccatcgcagaaaaatgcaggtttctgccgatgaggtgcacttgacgcccgaatcttcgccagagcttacaaagcgctcctggtttggaaatctcataacaaccgagaaggatgaaacctttactattttggtcaagggcaagcccattgccacggttaaggcgcatttgatacacgcatttttatccatggccgaactatctcatagtgtggtgtcgcccacctcgtttcgggtggagtacaagcggaatggcaatggacctgtcatgttccaacgccacgttaaattccaggttgacatcagtgccatttgcaaacaaggtgacatagcggatatgttgtttgctttgacatttacgctgctatcaggtaacattcggcgttttcggcgcatttgtgagcacatccaatcccaggtgtgttccaagcgatttccgggtcccagtagtccgccaacggtgaccagcgtgacccaggccgtctcggagagctcctcctgcggatcggtgtccagcgagagattatcgtacaagcgacaggtgattgaaaacgatatggagaacgattccatattctcgtacaagtcgggcaatggacgtcgggcctcgaccacaaataacaataatgccaatccagttgacattcccggaagtcccattgcagtgcgatccaactctgagaccgctgagcacgaacgcaaccgcgagctgcagagtgagcgtcaggcgacaacgatgtccggtagtgcaatcgcatgagaattatttctctgatttagttacatttttctcaaggacatttgtttcgatatggcactagtgagcgagaaacgcgaacagatattgttaaccaactagcgaacgaatcagccactcaaacagtattttttctagagtaccatcagccagagatcttcaaacta

SEQ ID NO: 12975 - protein, 851 aa, DROSOPHILA
MQKENNVTAENCQFVGPYRLEKTLGKGQTGLVKLGVHCVIGKKVAIKIINREKLSESVLMKVEREIAIMKLIDHPHVLGLSDVYENKKYLYLILEHVSGGELFDYLVKKGRLTPKEARKFFRQIISALDFCHSHSICHRDLKPENLLLDEKNNIKIADFGMASLQPAGSMLETSCGSPHYACPEVIRGEKYDGRKADVWSCGVILYALLVGALPFDDDNLRQLLEKVKRGVFHIPHFVPPDCQSLLRGMIEVNPDRRLTLAEINRHPWVTAGGKGELELELPMMEVVQTHVIPTATAVDPDVLNAICSLGCFKEKEKLIQELLSSSHNTEKVIYFLLLERKRRRPALEDDDEIAQKSRSELDAVDPPRKRLDTCRINGTNAPSYGQISEGSPLTPRRQAFNFRSYSSTRNHQRRSPTTVTSSVRSSSYHSPTRCNSPMSSAQQQANAISRPSSPAAGTRHSTYGDRDRSGHHSSVSRTPSHSSQKSIEGDVVVVREPRIERRDSLRQERGGGSPRDRGDCGIPPGSPGGNSSGSTSASPSVHHRANSGPTIAIIVNPNGSPMMNNSSPGMPGSPCNTPGGQLWKTRLTNIKNSFLGSPRFHRRKMQVSADEVHLTPESSPELTKRSWFGNLITTEKDETFTILVKGKPIATVKAHLIHAFLSMAELSHSVVSPTSFRVEYKRNGNGPVMFQRHVKFQVDISAICKQGDIADMLFALTFTLLSGNIRRFRRICEHIQSQVCSKRFPGPSSPPTVTSVTQAVSESSSCGSVSSERLSYKRQVIENDMENDSIFSYKSGNGRRASTTNNNNANPVDIPGSPIAVRSNSETAEHERNRELQSERQATTMSGSAIA

SEQ ID NO: 12976 - DNA, 4476 bp, DROSOPHILA
attgcctttaatgtgataagtaagattgtatgcggcgatctgcagagttatactgatgatgtccaggtacttcctttatactgagaagtctagcataattattgttatacaatataataatataatataattaaactgttttgctgtgtgtaaaatcgaattgtagcctttgagttggtgggcattttaagctgtatttaaaatgtggctgtttatttttatatacacatttattttgctatttttcatttaggcttcaatactaaaaccaagtagccattgcattccatccgtcaagaagtctctacacaaataattaaaatttactggcgtgcaaaatgaacactctaatgaaaattcaattggttaggcctgtttttcgcattacgttgaggaattatgggaaaccagagcgatttatgtggtaatatataggaaaatcaaatcgaacaaagcatcaaaagtataatttccacaaatattgtaggtgtcagaaggagtatgctagagctcccaaggtggtttgcttggacggaaatgagattccagtaattgggctcggaactttcaatgtaaatattatgacaatgtctgttttttcatatctatgccatagttttgataaataatcatatttttacgaagatatggatataaaaatttttacatagcgatcataaagagcctatatggttgaagggcttttgaaattttatagcgatcataacatatgtaaaatgatacattttagtatcatttattgaaatcattaaatgttttaattgatttagtttaatatatattttcttttatgctatatagagagtatatcagcactcgatatttaagcgtaactgacgatcgctcagctgttcggcttgtcgactatgcagccctgtcctccgaaagctttttagaatttcgaacaagcttttgcggtgcgtatataagcggttaacagctgagtggaatcgctcagtttgttgagaggcggcaatcgttaaaagattcccaattgtattataaatatttataaatatccttaaacaataagcgaaaatatagtacaatggctgtaccgaacgttaaattcaacaacggcaaggaagtcccaatcattggactgggaacctggggcgtaagtagaatatcaagtgattgcactactttatacattataccacttgcaaatcaatgcaattgtgtttgtgagttctgcttcccacaatcgggtagttttccgctgcccacgatttcccgttttttgcccagctctttttgcactgatgccagaatacacataggggataaaaaagcgtcgctttgctgatagtttgccggctgtattttgccggtcagtctgtatgtacatacatatgtacatattaaatgctatatctgctgcaaagcgtcgaatctagcagctatattacaaaaataaccgatattttgctgcctttatgctaattattgcacaccatggtgaatagatgtgtgatttgaagatctccatgaactttcgtcaaggtgaccctttctaccttcttagggcagtggaaacttttcgcaatatgtgccacatcatttccagatacttgtaatccacaaacgtttatatatttggggcacatagtaacggggttctactcttatctagagtggcagattaactaacaagattgcttcagttttaatattaaagtgttacaaaagtaaggtgtaatcggaatcgtgaaagacaagcccctcaaaaacggaaaacaagcgtacaagttgaatacaattcgtaatgagaaagcttttaaaaaaaataaatatacgctgatagggcggttttaattagcaagggtattataagggtatttttaaaaacggcttatctgaattagtaaacgtgcactatttgtagattaaaaaaggagaggcttggtggccaacccataaattaaacaacaaatgtctagtggccgtaatgtatagttataaagtcaaaacttaatgaaagtctttgacctttcttctttgtgaaacataaatcaattttataaactttggccaatttacatacttaaaaatgttcccctttaaaactataagattcatgtttgtaattctattttactataataatctgacctatttatgatctcattagaatctttttttggatgcgggaactaagggggctgataagtgacgtcaagtgtctgatagggaagactttagtgtttagatttccaaatcacgctcctcataactgaaactttgctcgataacgaattgcgaaattccgttaagagcatcgaatattctatggttccatgattattaatgcttctttccatttctaagcacaacacaatttattaacccttgaaagtgcggaagccaattagagaacttgtgataacagaattgtgcgataaatgttatttagaaaaggcctaatctacatgataactacaatttgttgcattttttaacaccatatgttgctaatttgcttccagagccccaagggtcaggtcaccgaggctgtcaaagttgccattgatgccggatacaggcacattgactgtgcctatgtataccaaaacgaggatgaggtcggagatggtgttgaggccaagatcaaggagggcgttgtcaagcggtatgttctagtcttggtctactgttgttgggataatctcatgtactgaatttcacaatttcgcagtgaggatctgttcatcaccagcaaactgtggaacactttccatcgcccggatcttgtcaagtcggcattggagaacacattgagctccctgaagctgaagtacctcgatctgtaccttatccactggcccatgggctacaaggagggatgcgatctgttccccaccgacaaggatggcaagacgctgtactcgccggttgattacgtcgacacgtggaaggccatggagaagttggtggaagagggtctggtcaagtccattggtgtttccaacttcaacagaaggcagatcgagcgcgtgcttgaggtggccactattccaccagtaaccaatcagattgagtgccatccatatctgacccagaagaagctgattgacttctgcaagtcaaaggacattacaatcactgcctacagtcccttgggatctcccaaccgcccatgggccaaggctggtgatccggtcatcctagaggaggctaaggttggtttgcattgataacaacatgttgaatttaactttaagcatttttaaaacttttagatcaaggaaattgccgctaagaagaagaagacccctggacagatccttattcgataccaggttcagcgtgccaacattgttatccccaaatctgtgaccaaggaccgcatcgagtccaacttccaggtcttcgacttcgaactgacacctgaggaaatcgaaatcatcgaaagcttcgagtgcaacggccgccttgttcccctactcaagtaagtctactagcaccttaaataatgtttatttatttacattattaacgacatgtgggcttacggttattttactcgaaaaaatcacatatttatttgtatttattcagggatgctggtacccataagtactatccgttccatgacgagtattaggccttaagaaacttatatctgaagagcaagaagaattcgaatgaatgaaaaattatacctattggaaagggaaacgcttacgaagaaaaaatcaaaaagtttactggtctatataaacatgaacatgagttcaacgtatgttttcaagtttttaagcgcatattcgtgtttccttaatatttgtgtttactgagtttggtttatttagctttattattgttttactctccccgcttgtgctctaacaatatttatatctttcttttaataatttaaacacatttctacgcttaggcagtagtagttgtagataacccattgttcgcttagcttgtgcttaaatatagtttatataacatatactgatcaaatttgtttttaaataattacagccaatacggtcaccctcaccaccctttcgagaaggacgaatactagaaagcgacacagtgctcggttcaaatctataatttgttgcataatcattttatctttaatcgtacgaataaacaaaaatacaaataacgttctcgtcttccccctgattgtttcaatttttggagaactggctgaccaaataaatggttctcgtgtgcttttaatgaattgttaaaaaatcggttaatgcacctctgacgtataaatttgacacgagcgaacgatttacgtaaagtcaaaatatctaacaagtgtttaatccaagctgagcacaaatattttgcacagttgtttcttaataggtatttaaaagatatttactttgacgtatagtatagttcatacaatttgcttagttattgtattattcgtagaaacaatggaagtaccaaatgttctttgtcaaataa

SEQ ID NO: 12977 - DNA, 978 bp, DROSOPHILA
ttaaaagattcccaattgtattataaatatttataaatatccttaaacaataagcgaaaatatagtacaatggctgtaccgaacgttaaattcaacaacggcaaggaagtcccaatcattggactgggaacctggggcagccccaagggtcaggtcaccgaggctgtcaaagttgccattgatgccggatacaggcacattgactgtgcctatgtataccaaaacgaggatgaggtcggagatggtgttgaggccaagatcaaggagggcgttgtcaagcgtgaggatctgttcatcaccagcaaactgtggaacactttccatcgcccggatcttgtcaagtcggcattggagaacacattgagctccctgaagctgaagtacctcgatctgtaccttatccactggcccatgggctacaaggagggatgcgatctgttccccaccgacaaggatggcaagacgctgtactcgccggttgattacgtcgacacgtggaaggccatggagaagttggtggaagagggtctggtcaagtccattggtgtttccaacttcaacagaaggcagatcgagcgcgtgcttgaggtggccactattccaccagtaaccaatcagattgagtgccatccatatctgacccagaagaagctgattgacttctgcaagtcaaaggacattacaatcactgcctacagtcccttgggatctcccaaccgcccatgggccaaggctggtgatccggtcatcctagaggaggctaagatcaaggaaattgccgctaagaagaagaagacccctggacagatccttattcgataccaggttcagcgtgccaacattgttatccccaaatctgtgaccaaggaccgcatcgagtccaacttccaggtcttcgacttcgaactgacacctgaggaaatcgaaatcatcgaaagcttcgagtgcaacggccgccttgttcccctactcaagtaa

SEQ ID NO: 12978 - protein, 302 aa, DROSOPHILA
MAVPNVKFNNGKEVPIIGLGTWGSPKGQVTEAVKVAIDAGYRHIDCAYVYQNEDEVGDGVEAKIKEGVVKREDLFITSKLWNTFHRPDLVKSALENTLSSLKLKYLDLYLIHWPMGYKEGCDLFPTDKDGKTLYSPVDYVDTWKAMEKLVEEGLVKSIGVSNFNRRQIERVLEVATIPPVTNQIECHPYLTQKKLIDFCKSKDITITAYSPLGSPNRPWAKAGDPVILEEAKIKEIAAKKKKTPGQILIRYQVQRANIVIPKSVTKDRIESNFQVFDFELTPEEIEIIESFECNGRLVPLLK

SEQ ID NO: 12979 - DNA, 3068 bp, DROSOPHILA
ctaaatttctccgagcagagcagacgttttgctttcgaaaagagagtgggcatggccatcggggatcataaattgccgcattatcagccaacattcttatcagtacacccaattttcggctgatctgaggcttatttttattttcctattgactgatgtgttccagctgcgattggccactcgcctcctgctccctcacccactcccctctcacatcccgcttgtgcgcactctcctcctctcttcgcctcttctccgcactctcactctcattattgcacagtggtgcagtttcgcactatcacctgaaaatctcgcaacgccacgattccgaattctatggtccaaaaaggggggcgaaagagaaccatttgaagatttgggctgcttcaacacgtggcatgtccactgtgaccctgattctcgctggccttccatcattctttctttctttcactccgaaagcataaaacagacgaaatttagagggcatagttcattcaactcttttgtccacagaagaaactattgtgagtgtaaatgatactttaatttagagacaaggtgtgttatttttaaataatggtgaaagtaacaaatttaaaaaagattacattttttcataatcattatgactaatgtatttagttcattagttcattcattttcaacgtttaaagtaattagtaaatatatctaattttgaagaccatcacaatgaatgaatacatgttttcttcattaaatttgtgcaaaacctatacaagtgttcctaaaaattgaaaaaaaagtatctacaccaattaagcatagcctgcatattgaatataaatgtttttaatctggacaaaatggtattataactacgtatttccaatttttaattatccccatcctcactcgcggttttagcttactcttaaatcttaggtcatcgagctcagtcgcaaaaaaagctcagtttaaaagctcaaaaagtctcgtcattctttttagcaaacacaattgcaatgataaacacaataaataattaaacatcttttgcgaacagctgaggaaatctagaaatactcttcataatcgaaactcattgaaattaagttagaaaatggctcaggttaaaccgaaaagtaacaaacagagcggcaaaccagtgccggccgccaaaaaggtaaaaaattgaactcaatcaaatgattccacaatatcaactatccccagcaattaagattcttaataattttctaattttgtactatgtagagcgtccaagagaagagcagcgcgcagcagaagaagaacaaacagaaggccgcggcagaaaaaaagaaatgcggatgctgcaagtggaccttgggtagcatcttcatcatcgccctgattgccggagctctgtactacgataccgaggtgaacggcaagggcgtgttcgagaaatcggccaccggcaaggtgctgaaaaatgccggagtcctgccgcatgtccagaagtcctggtacacggtcatgggggccggagcgcggggctacaagtgggcggaagtgaatgtgccgccgtacgccgagccggtgatcaagaccacctgtgacctgtggaagctggcgaggaatgcggcctgcaacgcttaccagaacggcaagggatactttggcgccaaatggcccgttgtggcaaagttcgtaagtgtcttttagtcgccatgaagatgaggtcatgggcaaaccagttttgaattaataatacgttccatctatattttagattgaccaatacgtgcccaattcgtctggcaaaatcgaagcttttgccgctggcgttagcgatttagccgccagcagctatgaaaaggctgcagcgctcatcaaggaaaaggtgcttgtgtaagtatgcctgcctgcctggcctttgttgtctttgagaatgcatcccttatgattgtgatctttgtttagtggccgtctctcgcccgagaacatcaatcaggcgctgaaccagacgcgtaacgccgccctggagtactacaaccagtttcacaaaaaggtcgacgcatacgccaagctcaaatgattttaagcgtcaggaacgcttacttctcgaacagcaacatcatcagcagctgcagcagatgcaaacagaatacgcgtcatagtaaatagtgaaggaagccctaatttttcgcaaaaagttaaaaaaccggaaaatgttctataagtcgaaactcaagaagtcattcacatttatcaacaacttctcgtcaagtttaattaagaaaaagcaatacgagcaaatctttgtggatgccgatagtacactaacaatctagtaaattcaacctcgatactgataaattagtgaaagacacgagaaattttctgttgtaaaacatgtgtttaaacatttttctccaagttgagaaaacattatttttaaattcgtttacaacggcatgagagttttgtgaaaagttctaccattgaaattttgtaattgtaattattaaagtgcgttttttgtggcgatgcgcgaagtgttaactctattgtgttaactgaacttaacaattccaactgcattttgaaggcaaacaatagattcaaatatttttatacttttattcatagttttcttgcatttgtgtgtacatttctgtagactcctccccaatacttgcataatagcgcgatacttttgatttgattttaaatctcatttgtatatttaatggaaaacacgattttgcataaataaaataaaattgaaagatgtgaagtaaaggcgtatttctcaatgtttttctgtgcttgattatgtttttgggggcatattgatgaatcgtaagattctgaacacacctgttggcattggcagcatggcttgcactacacacttgtttaaattggaaaagcggcttgaaagcagtttttatttcccaaaagagactagaatttagatcagtaatatttcctgggcaatttttctagaacagttctctcgaaactaagcagttcaaatgttttgcaagcagtccaagaactaaaatttccctaggtttttgttacccatataa

SEQ ID NO: 12980 - DNA, 822 bp, DROSOPHILA
cacaattgcaatgataaacacaataaataattaaacatcttttgcgaacagctgaggaaatctagaaatactcttcataatcgaaactcattgaaattaagttagaaaatggctcaggttaaaccgaaaagtaacaaacagagcggcaaaccagtgccggccgccaaaaagagcgtccaagagaagagcagcgcgcagcagaagaagaacaaacagaaggccgcggcagaaaaaaagaaatgcggatgctgcaagtggaccttgggtagcatcttcatcatcgccctgattgccggagctctgtactacgataccgaggtgaacggcaagggcgtgttcgagaaatcggccaccggcaaggtgctgaaaaatgccggagtcctgccgcatgtccagaagtcctggtacacggtcatgggggccggagcgcggggctacaagtgggcggaagtgaatgtgccgccgtacgccgagccggtgatcaagaccacctgtgacctgtggaagctggcgaggaatgcggcctgcaacgcttaccagaacggcaagggatactttggcgccaaatggcccgttgtggcaaagttcattgaccaatacgtgcccaattcgtctggcaaaatcgaagcttttgccgctggcgttagcgatttagccgccagcagctatgaaaaggctgcagcgctcatcaaggaaaaggtgcttgttggccgtctctcgcccgagaacatcaatcaggcgctgaaccagacgcgtaacgccgccctggagtactacaaccagtttcacaaaaaggtcgacgcatacgccaagctcaaatga

SEQ ID NO: 12981 - protein, 237 aa, DROSOPHILA
MAQVKPKSNKQSGKPVPAAKKSVQEKSSAQQKKNKQKAAAEKKKCGCCKWTLGSIFIIALIAGALYYDTEVNGKGVFEKSATGKVLKNAGVLPHVQKSWYTVMGAGARGYKWAEVNVPPYAEPVIKTTCDLWKLARNAACNAYQNGKGYFGAKWPVVAKFIDQYVPNSSGKIEAFAAGVSDLAASSYEKAAALIKEKVLVGRLSPENINQALNQTRNAALEYYNQFHKKVDAYAKLK

SEQ ID NO: 12982 - DNA, 3782 bp, DROSOPHILA
tcctgcgtgggcatgtagtcctccacgcgcaccttcttctttttgcgcttgcgggcatcgtccaactctttgaggcgtattttggtagcctgtgtcttgatggccgtggaagtgcgtatggatttgcggccggaatcgaggaccgtgaagcgtggacgtggccgccgtttcgttaccccaccaccaggtcgtttcttgtgcagggccggcgttgcctttgtttcctttttgactgcaggcttggtttcctgcggaaatcatatgtaccatttaaacacattcagtaatcacaggattttatcgcattttaagaatggttcgcaccttataagcctttgtgttaacgacaccgcgtttccgctttttctcgggcgcctcttcctgatccgaaacgggctcgtcgttctcatcgatactgaagtcggagtcaaccacatcttcctcttcgtctttttgcctgcagagtgaattttatatggcttgagcatttaaatttattcaaatgattagtgctcactcgtattccttatcctcttcgtcctcctgaaatccaccataggacgttttgtaaaagtcgtcctcctcttcctcattgagcaaatgagctattttgttgccggcattgttgcgccgtgatcgcgaggcagccatttttgttatttatatatagaaactatgatttaaagcagctattaaataataatattttacaatttgtaaatgtaaacaagcagagcagtgtgaccaatgtagcaaacatagtatatatcgcagaggctttacaactttggtatgcgtttcagccctggtaaagaaaatggtttctcctgcattggcagttattcaaacacatttaaaacatagctaaatttatttatttatctattacatgtatcacaacaaaaagcaggcagctgctttaaaatcacattaaaaagcggtcggtaattcaactaccgaaagtagaccacattactttacacttgcgctggccacactcttggcttgttgctttttattctgccggctgcctgcattttctgatttaatttaataccatcgataaaaagactgctcgcaacatgtcggaacaatgggaggtggtctccaagtcgcgcaagcaaaagaatctggacaagaaggtgtctgcacacaacgagcagaagcgcatcgcggcccagttgcccaaactggaggagctgtgtaagaatcttttaaaaggtgcaccttgcaatgcgattacatgtttgcccctgccattttattcacttcgcagtgccaactcagcggtatcgcaatttgttcggcagcagcaacaacaacaacagcaagtcccattcccctgcgaaatctagttcaagtgcctcatcttcctcaaaagccaataagtcgccagttaaaaagcacaccgcaaagaatgcctctacccaaaaaaggaccacgtcggcagccgcatcgaagccaaagactctggagctggccttgagaaacatcacccgggatgattttgctgcccaactggagcaggtgaagctcagttgtcctggctccgagctgcgctggttaagccatgtatgtttctaaaggaaatgtgcctaaatatttgctcacctatcgttgtcccccagattgcgctatacttcaatgaagccttgtcctatgactgcgatcccatcttctccggccgctcggctcagtatcccagcaatttggccagcgcctcgctcaagtactcaattgtggagtttctgggcagtgtgggcgaacaaaacctggagtatttcttctactccctgctggatagcatgtcaacggatctaaacaacaatcagacagtggcaggctacaagctcatcctacagttgatcggtcaaaactggccgaacatttgttctaggaacctggccaagactgcgttgctaaggaactcctatcagaaccgtagcaacatctgcctgagcatcctgtgggcaattggacaaggtggctatcagtccctaaacgagggcgttcgcgtgtggcagaacctgatgctgcccaacctggagctaaagcagtacaccaagtttgtggtcgagtatatggagcgggctctgagtgcagcagctgtccggaagacagcggatcctctgcagatcaaccagcaggagttctttgccacttacaatgcgctcaatgcaccctataaccacctgcccaaggaatggcagcaaagtctgaagcgtagtgcgcgtttgttgcttgtaaggacgaaaacaattgatagttgtcccattgtttcactgacctttcttcctcctgtgtgtagcaacactatatcaacagtcctgtgaggcatgccaacatattccttacgctcttccgggaaataagcgccggatccaagcagactaatgagatcgaaggctgtattagttgtctgctcagcagcggcagagatgattgcctcagggtgtggcgcatgaactacaagaagcaacagttgcctagtctactgcttctgaaagctataagtacgatctacagctgtgaaaattcatttaattggatttttgtttaaaagtaccacccacacttaacgttaatgtgttatctaatattgaatttctatcttttcctagacgacaattggaccacgtctacccatgagttggctacgtcgactgtgtatcactcttttctgcaagatgtggcgaatctgaacgaagaactgcagggaagcaagagaaacgaaggtcacctagatgatttaaaggaggttttgttggtgagtgcgacttaagtatatcactcgattccaagcataaggctctgatcccagatcgataaaaggtgaatgttgaatgtgtgttgttttatcttttatagttttattggaaaactagtatataggtaatatatttattttgttagcttttttaacccaaacttattattcaaacttaaatgaaatcagaaacactataaatttgaattttctcacacctctggtaacactgtttaagttaagtggtctggcttagtacattacgtactctggtcacattgctttagtgaaaagaaaaacgaaggtataaacttgtagaactgccgtctaaaagtgaataatttattgcaatcggtgctaaaaagaatgatatgagcttattacactgcagctaactaatgtaaaactcttcacgtagaagtggccgaactgttagccgttaatgaagttagagttctttaggaggacgctgccaacgcgacgtcgctgcgggaaagagatggaaagcgttagccggcgttcgtccgaaatttctccgctattcaactggcttttgaagcctggagtgagcataaattaatggtccgcaccttaattatcgcgttgtcgcaattattgttgctgttgcagtagtgcaaagtgcgtttcgtgcatatgtgtgcgtgtcagtattaacggttgtgtattccgccgttctgcactggtattggtggcagctatagctgcacttttcccatagcgttgccatgcgggttccagttgccgctaaatttctccgagcagagcagacgttttgctttcgaaaagagagtgggcatggccatcggggatcataaattgccgcattatcagccaacattcttatcagtacacccaattttcggctgatctgaggcttatttttattttcctattgactgatgtgttccagctgcgattggccactcgcctcctgctccctcacccactcccctctcacatcccgcttgtgcgcactctcctcctctcttcgcct

SEQ ID NO: 12983 - DNA, 1480 bp, DROSOPHILA
ttggcttgttgctttttattctgccggctgcctgcattttctgatttaatttaataccatcgataaaaagactgctcgcaacatgtcggaacaatgggaggtggtctccaagtcgcgcaagcaaaagaatctggacaagaaggtgtctgcacacaacgagcagaagcgcatcgcggcccagttgcccaaactggaggagctgttgccaactcagcggtatcgcaatttgttcggcagcagcaacaacaacaacagcaagtcccattcccctgcgaaatctagttcaagtgcctcatcttcctcaaaagccaataagtcgccagttaaaaagcacaccgcaaagaatgcctctacccaaaaaaggaccacgtcggcagccgcatcgaagccaaagactctggagctggccttgagaaacatcacccgggatgattttgctgcccaactggagcaggtgaagctcagttgtcctggctccgagctgcgctggttaagccatattgcgctatacttcaatgaagccttgtcctatgactgcgatcccatcttctccggccgctcggctcagtatcccagcaatttggccagcgcctcgctcaagtactcaattgtggagtttctgggcagtgtgggcgaacaaaacctggagtatttcttctactccctgctggatagcatgtcaacggatctaaacaacaatcagacagtggcaggctacaagctcatcctacagttgatcggtcaaaactggccgaacatttgttctaggaacctggccaagactgcgttgctaaggaactcctatcagaaccgtagcaacatctgcctgagcatcctgtgggcaattggacaaggtggctatcagtccctaaacgagggcgttcgcgtgtggcagaacctgatgctgcccaacctggagctaaagcagtacaccaagtttgtggtcgagtatatggagcgggctctgagtgcagcagctgtccggaagacagcggatcctctgcagatcaaccagcaggagttctttgccacttacaatgcgctcaatgcaccctataaccacctgcccaaggaatggcagcaaagtctgaagcgtagtgcgcgtttgttgcttcaacactatatcaacagtcctgtgaggcatgccaacatattccttacgctcttccgggaaataagcgccggatccaagcagactaatgagatcgaaggctgtattagttgtctgctcagcagcggcagagatgattgcctcagggtgtggcgcatgaactacaagaagcaacagttgcctagtctactgcttctgaaagctataaacgacaattggaccacgtctacccatgagttggctacgtcgactgtgtatcactcttttctgcaagatgtggcgaatctgaacgaagaactgcagggaagcaagagaaacgaaggtcacctagatgatttaaaggaggttttgttggtgagtgcgacttaa

SEQ ID NO: 12984 - protein, 465 aa, DROSOPHILA
MSEQWEVVSKSRKQKNLDKKVSAHNEQKRIAAQLPKLEELLPTQRYRNLFGSSNNNNSKSHSPAKSSSSASSSSKANKSPVKKHTAKNASTQKRTTSAAASKPKTLELALRNITRDDFAAQLEQVKLSCPGSELRWLSHIALYFNEALSYDCDPIFSGRSAQYPSNLASASLKYSIVEFLGSVGEQNLEYFFYSLLDSMSTDLNNNQTVAGYKLILQLIGQNWPNICSRNLAKTALLRNSYQNRSNICLSILWAIGQGGYQSLNEGVRVWQNLMLPNLELKQYTKFVVEYMERALSAAAVRKTADPLQINQQEFFATYNALNAPYNHLPKEWQQSLKRSARLLLQHYINSPVRHANIFLTLFREISAGSKQTNEIEGCISCLLSSGRDDCLRVWRMNYKKQQLPSLLLLKAINDNWTTSTHELATSTVYHSFLQDVANLNEELQGSKRNEGHLDDLKEVLLVSAT

SEQ ID NO: 12985 - DNA, 3138 bp, DROSOPHILA
gtaaacattggctatttggctgattcacccgcttatcaagcaattatgcttatcttccaggtgtcacgaaggccatgcagaacatgaaccgccagctgaatctcccgcaaatccagaagatcctgcaggacttcgagaaacagtcggaaatgatggacatgaaggaggagatgatcaacgatgccatcgatgacgccatggaggacgagggcgacgaggaggagacggatgctgttgtgtcccaggtgctggacgaactgggtctgcaattgggcgaacagctgggagaccttccttccgcctccggttccctttccatagccggcggcgctggcgctcagaaagcacaggctgtggccgctggtggcgttggcggcggtggagccgccggcggaggtggagctagtggtggcggcgctggtggtccgggagctcccggtggcagtggtgcctcatcgcccatgtccgatgccgatgcggatcttcaggcgcgcctggataagctgcgcaaggattgagccgctactaagaaccactgcctgtccactttatgtaagagccaccacccgtttgtatctcccagaagcgaatgttatattaaagagaatgcttgtgattttcgttccctgcgtgtttgaaaaatcgatgagtaattagcatttacaagctataatggaaagaactgggtagtgctgcaatcgcacagcctagctacaaacaaattcgcaatacttgttactttagagctatacaatattcggtattttaaaagatatgtacgtttcatgcctgtcttcaataaaataagaaaaaggaatttccaaatcatgaaattatatatatatgtatatacatatattcagctttaactataaatgcaaaattgtgtttatctgaataaaaagaagtactttcctaaatttgtactattgggtactatagaaatatgtaaaacacttgaaaaatgaaaatcacatagcacttgtataaataagaaaacttgttttaaatgtcataatatgaacaggggatttaatttattgtttattgctctttaacgttcctacatttaaaatagttctcaatccatttgctttagataacatataattccagaataacttttgcctagctccattttttactcgatattaaaaagtgtgtgtgtacctccgctttccttgattgggtatactaaacttcatgtgtatcttgtatcttatcggggtgaagaaaaagtaccttatgcattactattaacaagcgtatatatgtatttttttagagggtacaaatgaaaggtaaggatagcactacacacataaccggaatatgaacaggaaatctagaagccgctggccacaaatatcttttccacctccccgaacacctcttccgcatccggactggcatcgatccgtttcacctggccggcgccctcgaagaacttgatgatgggcagcgagtcgttgttgtatgtcgagatgcgcttcttcaggctgtccaggttgtcgtccgtccggccagagccgctctggccgcggcccagacaccgtttgacgcacacatcctcgccgcagtcgaagaagaggacaaactggaagtccaccttctcggacatctggcggttccaaccgtccagattatcctgattgcgtgggaagccgtcgatgaggaaccgcgactttcccgacgccttcatggcgttctccagcagcgaacacgtgacctcgacgggcacaattttgccattgcgaatgtagtcctcgatgaggttaccgaattcggagccctcccgcgaccgctcctcgcgcaggagatcgccggccgagagatgggtgaattggaagcgatccacgatcctggagcattgggtgcccttgccggccccgggaccgcccaaaacaaagacaatctttggcttctctacgctcatgattccgatattgtgtggtggggctgtggaggtggtggtgatgaacctattgctggccttggaatgtcgcaattggtgctgcgtcagcgctgatggtgcgagaccgactcctggtgaaccgcaatcgttggctactgctctcaacgtcgttcgtgccaaagcccgccacattgacgactgaaccaaactgaaggcaaattgaatgcgtggtttatgtgtatgccgcctgcagtacacctcaccactgttttccactggaaacgtaacaccctgtgacgtcacgcacaagcgcagctgttcgcgggcgtccgttcggcaacactggcgccggctttagcgggaagcgaaccaatttgaatggcattttatgcagtttacttccggttcgatattaaataaattaaatttaatttaaatattcttctacaacatttttaaatgtacccttaaacatgcagctttgcagagtttgatttttaattttttttattatcatgtatattacctgctaaataagtcttttaaattagctgcgcttggttgttttgtatcaagtcggccactagttggtagggaataatatgctgggagccggccgccatgtccacctcctcatcatcgacgcccacgatcacagcgggcactggaaagcaaaacaagagttaagcggttatcttaattagatgacaaaaggttattacctgccacatttgccttaagaaagacatggctcatcagattgggcgtcacaatcctctgctccgcctctcctctctgctggttgggcatgtactgggtggctactttgtggaagtactcatccacattactggcaaactcctgggcgaacttagtctcctcgggagacagacgtttgtcatccggctcacggctctcctcctggttgaggatgtgctgcgtgaaggtttcgatcttctgcaggcggcaacgcagataactggccattatgtagcgcaccctctccagttccatggagtgcaccaccgctcggaaatcgttcttgtccagatcgcgcatctgctcctccatgtgggccacctgggagaccatcagctccagcatgtccgtctggctgggcaggatctccggcgcacacatttcatttatccacgcggtttctatgatttccagaacctagggatatcagaatgtgattacttgcgtattaaaaagctgtgtta

SEQ ID NO: 12986 - DNA, 1138 bp, DROSOPHILA
tcaatttgccttcagtttggttcagtcgtcaatgtggcgggctttggcacgaacgacgttgagagcagtagccaacgattgcggttcaccaggagtcggtctcgcaccatcagcgctgacgcagcaccaattgcgacattccaaggccagcaataggttcatcaccaccacctccacagccccaccacacaatatcggaatcatgagcgtagagaagccaaagattgtctttgttttgggcggtcccggggccggcaagggcacccaatgctccaggatcgtggatcgcttccaattcacccatctctcggccggcgatctcctgcgcgaggagcggtcgcgggagggctccgaattcggtaacctcatcgaggactacattcgcaatggcaaaattgtgcccgtcgaggtcacgtgttcgctgctggagaacgccatgaaggcgtcgggaaagtcgcggttcctcatcgacggcttcccacgcaatcaggataatctggacggttggaaccgccagatgtccgagaaggtggacttccagtttgtcctcttcttcgactgcggcgaggatgtgtgcgtcaaacggtgtctgggccgcggccagagcggctctggccggacggacgacaacctggacagcctgaagaagcgcatctcgacatacaacaacgactcgctgcccatcatcaagttcttcgagggcgccggccaggtgaaacggatcgatgccagtccggatgcggaagaggtgttcggggaggtggaaaagatatttgtggccagcggcttctagatttcctgttcatattccggttatgtgtgtagtgctatccttacctttcatttgtaccctctaaaaaaatacatatatacgcttgttaatagtaatgcataaggtactttttcttcaccccgataagatacaagatacacatgaagtttagtatacccaatcaaggaaagcggaggtacacacacactttttaatatcgagtaaaaaatggagctaggcaaaagttattctggaattatatgttatctaaagcaaatggattgagaactattttaaatgtaggaacgttaaagagcaataaacaataaattaaatcccctgttcatattatgacatttaaaacaa

SEQ ID NO: 12987 - protein, 253 aa, DROSOPHILA
MWRALARTTLRAVANDCGSPGVGLAPSALTQHQLRHSKASNRFITTTSTAPPHNIGIMSVEKPKIVFVLGGPGAGKGTQCSRIVDRFQFTHLSAGDLLREERSREGSEFGNLIEDYIRNGKIVPVEVTCSLLENAMKASGKSRFLIDGFPRNQDNLDGWNRQMSEKVDFQFVLFFDCGEDVCVKRCLGRGQSGSGRTDDNLDSLKKRISTYNNDSLPIIKFFEGAGQVKRIDASPDAEEVFGEVEKIFVASGF

SEQ ID NO: 12988 - DNA, 4734 bp, DROSOPHILA
aaatgtaatatataataataataataataatatttataaaaatcctatagtgttaaaaagttcaatcagatcaaatacatttagcagcattcgttacaaattacatctctgatagggtcatgtcttcagtggacactttacataattgtttatgtcctcgctaatctcatggtttagtccaggtgtggagattttctattaagtgcatattttatatacttgtagaccagaaattagaaacgcacggctaaatgcttcgttatttcctaaaattatccgtatctttgttttttagttttgcagtaaaattaacagagctccgtgtttcattttccgtcgttcccttgctacacctacgacgatggtatatttacggcaaaaaactgcggtaacactggacaacgtgcacaaaataaaaaaatcgaactacaggaatagcaaatatataaaatccccaaattattttatattcattgacaaaatttccctgtaaatcggatataccggagtcagacattaataatcgcagagtttaaggcaacgaatacagtggtgagcaacagcgaacacagcgcacacacacaagcgcacacacacacttgcacaaaaacagatgaaaatctggaaattgtcttttttttttttgtagttttgtattgctcaggagactgtgatttactgccacaattggctatagaacacacttatcctacgataaacaagcaccgatttctctagccgcagacaagaaaaactcacatttcagttggtgaaaggaaccaactgaggtcgcaatttctgcgacgacatctcatctcgtacaaagaagtcatagttttctgttagttgtgtggatcgtgattaagaattaaggaggtgtccctatatgacgcacgcttctcgacctaagcaaataattaaagacatccgatagccaataacaaaggaaagagcgagagagagcgcacagcaagggacacaaaaatagcagcgcaccaacatgacaatcaagccagtgagcgccccaccgagcgcgaaacgcgtggctggaaatgtggatcccgataacaaggaggcgcaggtggttgtggtggagcagtcggtggtcagccagacccataaccatgcccacaaccaccgtaacgtcgtcatcgatgggcaggtgagtggttcttaagccccttctgggatttgctcattaatatgcaccttcgctccgccccctatttctagagcccccaaaggcgtggcgaggtctacgacgaactggcacgcacccatcgctgcagcccacacaagaggtaagttatagcagtgggccaccaggatttactggggtggggcctcacgccctgcaccaattgattaagtcgcctgatgggtagtcagattacattcctagaacattacctatggtaaatctactatagagtttcttctgggaatttatggccatttattctaaacgactaacgaccaattcaacaaaatacctcgaaagatacttatacaaaggtattgacatttgaagtgtcacatctactatgcaatgattttgttaatacaatagttggcagtcagattttcaaaattcaaaattctggtaaattttgctcagcatttaatatcgtcgtttttccgtcttttccactagcacacgctcgaagcgtcgcgaacaccacgaagcgcatgcacacctttataagcgcgatcgtctggagcgcgagaaactagtccatccgacggcagcggcgggcagtggagcacctggtgtatctggcagcaagtgcaacagtccaccgtcgacctcaacttccggcagtagcagtccgtcggcagtgggccgaaactcacccgaacacttgggactgggctgcaccacggtgcccacagctcaggtccagatgtctacgtctacggcggccgccaatttgctaaaaacagtggaggaaaccttttccggttacaatagcggcgatgagcatcatcagcccaaagagcgattgattccagtggaagagtggcagcgacgtgatctggagttcgccaaatgtatggaacagcgcggctacgaacttaagcctgtcgaggaggatggcgcctgcctgtttcgctctatatcccttcaaatatacggcgacgaggagatgcacgacgtgatccgccaacacactatggattatatagtaatgtttcctcttgatacaccttttaatttgtcctaacaattttggttacttatgcagcacgagaatcgggaatatttcggtcagtttgtcaccgaggacatcaacagctatatacagcgtaaacgggctcgtgatgctcatggcaaccacattgagatccaagctatttccgagatctacagccgtaccgtcgaggtatactgctaccagtcaagtaagtagtcagctaagattgtcatctatatatgtatatattttgtgatatacatactaatataaattcatttattaaatatttccagatcccatcaatatatttaactcggaacagtcgcaggcgggttatcccccgctgcgtttatcctatcagcgcggatcacactacaatgctattctggatccctacaacgccaccgttggcgtgggcctgggcttggctggatacaagcccgagatccaaaccaaagaggctgtgcgtctcagcgagcagttggagatcgaacaggtatgtaatagaaacaacattactaagtaccatccatttaccaaccctttttaattgtagaccatgtttgaagataaactaaagacaacagactgggaggccactaacgaagccattgaggagcaaattgctcgcgagtcttacctacagtggtgtcgcgagaatacgcaacgctcgcgcaacagcaatacagcggcaggatcggccacatcctcgacggttacctctgcagaagcgcttaccgactccgatgcctcgccctcaaaatactctgcgtgtgggggcactggcagcagcggtaatccacctgtggctttgaccagcggtagtggtggtgatggcgccggacccgcattttcgctgtcgcccaaaacacttaaccagtttagtcacaagctaccgcaagaggttaacgagctgggtggctacgatagcgatgcaacagacatgagtagcaccagctcggtgggacacagcggtggcagttcatcgccgagcacagctgcaagccaacgttcgggcaagggatccaagtctcaacgtcgcgctacggccctcagaaagaagcgacgacacgaaactcgcgagacgactttggctagcaagaggttggtgttcgtggcgacttgtggtgcagcttactgaggttttaagttccttcctaccttgcagcgccgaggctttagaggctccgctgaggaagagtccaaagcgcgattcagcgccatcagtggcacgagctgacacgccagaggctgagcagcgtccctccacctcgaagcagtcgtctcattcgccacagaagaacgtggatagcaagtcacctacggagcagagttactctagcttttatcaggagctgctcgaggcatcctacgccaatgaaggtgagttcgaatcaactgagctacaacatatctaaacatttctacccattgatgataggcgctaacgaaagcgagatgctgcagcaagccatccagatgtccacacgcgattacatggaggaccaaaaacgaaagtttctcttcggaccgtagacggtgccgcatggaaacgcatcgttctttgtacagtgatttagtagttattttcgaaaaagcaaaaaaacatgaaacagaacttaccaaaacaaaaacgaaatacgaggagaaactacatgctataatcgatctagaatgttgataagtgagcgtgaagcgaagtttgcgattcgagcaatggtcatcgtagcacacccgcttttgcacatttacattctcacataacactaaccctataaatatcataaacatatatttttaataaggcctcgttgtataatcattagaaccaaaattaaaatgaagcataataggttcatttatatttttttgattcgaatgtgtataaagcacaaactccacccagcgtgttatttttttttaccatgaatgaattttccctccacaccacgttccttttccgataaaataatgcctatttcgtaattcgtcataatgttaagcttagtgaagtacgcacgatatgggacggtaaatcaaaactgctcgtacataaaataaaggatataaaactaacacatgggcatatacagaatacagataataatacggataacgctaattaattatttaattgactacaataaatggtgcatattaatcgtaatttatgagtactcttaataaagcaaataaataaccccaaatatgaagctttgttgctttttatcggaaaatgtatcaaagaataaaatagtcttatttcggttgagatcaaattatataatttactgcttatttacagggatttgtggtttttttttttatcggtgtagcaaaaagttatacgtacattcacaattttcgatttgttcctacaagtatgtgtaaatctaaattgcatttgtttacatagtatatatatataaatatatagttcgctgccagtgaacagtgttcaagtgtatgtacatatggacgacatacataccataccccatacaacattgattctaattgtagaaaaatacatttc

SEQ ID NO: 12989 - DNA, 1950 bp, DROSOPHILA
atgacaatcaagccagtgagcgccccaccgagcgcgaaacgcgtggctggaaatgtggatcccgataacaaggaggcgcaggtggttgtggtggagcagtcggtggtcagccagacccataaccatgcccacaaccaccgtaacgtcgtcatcgatgggcagagcccccaaaggcgtggcgaggtctacgacgaactggcacgcacccatcgctgcagcccacacaagagcacacgctcgaagcgtcgcgaacaccacgaagcgcatgcacacctttataagcgcgatcgtctggagcgcgagaaactagtccatccgacggcagcggcgggcagtggagcacctggtgtatctggcagcaagtgcaacagtccaccgtcgacctcaacttccggcagtagcagtccgtcggcagtgggccgaaactcacccgaacacttgggactgggctgcaccacggtgcccacagctcaggtccagatgtctacgtctacggcggccgccaatttgctaaaaacagtggaggaaaccttttccggttacaatagcggcgatgagcatcatcagcccaaagagcgattgattccagtggaagagtggcagcgacgtgatctggagttcgccaaatgtatggaacagcgcggctacgaacttaagcctgtcgaggaggatggcgcctgcctgtttcgctctatatcccttcaaatatacggcgacgaggagatgcacgaccacgagaatcgggaatatttcggtcagtttgtcaccgaggacatcaacagctatatacagcgtaaacgggctcgtgatgctcatggcaaccacattgagatccaagctatttccgagatctacagccgtaccgtcgaggtatactgctaccagtcaaatcccatcaatatatttaactcggaacagtcgcaggcgggttatcccccgctgcgtttatcctatcagcgcggatcacactacaatgctattctggatccctacaacgccaccgttggcgtgggcctgggcttggctggatacaagcccgagatccaaaccaaagaggctgtgcgtctcagcgagcagttggagatcgaacagaccatgtttgaagataaactaaagacaacagactgggaggccactaacgaagccattgaggagcaaattgctcgcgagtcttacctacagtggtgtcgcgagaatacgcaacgctcgcgcaacagcaatacagcggcaggatcggccacatcctcgacggttacctctgcagaagcgcttaccgactccgatgcctcgccctcaaaatactctgcgtgtgggggcactggcagcagcggtaatccacctgtggctttgaccagcggtagtggtggtgatggcgccggacccgcattttcgctgtcgcccaaaacacttaaccagtttagtcacaagctaccgcaagaggttaacgagctgggtggctacgatagcgatgcaacagacatgagtagcaccagctcggtgggacacagcggtggcagttcatcgccgagcacagctgcaagccaacgttcgggcaagggatccaagtctcaacgtcgcgctacggccctcagaaagaagcgacgacacgaaactcgcgagacgactttggctagcaagagcgccgaggctttagaggctccgctgaggaagagtccaaagcgcgattcagcgccatcagtggcacgagctgacacgccagaggctgagcagcgtccctccacctcgaagcagtcgtctcattcgccacagaagaacgtggatagcaagtcacctacggagcagagttactctagcttttatcaggagctgctcgaggcatcctacgccaatgaaggcgctaacgaaagcgagatgctgcagcaagccatccagatgtccacacgcgattacatggaggaccaaaaacgaaagtttctcttcggaccgtag

SEQ ID NO: 12990 - protein, 649 aa, DROSOPHILA
MTIKPVSAPPSAKRVAGNVDPDNKEAQVVVVEQSVVSQTHNHAHNHRNVVIDGQSPQRRGEVYDELARTHRCSPHKSTRSKRREHHEAHAHLYKRDRLEREKLVHPTAAAGSGAPGVSGSKCNSPPSTSTSGSSSPSAVGRNSPEHLGLGCTTVPTAQVQMSTSTAAANLLKTVEETFSGYNSGDEHHQPKERLIPVEEWQRRDLEFAKCMEQRGYELKPVEEDGACLFRSISLQIYGDEEMHDHENREYFGQFVTEDINSYIQRKRARDAHGNHIEIQAISEIYSRTVEVYCYQSNPINIFNSEQSQAGYPPLRLSYQRGSHYNAILDPYNATVGVGLGLAGYKPEIQTKEAVRLSEQLEIEQTMFEDKLKTTDWEATNEAIEEQIARESYLQWCRENTQRSRNSNTAAGSATSSTVTSAEALTDSDASPSKYSACGGTGSSGNPPVALTSGSGGDGAGPAFSLSPKTLNQFSHKLPQEVNELGGYDSDATDMSSTSSVGHSGGSSSPSTAASQRSGKGSKSQRRATALRKKRRHETRETTLASKSAEALEAPLRKSPKRDSAPSVARADTPEAEQRPSTSKQSSHSPQKNVDSKSPTEQSYSSFYQELLEASYANEGANESEMLQQAIQMSTRDYMEDQKRKFLFGP

SEQ ID NO: 12991 - DNA, 3677 bp, DROSOPHILA
caccattggcgcctgtcaatcgcaaaattatgtaatgatcactttttgcagggctcctcacacaggcgaggccccaactggacgtgttcctgaagtacgccaaggtggaactgacgcccccgacgcccgccgatattccggccattcgccaaggactgggcaacatcatcaagggagccaagaccggcgcctacaagaacctcacggttcgcgaggcctggcttaacaccctggtgaccgccgaggtcatcttctggttctacatcggcgagtgcatcggcaagcgtcacattgtaggctacaatgtctaagcttactatagtctccgcttggcagtcactggaatgggcaacgtaatccctaacagatgtgtatatttatatgtctgcgaacatttcgactctgaataaagtgaaatagtaatttaaaattccgaaaattttcgaaaaatacattgttttttgaaaaccgttagaacgtttgcgcgggatttgtgtaagctaaagatgaggtgatgtaaaaccaagtttggaattaaaagttgacgatatttaatgataaaaattaaaaaaatatatgtaatgttatacatcaaatgtttatgaaacggtgtcgtaatcaaagaggctaatggttcagaaatacataatatacttagagcatttaaaagcactcaagaataattttatttaaaaaaaaaaataaataaatctaaatttgcttttcatagataattcatttacacatttttttaaacaaagtaaagtaagatgtattgaattattttatttataaataacgttttttatttgaatcttgaaaagcattaatattattattattatacttatattttttaacaacaaaacttttgtagacagagtaaatttttgtaatctaactgcggtcacactttactttagttaccttccgatcggaagaagaacccggctgacattaggaataggaacttggcagaactttcccaggatctgtcagaatggcctacaagaagcgcctacaatcgcagaacctcgtgcatctgctgcagaaccgcgagtccggatacaccaacgtgggccaacagccgggcaggatgccgctgttggcctacgagcgtctcttctacaagtgcatcacgccttgcctgacaattgactcgattaccattccgccgatctacctgcgcaagtttacgccggatggcagaaaactgttggccttctcgcaggatcagcgcagtctgctcatatacagctacgggggttctagttgtgcggcggtgggtgaactgattcgccaggcggatgtaggcagtggcgagtgcttcagtagccaggacaccatactcaagagcaggatctttgaacgcctgtttcccacaaaagagacgctgaatctatgccaaggcgactttggcctctactatctgcaccgggagttcagtgtgttcctggaagagggtcgttatgccatgctggctgccatgaccgttgtgcgcggcgcactgccggtcgatgactacgtacggtacccagatctgttcgacaaagtggacgccttctcgtatgtgttctttctggtggatttgaagctaggcgtcgtcacagatagacttatcctgcctaacgactccatcgtcattgcccacaatcatggaatttccgtgtttggctcaacagtgatgatgatgtcccggctgcatcagtgcgtttacgtctattgggtgaatgacggtaagttccaccagcaggagactattggtcccaggccgagggactttatcgagaaggctaccacagactttgacaatcttgacgccaccacagttttgcccataacgcacattaaacagcgcgtccttagctttctgtaccgtaaaattaatgataaaagtggcaacccgacggaaagtcagaagtcgttttataaaaactttgagtatgtaagtaacattataaagagtgacaacggtcttcacatccttacatatctcatttagatagaacacatgatcatggagagaatgcatctggtgaacaatgaacttctaatgttgcgctatgaagagcggccaaatggtaccgataccatgcccatggctacatcaccgcgccgcttgtatgtattctacaccataactggcgaagaagtggttggcgtttatccggaatattccgtcaacctgctgcaaatcttactgcaattcaatgactacatgagcaatgatcgatcgctgcaattcggtgatgcaccttcattgcccatgcattttttcctaaggcatacctttgcggattccaatgaatcggtctccgtcgatcgacatacggccttgcgcttcaaccccagcgttccactcagctcccagagcctttcctcgtcgccctatctaaagttcaacgaatttagatacgacagtcggtacgtgtctcctctggagcaaccccatcgctgctgcaacgatcctattgtgtttcttgaccgtgccacggattcaatcaagtttagactgcacgctacggcccgccggcatttaaatcctttggcgccacgggaattgtgcgcctttatttggcatccctttgacccactagtgctcagtatccagaaatgcatgaacagctacgtctaccacgtgcacttgtataaccacagcacaatagtggaaaagtagactgcctaatatgtacatacatgattttgtacatttgtgtataaaacatattcaagtaccttttatattatgaaatatatgtgatactaaaatatctcgttttaccttttcagtaatgtctttatttacaatggtaagagaacatttctttcttttatttaatcaaagactgtgaaaattgtgaaaattccaagtactgtttaaatctttaattcgactttgctacattgtattgaaggccgacttgaaacttgaggcccaatccgacgtttaaagtttcatgtaacattgtatctcgactgcgactacgttgaagattggtggtgaccgtcctcgttgtattccttgttgaccttaagggaatgattaataacgctcgagccgcctggaggatagttcggggcaggccctgatcccgggccgctggcaggctgctgtgcctgaggctgattggggatcgcatttgggttgttaactggattctgtccgggagccccctgcggtggatagccgcctggatatccggacgggtcgggtggatacattgatggtggcggagcttgttgcgggtgtggcggtggtggtggtggtgggggcatgtacagattgtagggatatgaaggatagcctcccatttgaggatacggaggatacggcatgtacggattgtagagatatgaaggatagcctcccatttcttgatacggaggatagcccggattaggatatgcaggataattgtacttgtgctccgtcttggagtgcttgtgcttcttctctccactgctgctgctgctgctgtcgctgctatcgctgtccgtcctaaccacttcgtactgaagtagcagtaccagaaggactccaatcgccgcacagctcttcatttctccgtttaaacgcacgacgttcgtttgatctaagctcacgggtatgactaaatcttgctcacacaataccttgtcccgttcccgttccgacaattcaaatagccagcgcgtgc

SEQ ID NO: 12992 - DNA, 1620 bp, DROSOPHILA
atggcctacaagaagcgcctacaatcgcagaacctcgtgcatctgctgcagaaccgcgagtccggatacaccaacgtgggccaacagccgggcaggatgccgctgttggcctacgagcgtctcttctacaagtgcatcacgccttgcctgacaattgactcgattaccattccgccgatctacctgcgcaagtttacgccggatggcagaaaactgttggccttctcgcaggatcagcgcagtctgctcatatacagctacgggggttctagttgtgcggcggtgggtgaactgattcgccaggcggatgtaggcagtggcgagtgcttcagtagccaggacaccatactcaagagcaggatctttgaacgcctgtttcccacaaaagagacgctgaatctatgccaaggcgactttggcctctactatctgcaccgggagttcagtgtgttcctggaagagggtcgttatgccatgctggctgccatgaccgttgtgcgcggcgcactgccggtcgatgactacgtacggtacccagatctgttcgacaaagtggacgccttctcgtatgtgttctttctggtggatttgaagctaggcgtcgtcacagatagacttatcctgcctaacgactccatcgtcattgcccacaatcatggaatttccgtgtttggctcaacagtgatgatgatgtcccggctgcatcagtgcgtttacgtctattgggtgaatgacggtaagttccaccagcaggagactattggtcccaggccgagggactttatcgagaaggctaccacagactttgacaatcttgacgccaccacagttttgcccataacgcacattaaacagcgcgtccttagctttctgtaccgtaaaattaatgataaaagtggcaacccgacggaaagtcagaagtcgttttataaaaactttgagtatatagaacacatgatcatggagagaatgcatctggtgaacaatgaacttctaatgttgcgctatgaagagcggccaaatggtaccgataccatgcccatggctacatcaccgcgccgcttgtatgtattctacaccataactggcgaagaagtggttggcgtttatccggaatattccgtcaacctgctgcaaatcttactgcaattcaatgactacatgagcaatgatcgatcgctgcaattcggtgatgcaccttcattgcccatgcattttttcctaaggcatacctttgcggattccaatgaatcggtctccgtcgatcgacatacggccttgcgcttcaaccccagcgttccactcagctcccagagcctttcctcgtcgccctatctaaagttcaacgaatttagatacgacagtcggtacgtgtctcctctggagcaaccccatcgctgctgcaacgatcctattgtgtttcttgaccgtgccacggattcaatcaagtttagactgcacgctacggcccgccggcatttaaatcctttggcgccacgggaattgtgcgcctttatttggcatccctttgacccactagtgctcagtatccagaaatgcatgaacagctacgtctaccacgtgcacttgtataaccacagcacaatagtggaaaagtag

SEQ ID NO: 12993 - protein, 539 aa, DROSOPHILA
MAYKKRLQSQNLVHLLQNRESGYTNVGQQPGRMPLLAYERLFYKCITPCLTIDSITIPPIYLRKFTPDGRKLLAFSQDQRSLLIYSYGGSSCAAVGELIRQADVGSGECFSSQDTILKSRIFERLFPTKETLNLCQGDFGLYYLHREFSVFLEEGRYAMLAAMTVVRGALPVDDYVRYPDLFDKVDAFSYVFFLVDLKLGVVTDRLILPNDSIVIAHNHGISVFGSTVMMMSRLHQCVYVYWVNDGKFHQQETIGPRPRDFIEKATTDFDNLDATTVLPITHIKQRVLSFLYRKINDKSGNPTESQKSFYKNFEYIEHMIMERMHLVNNELLMLRYEERPNGTDTMPMATSPRRLYVFYTITGEEVVGVYPEYSVNLLQILLQFNDYMSNDRSLQFGDAPSLPMHFFLRHTFADSNESVSVDRHTALRFNPSVPLSSQSLSSSPYLKFNEFRYDSRYVSPLEQPHRCCNDPIVFLDRATDSIKFRLHATARRHLNPLAPRELCAFIWHPFDPLVLSIQKCMNSYVYHVHLYNHSTIVEK

SEQ ID NO: 12994 - DNA, 5593 bp, DROSOPHILA
tatgccgccaataaatggtgtttaattgtaatgttgttattcttttttttttgcagactccgtttggagacaatcactcaagggagagaaacagagagagagaagaaaccggcagagattttttacatgcacatacagtgttgcaggtttggacttaatccagccaataaaaggtggttatttatagttaaaaaaatatatccaatgtttaatatattttaaaataagtaactaatttttagagtttatttttaacctcgtctttaatattacaataatcttgatttcttcagaaatcttattatagatgcgcattggtttttatgtttaacatgttctatataaatataattttgggtttattatctgtgacaacataggcttttattttgaaggtttaactttttactattaaaccttttaaaaaagattatatacggccttataatctagctttatccattttcaatacagcatcactgagcttgacagacaaaacgggaaatgggttaagaatcaaggcgtccgaggacgcggacaaagaagttggggaaagagacagggccccagcagccgaaccgcattccatgcgcaggcagcgcagtcgtacagtgggccaatttttaaaaatgcgctgcaaaaatggtttgcaaacatgctctgcttctgaaaataaaccctatttttaatttcccttttattttgtaataaacgaataatactataatacgtagctcaatttacttgtttccgtaatatgcgagcatttgctcaagcatatatcataaataaatttaacttcatcaagtcactttactttctaatttgcagtgagttttgcgaagtcaacccactgtgcacggagggcagcggcagcgcatgcgcagaagaaagagagccatcgcggatcttttcagtccaagtccattcagattcagtcaagtcagtgcgtcgcgagatctttaccgtgcaggttgcgattttagccgagaagtggtcggccgggaaaagatagttattttacttccgtgagagtgtgtttgtgggaataattcggcatcgaaactttcttcaacagctggccatcgtttgtatgtaaatgcaaatcgaccaagaaggctgcaaggcgaagagccagcgagacaagtggagtgtagaaagtgcaaaaccagtttttttgttagcaggaaaacgtggcaaaataaaaaatttacataacaaaaagtgaaacaactaatcgctggtttgattatctcatgtttaacgaatgctaattgatcagtgaaagtgggtaagaaaaacaatgcgaggaagaaatgcccgctaaattccgcaaagcaaatcgcaccttaaaaaaataacaaaaactacgaagccgttatgtctgccacctacaccaatacaattacacagcgccgcaagacggccaaagtgaggcagcaacaacaacaccaatggacaggcagcgatttgagcggcgagtcaaacgaaagacttcactttcgcagccgttcaacaaactcgatgcaacaacacacagcaatcagcaactcaccttcaccactgtgctgtaacggcgctcgtgctttaacaatgctcaattgctgcgtcgacgtcaactgtcatttgaatgcgccgctccgcggcagcgttaaccggcacacgacgccaacgccgaccccgactgcgacgccaacgccggtagcgacgccaaaacaagcctccccctcgcctacctccgatcgttcgcgctccctctcacgctcgccttcgccgtctcggtctcgctcgctctcctgccaaaaacaaatcgacaagaacagcgctggcgcagcatccgcagaagagagaaaaaccgctaatgcgagttcgcagccatttaccgttaacctgagaatcgatctcttcagttggacactctttctcttggccttcggcacgcgtttttacaagctggcaacgccgccgcacatcgtgtgagtagaaaaacaataacaaacctgcaaatggggtcaccgctgaatgaaaaaaatacacacataacaatgtcttagattttttgtttattaatttaatctgcgagagcagagtcttacatttaagttcattgcattacatttaagtcttgcatttatagctcaaatgatttatgcctatgtctttataatattttcaagattcatagtaaaatacttcctacccaacagattcgatgaactccactacggcaagtacatttccatgtacatgcgaaacattttcttcttcgatcaacatccaccgctgggcaaacagctgatcgccggactggtcagcctggctggttacgatggcaattacacctttacccgcattggagagccctattccccggaaatgcccatcttctggttccgatttctaccagccatgtgcggcagtctactggcccccgccgtttacaatcttttgctggaggcgaagctcagtcgctggtcatccgctttgggtggcctgcttgtggtcctggacaactcattgctgacgcaatcccgttttgttctgatggaatcaatgcttctgctggccaccacggtgggcatcgcctgtttgctacgcttccaacgaagtcgcctgggcagcctggaatggttctttactggaacggcagctgccgtctgtttgggagccgccggaaccgtcaagtacgtcggattcttggcactggggctagccttttatttgctgtgtcgacacctgtggcaactgctctacgacgccggtctcaccggtaagatacctttttttctgagatttacaaatacgatttacgatataataatagagattgaataaatcaaaataaaaccatttttttcaagatcgccagctatggatgcatgccataagtcgcctgttaatctttgttggaattccattggcggtctacttgggagtcttctatatccacttcaagacgctgcaccgggctggaccgcatgatagcatcatgactagcgcgtttcaggcctcgttagatggaggattggcatcgatcacaaaaggacagccattggcagtggttcatggatcccaaatcacactacgacacacccacggacgcacctgttggctgcactcgcatgcagctgtctatccggtgcggtatccggacaagagaggctcctcccaccagcagcaggtcacctgctactccttcaaggatgtgaacaactggtggctggttaagcgaccaacaaaggagaacctggtggtgggtgatgagccggatatcattcggcacggtgaaattattcagttggtccatggaattacgagccgagctctgaactcacacgatgtggctgcggcaatgacgccgcagtgccaagaagtcagctgctacatagattacgagatcaaaatggccggtgaactgttgtggcgcgtggagattctgaatcgcgattccgaaggtgacatttggcatgccatcaagtcggaggtccgcctcgttcacgtgtccacagaagcctccttgaagttcagtgggcgccaacttcccgaatggggtttcaatcagcacgaggtggtggcggatcgtgaaaaggcaatacatgaggatgccatttggaatgttgaggagcaccgctatacacagagtaagtcctcttcgagatacttgaagaaatacgttatcctcatttacaaccctttatagctgaggatcatcgggagcgagagcgccagatgctaactgccgagatgatacccacaaagcggacgcgcatctcgttctgggccaagctactggagctacaatccaagatgctgttccaaacgaagtcagtgccaaatcacatgtacagctcgatgccgcacgagtggccgctaatggacaagggcatcgcttattggttggactcacagtcgagtgcgcagatctatttgctgggaaacatactactctggtacacagccaccatgggaatacttgtctatgccggattactcgccttctacgcgatgcggcggcaacgtctttgctttgatatttcggagcaagagtggcagcgattcgtattagctggtgacaccttttttatgggctacgtgatgcactatattccgtatttttgtgtggatcgtacactcttcctgcacaattacttgccagcctttgtgtttaagttacttttattgtgctttgtcgtggagcatttggactatctgctcaggcgcttctgcaccggacgtggtgtccatctggtgcgcctttatcgcctcatgctaatcctgtggctggtgggcgtgcttagcattttctcaaagtttataccattcagttatggtgcgagaaaaatgactttaaatgaggttcgcagtcttcgatggaaggatacctgggactttgtcctgcacaagaaccaccacctgtactgaaaaaacagatgccatctccgcggccagagagagacgtgcaatgatgtactagtaccatgtacaatagactagacgactagctaaagttgaactaatactaagccataaattatttgacatgtaaacatactcatttacaagaccaataaatacaattatttatttatttaagatgttctgctttatcactcagtaatatgtataagcactctgaaaacacttgaacccacactatatacataaatacactcataaacatggccaataagggacactttatagacagaaatgcaaatataccgactgcaggattgtccaccagtggattagatggagcggaaggtgtaaaagtttgtcttagtattagcaatccagaagaattggctgagagtctagttaggcgcaattacgggcagatcaataaaaaatcccagaagttcccagccggttccgttcaacccagcagcagcatccgggatttgctcaccagcgagttgcaaaagtcgcgctttatgtccttcaaggagaagttctacgaggaaatgtacttcaaaaaggccactttgggtggggtcaagaaaacgtactccaaaccggaagacgtgaccaatataagccaaaccttcggaagtccatcgagtcaatcacaaaatgaatgtctctacgacgtcatattgccggccaagtcggcggagcaagttaataaggagtacgaggctttccacgacaagtacatcatcagccacaatcactactttccttcggagcaggttaaccgcaggtcaagctattggtcactacaaatgcaatggtgcatatttaatgaacgtcttaaatattttttagatatgcccaaccatttgatcgaaaatcaccttgtggagatatacatactcacggcgattttggactgaaagtgaagcgatgtctggaggaaggtgagaaccacctgaaggttattggcaaggcgcaagtggactttatggatcgaaacgaggcacccctcggaatgcgaaacaaaaagtaagtatagatagatatagattttgattaatagttttagactgtctgtaggtacacttttgcggtgcccgacataactttcggtgttcctctgcgcagcaatggcgatgtgaagatgctgctaaataatattgaaccctgctacaaa

SEQ ID NO: 12995 - DNA, 3212 bp, DROSOPHILA
gccgggaaaagatagttattttacttccgtgagagtgtgtttgtgggaataattcggcatcgaaactttcttcaacagctggccatcgtttgtatgtaaatgcaaatcgaccaagaaggctgcaaggcgaagagccagcgagacaagtggagtgtagaaagtgcaaaaccagtttttttgttagcaggaaaacgtggcaaaataaaaaatttacataacaaaaagtgaaacaactaatcgctggtttgattatctcatgtttaacgaatgctaattgatcagtgaaagtgggtaagaaaaacaatgcgaggaagaaatgcccgctaaattccgcaaagcaaatcgcaccttaaaaaaataacaaaaactacgaagccgttatgtctgccacctacaccaatacaattacacagcgccgcaagacggccaaagtgaggcagcaacaacaacaccaatggacaggcagcgatttgagcggcgagtcaaacgaaagacttcactttcgcagccgttcaacaaactcgatgcaacaacacacagcaatcagcaactcaccttcaccactgtgctgtaacggcgctcgtgctttaacaatgctcaattgctgcgtcgacgtcaactgtcatttgaatgcgccgctccgcggcagcgttaaccggcacacgacgccaacgccgaccccgactgcgacgccaacgccggtagcgacgccaaaacaagcctccccctcgcctacctccgatcgttcgcgctccctctcacgctcgccttcgccgtctcggtctcgctcgctctcctgccaaaaacaaatcgacaagaacagcgctggcgcagcatccgcagaagagagaaaaaccgctaatgcgagttcgcagccatttaccgttaacctgagaatcgatctcttcagttggacactctttctcttggccttcggcacgcgtttttacaagctggcaacgccgccgcacatcgtattcgatgaactccactacggcaagtacatttccatgtacatgcgaaacattttcttcttcgatcaacatccaccgctgggcaaacagctgatcgccggactggtcagcctggctggttacgatggcaattacacctttacccgcattggagagccctattccccggaaatgcccatcttctggttccgatttctaccagccatgtgcggcagtctactggcccccgccgtttacaatcttttgctggaggcgaagctcagtcgctggtcatccgctttgggtggcctgcttgtggtcctggacaactcattgctgacgcaatcccgttttgttctgatggaatcaatgcttctgctggccaccacggtgggcatcgcctgtttgctacgcttccaacgaagtcgcctgggcagcctggaatggttctttactggaacggcagctgccgtctgtttgggagccgccggaaccgtcaagtacgtcggattcttggcactggggctagccttttatttgctgtgtcgacacctgtggcaactgctctacgacgccggtctcaccgatcgccagctatggatgcatgccataagtcgcctgttaatctttgttggaattccattggcggtctacttgggagtcttctatatccacttcaagacgctgcaccgggctggaccgcatgatagcatcatgactagcgcgtttcaggcctcgttagatggaggattggcatcgatcacaaaaggacagccattggcagtggttcatggatcccaaatcacactacgacacacccacggacgcacctgttggctgcactcgcatgcagctgtctatccggtgcggtatccggacaagagaggctcctcccaccagcagcaggtcacctgctactccttcaaggatgtgaacaactggtggctggttaagcgaccaacaaaggagaacctggtggtgggtgatgagccggatatcattcggcacggtgaaattattcagttggtccatggaattacgagccgagctctgaactcacacgatgtggctgcggcaatgacgccgcagtgccaagaagtcagctgctacatagattacgagatcaaaatggccggtgaactgttgtggcgcgtggagattctgaatcgcgattccgaaggtgacatttggcatgccatcaagtcggaggtccgcctcgttcacgtgtccacagaagcctccttgaagttcagtgggcgccaacttcccgaatggggtttcaatcagcacgaggtggtggcggatcgtgaaaaggcaatacatgaggatgccatttggaatgttgaggagcaccgctatacacagactgaggatcatcgggagcgagagcgccagatgctaactgccgagatgatacccacaaagcggacgcgcatctcgttctgggccaagctactggagctacaatccaagatgctgttccaaacgaagtcagtgccaaatcacatgtacagctcgatgccgcacgagtggccgctaatggacaagggcatcgcttattggttggactcacagtcgagtgcgcagatctatttgctgggaaacatactactctggtacacagccaccatgggaatacttgtctatgccggattactcgccttctacgcgatgcggcggcaacgtctttgctttgatatttcggagcaagagtggcagcgattcgtattagctggtgacaccttttttatgggctacgtgatgcactatattccgtatttttgtgtggatcgtacactcttcctgcacaattacttgccagcctttgtgtttaagttacttttattgtgctttgtcgtggagcatttggactatctgctcaggcgcttctgcaccggacgtggtgtccatctggtgcgcctttatcgcctcatgctaatcctgtggctggtgggcgtgcttagcattttctcaaagtttataccattcagttatggtgcgagaaaaatgactttaaatgaggttcgcagtcttcgatggaaggatacctgggactttgtcctgcacaagaaccaccacctgtactgaaaaaacagatgccatctccgcggccagagagagacgtgcaatgatgtactagtaccatgtacaatagactagacgactagctaaagttgaactaatactaagccataaattatttgacatgtaaacatactcatttacaagaccaataaatacaattatttatttatttaa

SEQ ID NO: 12996 - protein, 886 aa, DROSOPHILA
MSATYTNTITQRRKTAKVRQQQQHQWTGSDLSGESNERLHFRSRSTNSMQQHTAISNSPSPLCCNGARALTMLNCCVDVNCHLNAPLRGSVNRHTTPTPTPTATPTPVATPKQASPSPTSDRSRSLSRSPSPSRSRSLSCQKQIDKNSAGAASAEERKTANASSQPFTVNLRIDLFSWTLFLLAFGTRFYKLATPPHIVFDELHYGKYISMYMRNIFFFDQHPPLGKQLIAGLVSLAGYDGNYTFTRIGEPYSPEMPIFWFRFLPAMCGSLLAPAVYNLLLEAKLSRWSSALGGLLVVLDNSLLTQSRFVLMESMLLLATTVGIACLLRFQRSRLGSLEWFFTGTAAAVCLGAAGTVKYVGFLALGLAFYLLCRHLWQLLYDAGLTDRQLWMHAISRLLIFVGIPLAVYLGVFYIHFKTLHRAGPHDSIMTSAFQASLDGGLASITKGQPLAVVHGSQITLRHTHGRTCWLHSHAAVYPVRYPDKRGSSHQQQVTCYSFKDVNNWWLVKRPTKENLVVGDEPDIIRHGEIIQLVHGITSRALNSHDVAAAMTPQCQEVSCYIDYEIKMAGELLWRVEILNRDSEGDIWHAIKSEVRLVHVSTEASLKFSGRQLPEWGFNQHEVVADREKAIHEDAIWNVEEHRYTQTEDHRERERQMLTAEMIPTKRTRISFWAKLLELQSKMLFQTKSVPNHMYSSMPHEWPLMDKGIAYWLDSQSSAQIYLLGNILLWYTATMGILVYAGLLAFYAMRRQRLCFDISEQEWQRFVLAGDTFFMGYVMHYIPYFCVDRTLFLHNYLPAFVFKLLLLCFVVEHLDYLLRRFCTGRGVHLVRLYRLMLILWLVGVLSIFSKFIPFSYGARKMTLNEVRSLRWKDTWDFVLHKNHHLY

SEQ ID NO: 12997 - DNA, 4300 bp, DROSOPHILA
atgagaaccagagcgaaataaaatgataatgcatgcgagcaacagaaacgagtatgttgtaaaattaacaaaatgaaaccggaaacagaaacataaaaagtcggcgatacctacctacgttcatcttaacataaaaacaaataggaggataagtggaattagtcagtcattgcaattgcaggagcgttgagattatgattaccagctgaacaaaaggagttaaatacaaatacgatgcgagtgcttttagtttgttttatgtgagcggtttttgtaatttagctgaaaagtcagacagcgaatgcaacaacaaatgtaattttaagttgtcagtttccttacctcccaacgtccctccaaacacacaccacacacacacaaacacaacatacgaaaaacacaaaacacatttgcataaaaggtatatatatatatatatatatataattataaatgaatatacttagtaagcattttagttaagagttttacattataaattaaacacggaaaccactttcgaaacactcactcgcattgggggtcagtagttagaagctcagagcagtccgctttgcttgtatgtaatttgagaaaatgtgtaatgagaaaatcgaggaattaattgtgtgaatcaaactcaactcttcagaaccaagtgtaaaatcctatattttgagcagctaaacccaacacagagagagccgcatcaacaaccgaaaccgaaaagtagaacacagctaaattgtttagtgtttagagtatatatatgaaaaacagaaaacgaatcgatttatatatatttacaattatatatataatgcgagcggcgaaattgtaataagcaagagatagagtgcagcacacgcttcgatttttaattttacaaatattattattattgtggttatatatgtatataattatattataaataattgaagcaaaacgaaaaaataaaaaattatatgtaatcgaaagtaaatcccacggcgtgcatctaaaacacatctgtggtgtagacgctgcgctggcgcggcactggagcaccttgctggcgggacattttcgtgtgcaactcgcgcaatccctcgcactggcgtccagaaatctgtcgaaacttgtcgatggcgatgggcagcaggttgtccaccagaaaaatcttgttcttcattacaaagttgggctgaaaatggcattcttgaagagagcggttttatttaagctgctttctaacttacatccacggccatgtcgctgggcggtttcaacgaatgctgggcaatgaacagctccttaagaagcagttccaggctctgcagcagggtttcgcacttggccagacagccgcagtactcggtgagctgcaggaagtgtctgatgaaaaccactgtcgactgggtgagattaatccatgtgtcgcccgtcgcctgggctcgcacatcgatacccaagacatcgagctccaggagcagacgcttcaggttcgacttggtctgcaaattgtacggctgccagctctcctcggtgcgacccacggagtccagcagtcgctccttggattcctctatgagcgactcgagtgtagtgcgcaacagaccttccaaatgataactaatgtccagcccgatctctgtgagctttgtcgagggcttgcgcactcgctccacacatttggccactgactccagggaggttcccttggtcaggtaatgctttatcagttggctggcaaaatattgcagctccgcattgcaccaaaccacgagcgctgcaagaattagatagtagtaatacttaaatgtagacagaaataggaatgaagcttaccgctaacgcacgccggttgcttctcaaaggcggtgagaaaatcacaggccacctgcgtcaggtcacaaaagaagagttccgatatatccgcattattcctgcgcgcctcccgttgcgccacccgcaaactgacggcgcagaccttcagcagagtggcactcgcctgccgatagcgacccatctctacgagaatcttcagaggccgcttggctgctctcagagcgatctgcagattgcgattgtgactgttggacaactccttgagcagcacattgatcagcttcagctcctgctgcttcaccttggtttcaatggcgtccgctagtggcaacttctttcggttctcgtttcgcaagaagtcctgggttcgctttatcagctcctgggcatcctcgaaatgccgttgggccaccagggtctgaatctcttcactggccgtgcttagccactcgggcgtctcatcctccagggatttgggctgtccgggactctggggtgtggtttccttctccggagtcgaagcttttgactgctgtttggcccgagttggaggctgtggcgcctggcccttttttggtttcttttgctggtcaaagcggaaggcctcttcgagcttctctatccactccgtcttcccagcagccgtgatgctttgatagatcttggaaccatctggagtaatgatattaatggcattcttaacgccatccaagtccttaatgttaatcacggctattttcttggggtcgtactcggtgaggaaatccaagcgcctgaaaaatattactattagtttttgctatatgctttagtataggaaaacctacttatcatgcttcactttgcagacaatcagtacatcgttgaagaggaaaaagaagaccctttgaatgggtcgataatcattactgtccaactcgattagagctccctcgttgaggaaggtcttgccttccagattgccattgaagccctggaccatttccttgaccgcccgcgtggcatggctattctccagatcctccgtcgccgtagtgctctccgcctccaaactctctgccttcaggtgactggaagtcttgccatccgtcatggtggccagaatattgcgctgctcaatcagaatgtgcgacagttgatacatttccgactcgagatctgcgatgcgaaaatattaacataaatgtatattgatattggggggcgtaaactacgtgatatctccttggccgtctgtataaactccatatagttctttttgcatgtttgcttgagcgttgctgccgtcgtttcgttgtaggcctcgatttccttttttcgctgctgcaaatcgctgccacccacacattctcgtgtcaggtccttggtatctgggaacgttgtacttattagtagactgattaatgctaaatagacataggaatacttacatttctcaacgctaaaattaaaatcgtcgaactccttcatgattctgattggaatgtaaactgcagctgacgcagagccattcacaacgaacgagcgtcatcatgaggtgtcgattgtaaggttgctgatgctatagaaaatgccatgttttcactgcagttttccctggtattagataaatctataaatctagaacatttttatttagttttaagtaataggagattaattaagatttaaaacctatgaaaagttttattcgaactgaacggctacgtcaaagaccttttagagatcaacaaatttattcgcatttacatttcggattttcatcttaggtatgattaggcgttgaagccctgaatactttttattcgaactgaacttttaaatataaacgactacgtcaaagatctacgttaaaaatcaagaagacatatgtctatatgtatactattcattacaatgtgtgtgtgttgtattgtaataaattaaaattattttccacctgttgctaattcactaagttgaagtgtgaacagttctttcagagtgcaccggcaaagcttcttcttcccactagcactattcgcatgtaagcgccaacacgtcttggccaccttagaatcgcgcacacccttcgcttattgttttggttgatgagtaatctttaggaaactccgtcattcttcgtaattaaatcttgcagttaagatatccttaaacatggactggctattcggcaagaagatcagccccgatgagatgctgcgtaagaatcagcgggcgctcaacaaagcgatgcgagatctggaccgcgagcggatgaaaatggagcagcaggagaagaagattatcgcggatatcaagaagatggccaaggagggtcaaatggatgccgtgaagatcatggccaaggatctggtgcgcacgcggcggtatgccaagaagttcatgctgatgaaggcaaacatccaggcggtgtccctcaaaattcagacgctcaagtcgcagaacacaatggcacaggccatgaaag

SEQ ID NO: 12998 - DNA, 2016 bp, DROSOPHILA
atgaaggagttcgacgattttaattttagcgttgagaaatataccaaggacctgacacgagaatgtgtgggtggcagcgatttgcagcagcgaaaaaaggaaatcgaggcctacaacgaaacgacggcagcaacgctcaagcaaacatgcaaaaagaactatatggagtttatacagacggccaaggagatatcacatctcgagtcggaaatgtatcaactgtcgcacattctgattgagcagcgcaatattctggccaccatgacggatggcaagacttccagtcacctgaaggcagagagtttggaggcggagagcactacggcgacggaggatctggagaatagccatgccacgcgggcggtcaaggaaatggtccagggcttcaatggcaatctggaaggcaagaccttcctcaacgagggagctctaatcgagttggacagtaatgattatcgacccattcaaagggtcttctttttcctcttcaacgatgtactgattgtctgcaaagtgaagcatgataagcgcttggatttcctcaccgagtacgaccccaagaaaatagccgtgattaacattaaggacttggatggcgttaagaatgccattaatatcattactccagatggttccaagatctatcaaagcatcacggctgctgggaagacggagtggatagagaagctcgaagaggccttccgctttgaccagcaaaagaaaccaaaaaagggccaggcgccacagcctccaactcgggccaaacagcagtcaaaagcttcgactccggagaaggaaaccacaccccagagtcccggacagcccaaatccctggaggatgagacgcccgagtggctaagcacggccagtgaagagattcagaccctggtggcccaacggcatttcgaggatgcccaggagctgataaagcgaacccaggacttcttgcgaaacgagaaccgaaagaagttgccactagcggacgccattgaaaccaaggtgaagcagcaggagctgaagctgatcaatgtgctgctcaaggagttgtccaacagtcacaatcgcaatctgcagatcgctctgagagcagccaagcggcctctgaagattctcgtagagatgggtcgctatcggcaggcgagtgccactctgctgaaggtctgcgccgtcagtttgcgggtggcgcaacgggaggcgcgcaggaataatgcggatatatcggaactcttcttttgtgacctgacgcaggtggcctgtgattttctcaccgcctttgagaagcaaccggcgtgcgttagcgcgctcgtggtttggtgcaatgcggagctgcaatattttgccagccaactgataaagcattacctgaccaagggaacctccctggagtcagtggccaaatgtgtggagcgagtgcgcaagccctcgacaaagctcacagagatcgggctggacattagttatcatttggaaggtctgttgcgcactacactcgagtcgctcatagaggaatccaaggagcgactgctggactccgtgggtcgcaccgaggagagctggcagccgtacaatttgcagaccaagtcgaacctgaagcgtctgctcctggagctcgatgtcttgggtatcgatgtgcgagcccaggcgacgggcgacacatggattaatctcacccagtcgacagtggttttcatcagacacttcctgcagctcaccgagtactgcggctgtctggccaagtgcgaaaccctgctgcagagcctggaactgcttcttaaggagctgttcattgcccagcattcgttgaaaccgcccagcgacatggccgtggatcccaactttgtaatgaagaacaagatttttctggtggacaacctgctgcccatcgccatcgacaagtttcgacagatttctggacgccagtgcgagggattgcgcgagttgcacacgaaaatgtcccgccagcaaggtgctccagtgccgcgccagcgcagcgtctacaccacagatgtgttttag

SEQ ID NO: 12999 - protein, 671 aa, DROSOPHILA
MKEFDDFNFSVEKYTKDLTRECVGGSDLQQRKKEIEAYNETTAATLKQTCKKNYMEFIQTAKEISHLESEMYQLSHILIEQRNILATMTDGKTSSHLKAESLEAESTTATEDLENSHATRAVKEMVQGFNGNLEGKTFLNEGALIELDSNDYRPIQRVFFFLFNDVLIVCKVKHDKRLDFLTEYDPKKIAVINIKDLDGVKNAINIITPDGSKIYQSITAAGKTEWIEKLEEAFRFDQQKKPKKGQAPQPPTRAKQQSKASTPEKETTPQSPGQPKSLEDETPEWLSTASEEIQTLVAQRHFEDAQELIKRTQDFLRNENRKKLPLADAIETKVKQQELKLINVLLKELSNSHNRNLQIALRAAKRPLKILVEMGRYRQASATLLKVCAVSLRVAQREARRNNADISELFFCDLTQVACDFLTAFEKQPACVSALVVWCNAELQYFASQLIKHYLTKGTSLESVAKCVERVRKPSTKLTEIGLDISYHLEGLLRTTLESLIEESKERLLDSVGRTEESWQPYNLQTKSNLKRLLLELDVLGIDVRAQATGDTWINLTQSTVVFIRHFLQLTEYCGCLAKCETLLQSLELLLKELFIAQHSLKPPSDMAVDPNFVMKNKIFLVDNLLPIAIDKFRQISGRQCEGLRELHTKMSRQQGAPVPRQRSVYTTDVF

SEQ ID NO: 13000 - DNA, 2537 bp, DROSOPHILA
acctcccctggctgacaaacacgagagaaaaaagtcccaaaacgatatgtgagccctgtccaggggctcgaggggtatgcagattcgacaacactttgcaacacgtgcaacaccacagtgttaagctgttgatcgaggcgtagacaggtctgtgtctttttttgtctccggtcctcgggggcgtcgcttggctaggggtttgactgggtttatggccagaggacctcctacttggacccgggggagttcaactcttcgtcgaggaggtcgcagctgggttgtcaagcacggatcttgtttagatcgatcatcaggcgggggaggtactgcttaatgtgtgtcttttacacaaaaactgtggaattattctaatgaattgctcaacaagggtaattatttttcaaagaagcagaacaatattcttgacaatcttatatctacacagagagggattactttcacttgacattgtctcttcagaattacaattacttgaatgttctgcaaagtttattttactaatctaaaatctaagcaaaatctacaacactcgtcttgatcatccatgatcatgatgatatttttggatttgattcaatattttctccttgtttaagatttgtaacaaataaatcatattagattaatgagatatctgcaagccgaaaatcacaaagccaattagaattttggcctatgatttttgttaatttaagtaaataaatagaccaaagtattaaggtttttgtgtgttttgtattttataactattaaagctgttgtgttgttctcttaaaataaattccttaataaactaataaagcttgaggtgtgcttatgatctaggtaaagctgttatcacattgttaacgattcaattggaagacatgattcgttgcagcagaagttgctggtggaagacaggattcaatgtcgatgctgaagaagattcttcagctggaagactggattcgatgtcgatgatgatggtgatggtgatttaccaagggcgccacatggtttcttcgactggcttggggctggcggcggattgagagtcctcgttatcgctgtggtatcccgaggaggcggggctgagtgggcgtggggtggaggttgtaacagaagtctggacctgatcggcctgcagcatgcgctggaactcgacgcccagatgggtcatcactgtcttgcccacatccacactcatggctggagtgcaggccatcacacgggagatctcgctgacggcgttcatgtagccattcttgaagctatccatgggaagtggggagaccggcgcctgctgcttgacgacctgtttgcgcatgaagacgagtgccgcctccagcatctcggccttgtccattcgcaggatggcatcatcgccctggaactcggccaccaaggtcttcaaggtgtccaaacacttgttcatgcgggcccgacgctggcgctccaaaaggggcttcttcaccttcaaatagtgctgggtcttggagacgaatgtggtgctgttgttgctctgtggtgccattttgtaatgtgttttttgttttggaagatttgtagaaatgtgctgagctgatctgaactgcttgcaggatgctgctcgaatgatgctggattcctcgactgcaccggcttttatacccgcagcagccgcagcagcagcagtgtggagaaggtccttgctggaggacctgctacctgcgaacaccgtaaagatctcgaaatcttattgctatgctgtgcgtgcgtgggaaaggaaaccaaggaaatcgttgtgcaaagactgagttttcaggctgcttttcttggctccctttgtgtgttttattcctttcaattgtctagccaaggagtgtgggtcctggcgacgcattgtaactgcaattaaaccgtaaaatgctggccaagacgtgggaacgtggtgctcagaattgggcccaattgtctgcgacaaactgattcggtttgggccagcaaatgaaaatcaaactcggtaaaattgtaattgtcttgttgtggcttactgatctttggatcgctgaaaggaaagaaggaggatcgtttagatcctttagccagtttcaaaactaaatatgggatgttagaggttgatgtaatcatggatagcaaacacttatacctcaataaggaatcaaataggtggatacaaagtacataaaattttagggattcgtcatctgctcatgcaagtaattataaaatccaattcattacaaacaagcacttagatatatgtcctagtcatggttttttagggtcccttcaccatcatcgctgccccataaatcctgacccaatgctcgcccgatccccatgcacactttactgacaacccttaacgctaaccccaatccccatcccagatccaattcgaatcccgagaaagtggctgtcaccgttgttagggtcttgaggggtctttccgtttgttttgctcgattttcatatcgtgagaaccgctcgagacgcgtcgtgtgtttcccacgcgatgtgcacacctgcca

SEQ ID NO: 13001 - DNA, 537 bp, DROSOPHILA
atggcaccacagagcaacaacagcaccacattcgtctccaagacccagcactatttgaaggtgaagaagccccttttggagcgccagcgtcgggcccgcatgaacaagtgtttggacaccttgaagaccttggtggccgagttccagggcgatgatgccatcctgcgaatggacaaggccgagatgctggaggcggcactcgtcttcatgcgcaaacaggtcgtcaagcagcaggcgccggtctccccacttcccatggatagcttcaagaatggctacatgaacgccgtcagcgagatctcccgtgtgatggcctgcactccagccatgagtgtggatgtgggcaagacagtgatgacccatctgggcgtcgagttccagcgcatgctgcaggccgatcaggtccagacttctgttacaacctccaccccacgcccactcagccccgcctcctcgggataccacagcgataacgaggactctcaatccgccgccagccccaagccagtcgaagaaaccatgtggcgcccttggtaa

SEQ ID NO: 13002 - protein, 178 aa, DROSOPHILA
MAPQSNNSTTFVSKTQHYLKVKKPLLERQRRARMNKCLDTLKTLVAEFQGDDAILRMDKAEMLEAALVFMRKQVVKQQAPVSPLPMDSFKNGYMNAVSEISRVMACTPAMSVDVGKTVMTHLGVEFQRMLQADQVQTSVTTSTPRPLSPASSGYHSDNEDSQSAASPKPVEETMWRPW

SEQ ID NO: 13003 - DNA, 3474 bp, DROSOPHILA
gcgggccacatgcacgggttctatggatcgtttgggcagcggcatggtcgggcgcgattgacaattatctccaaattggcaaacccgtaaattagtgcgtcctcatcgactgaaaacggcattaataagtaataaattgttttaatacgaattaatgcatttaaaattaattaaatataaaaccctttatttactgatttactacataatctcatgccaaattgggatcaataataaaaagatttctttttatgctgattatcaattgaagacatttcattccgataaaattgtacttcccaaattgtcgtttaactttgtttataaattttcccgtaaaagtagacgtttaaaaagttaattggatactatcaaaattggtttaaaagaaattttgtcatcactatactaaaccgtctatgaacaagactcagaatggtattgcagaagatttcacgagacgcttatccatgtatccatgagacgtgttcattacaatcaccaaaatgccatttgaattgttttgtgatatgcgcgactgacgaactcgacgtctggaccacaccccacgaaacgatacccacagcgaggtgataagggcgtaacgcccaagtcacccccgcaagatgcaccttgcagtcccggcgagattagtcgataatgccccccttttcggtggcagtttctgggtgctacgacctggggcctttacgtgggcacctattccatacgtgcatatacgtatatcgtcggcggcctcccaccaacgcaaattagaccgtcacgcactcacacacacgcatgaaccgcagcagcagcagcacccaagtaaatgtacatacatatgtgtgggacggaacggctgactctttcagattttcgcactgaaacattcgcactaaatcgcaacaatgcacacacaaaggtatctctcacactttctaatcgtagtggctgctgcgattttgattttggttttgaacggcgcagcttagttttacacagtccacctcactttacagcatatcgtacactcaccgcccgtcacacttttcgtttggcggctggcaccacaacaaacattaagcagccacttccgtttcgggggttcggtggcaaattcgatccgatgcgaactctaattagccaatttggggcttgaaaactgcaaatatttgctcgttttgtggaaactaagatttccacacctttgcagtgtgaccgaagctttgtggttcgaaaatactgcagggattcatcatttcggaaaatcagacaaatatactgcacgatgcggtggggaaaaagttatttttatattaaatgtaatatgtattttaattactatatttaaataaattttgcaagggaattttcagtaactcatttcatattgtttatttactgtatagaatgaaatattttaaatataaatatatattcaatttattttattttattttaactctatattatccataataagctattttattaacgttatttaaaattactgtttgcagtttcttccattaactttagaaatgtatatttggtatttttggtatttatccgccgatcgataactagtgctccagccctggccccaatgcataacatctctgtttcgtcgcacactgaataggtaagttttccgcacatttcgttgatttcctcttgtataattccaactgcttgcagaaccaaattgaaaagatggcgagtttggctaccaagggatcaggacttgtgaacagtgagtgtcgtgaatcgaatgcaatcgaatggatacaccaccattggcgcctgtcaatcgcaaaattatgtaatgatcactttttgcagggctcctcacacaggcgaggccccaactggacgtgttcctgaagtacgccaaggtggaactgacgcccccgacgcccgccgatattccggccattcgccaaggactgggcaacatcatcaagggagccaagaccggcgcctacaagaacctcacggttcgcgaggcctggcttaacaccctggtgaccgccgaggtcatcttctggttctacatcggcgagtgcatcggcaagcgtcacattgtaggctacaatgtctaagcttactatagtctccgcttggcagtcactggaatgggcaacgtaatccctaacagatgtgtatatttatatgtctgcgaacatttcgactctgaataaagtgaaatagtaatttaaaattccgaaaattttcgaaaaatacattgttttttgaaaaccgttagaacgtttgcgcgggatttgtgtaagctaaagatgaggtgatgtaaaaccaagtttggaattaaaagttgacgatatttaatgataaaaattaaaaaaatatatgtaatgttatacatcaaatgtttatgaaacggtgtcgtaatcaaagaggctaatggttcagaaatacataatatacttagagcatttaaaagcactcaagaataattttatttaaaaaaaaaaataaataaatctaaatttgcttttcatagataattcatttacacatttttttaaacaaagtaaagtaagatgtattgaattattttatttataaataacgttttttatttgaatcttgaaaagcattaatattattattattatacttatattttttaacaacaaaacttttgtagacagagtaaatttttgtaatctaactgcggtcacactttactttagttaccttccgatcggaagaagaacccggctgacattaggaataggaacttggcagaactttcccaggatctgtcagaatggcctacaagaagcgcctacaatcgcagaacctcgtgcatctgctgcagaaccgcgagtccggatacaccaacgtgggccaacagccgggcaggatgccgctgttggcctacgagcgtctcttctacaagtgcatcacgccttgcctgacaattgactcgattaccattccgccgatctacctgcgcaagtttacgccggatggcagaaaactgttggccttctcgcaggatcagcgcagtctgctcatatacagctacgggggttctagttgtgcggcggtgggtgaactgattcgccaggcggatgtaggcagtggcgagtgcttcagtagccaggacaccatactcaagagcaggatctttgaacgcctgtttcccacaaaagagacgctgaatctatgccaaggcgactttggcctctactatctgcaccgggagttcagtgtgttcctggaagagggtcgttatgccatgctggctgccatgaccgttgtgcgcggcgcactgccggtcgatgactacgtacggtacccagatctgttcgacaaagtggacgccttctcgtatgtgttctttctggtggatttgaagctaggcgtcgtcacagatagacttatcctgcctaacgactccatcgtcattgcccacaatcatggaatttccgtgtttggctcaac

SEQ ID NO: 13004 - DNA, 1102 bp, DROSOPHILA
cacagtccacctcactttacagcatatcgtacactcaccgcccgtcacacttttcgtttggcggctggcaccacaacaaacattaagcagccacttccgtttcgggggttcggtggcaaattcgatccgatgcgaactctaattagccaatttggggcttgaaaactgcaaatatttgctcgttttgtggaaactaagatttccacacctttgcagtgtgaccgaagctttgtggttcgaaaatactgcagggattcatcatttcggaaaatcagacaaatatactgcacgatgcgtttcttccattaactttagaaatgtatatttggtatttttggtatttatccgccgatcgataactagtgctccagccctggccccaatgcataacatctctgtttcgtcgcacactgaatagaaccaaattgaaaagatggcgagtttggctaccaagggatcaggacttgtgaacaggctcctcacacaggcgaggccccaactggacgtgttcctgaagtacgccaaggtggaactgacgcccccgacgcccgccgatattccggccattcgccaaggactgggcaacatcatcaagggagccaagaccggcgcctacaagaacctcacggttcgcgaggcctggcttaacaccctggtgaccgccgaggtcatcttctggttctacatcggcgagtgcatcggcaagcgtcacattgtaggctacaatgtctaagcttactatagtctccgcttggcagtcactggaatgggcaacgtaatccctaacagatgtgtatatttatatgtctgcgaacatttcgactctgaataaagtgaaatagtaatttaaaattccgaaaattttcgaaaaatacattgttttttgaaaaccgttagaacgtttgcgcgggatttgtgtaagctaaagatgaggtgatgtaaaaccaagtttggaattaaaagttgacgatatttaatgataaaaattaaaaaaatatatgtaatgttatacatcaaatgtttatgaaacggtgtcgtaatcaaagaggctaatggttcagaaatacataatatacttagagcatttaaaagcactcaagaa

SEQ ID NO: 13005 - protein, 99 aa, DROSOPHILA
MASLATKGSGLVNRLLTQARPQLDVFLKYAKVELTPPTPADIPAIRQGLGNIIKGAKTGAYKNLTVREAWLNTLVTAEVIFWFYIGECIGKRHIVGYNV

SEQ ID NO: 13006 - DNA, 3521 bp, DROSOPHILA
aaattggatttggggcagcctagagaagtggggcagcccacaccccacccccacccctcgaacagacaaatgctgataaacatttttatagttgggctcgagtttgccacaagtcatggctcatccttttcgtcctgaaaggacatttgccttcgccgcccgattccccagctgcacattaaagcccagcgaaggagctggagtggcgaaggtccttgaaggctgcgtcgctctttatgcttatttaaaaaagtggcgtcacatcccagttttgatttgataaagctaaagaaaagcaaagaacagcaagtgataaggagaaggctcacaggaaacatgaggtatccaatactcggataccctttcaagggcttagaatatatagaaataatgttcgatcacatatgtatcttgcatatctctaaggtatgacaaatattaaacaaataatgggactacattttttaataattaaaccaaaaaggtaacggacacataggtagtgtagtcaaatggatggacgtatgtggtggaaaagcaagaaggcacaaagtggagtgagtggtgagccggctgataaaaaatcgtttattcaagtcacatacgcacgaagcttttaataataaaaacaacgagcttctgtaatacgaaaacaaagtaagcaaccaagcgtgcgtgtgaatgtctttatgccacggaaattgtgccgtgaaggaggattcactgcatccaaggactattcaacttattgcccaaaaggaaaatcaatgccttatgctcacatgtgtagcatatactcattccttggataccttaaattacaacatattcttaaacttctggttattttgcacttaagcctactaacttataataatcgttaattcgcatttattggcagtacaagtataacaaatacggtgaatgaaaacataaccgagcaatgattaatgattaagtatataaaaatacgtatacttaaataagtgctccgcgccaattaattttggatcaatgatgtggtttagtgaaataatttaaagaaatctttgactaatagctaaaaatgtacaccatctgattcaatcaggaaaagattatattgaagagcaacttcagttcagcagatgcactgcacctagagtcacagaggaccacatccgcgtagatctgatgctcacgactgtatgtgaggttcttaacggtgatgaatttcggctgaacaacgcgctggaagaggtcctccttgcgctgggcatagcagagctcgccgcacgggcatctgggagcctcccttatcagatctattagcacagcgggaatagagcccgcggacaagggcagcatatacttatccacagctcgagctcccaaaagccacaaaggttgcggcgaattagatgccgccttttgcagatacatttgctgcgcggcatctgcattgaattccttgaagcaattgccccacacatccaacaggtcgatccgtagatcctcgacagcagagggcagggactctagttcgttgctgcacacataaagtttacgcagtgctttcatccggcgaatggcaaagggcagccgactcagcagattgttgttgagattcagcgatacaagcgactcgaatttaaccagcggaggtggaaagtaagtcagcccgttgcccgacagatccagctcgccgagcgactgacagagcttagtgccccgcagccagcaccagtcattctgagtacccagtaagttgttgcccaggtgcagcgaggtgagcggaagacgacccagctccgagggaatctaaaaggcagaattaagcttaactcagtggtctaaaatgataactaattagtcaatccaccttggtcagcttgttaccgctgacatccagctttgtgaggttgcgcagggtgcatatctcgaagctcagcttcactagctggctgttgttgatggtcagcgatttgagggtgcgcggaaatcccttgatgggatactcgctccgcttgctgattaccatgcgcacctggggctgtgccttctgcggaattgccgtagcggcgtttatgttcagtctcaaattgatggcgtccttgccatccatgcccagcttgagggtctgcaggaatcctttcagctggataggatcgcacttaataagcaggttatctggcggctgtatgaaaccaatggtggtcttcccatccagcacaaacttggtgtgcacgacatgaatgttatccttgaccttgtagcgatttccagtcttgttttgtccactaaagagcaccatttccagctccttcttggtgtttccattcgcatccctggcgctttgcttgtagccaatggccagtgtggatttcacgggacgtggcgttttgttcgtctgggtggcgcgattcaccacctgaacttcgcacaaaatcttcatggcgaggcagtgattagacaataaacaaaaaaaaaacccgctaaataaaactaaacatttgttttggcctcaagagttgccacctgatggttgggacagctgatgatatcgagcagccattcgatagttagtggtggaccacataccgatgttttggattttaggaactagtttctaagagcagcatcaaaagctctcgaaaaaaaaacaattggcgcaggacaagttacaaaaccaaaacaagcaacggcaattgtttaaaaactgcaaagttactcccatttaaataccggaaaatgttatttcgcaaggctcgccgacactttctgccgttctacatgttcaatggattcttgtgacagcgcaacgaacgatatcagcgtttgcgttacaatagctcaaatattggtcatccgaggcatgagcttacagtaagtaatgtgtgcaacatatggagcaagacagtggtcatgcaatacaaagaacactcaaattttaaaaactgaaataaaatgcaaaaatgtttctgcagcacaacagcctgttggacaactatgcgaacagcaatgtgataataaacattgacaactgcgcgctctacagcaccaatgtaagaatttaaatctcaaaacccatttcgaatactaacgatcttattttcttttcgctgatctggcaacgccaagcggccagctgatcgaaagtcgataaccgacggctcgcacgatcgacagcgacgtcgccgccagcggtttttagtcatttttcggtttttctgcgcaacggtcgctttcggtttggcaatcgcctgcgtcatctacacgctccacacaatgggctggatttttgctgtgctcgtcgcactggtggctctgctactgacgaaacccggctggcgctggttctacatagcgggtgcgaccgctagtcgcgatctaacgtgagtgctgctcttgtacagggagggcatactgtacccaagaccaagtccagtgataagtttacaataccgcccccgtgcggtttgcatttcaatacacaacaacatcttgggggcttttcttttgtgaatcgattgagaacataa

SEQ ID NO: 13007 - DNA, 1460 bp, DROSOPHILA
tcaggtggcaactcttgaggccaaaacaaatgtttagttttatttagcgggttttttttttgtttattgtctaatcactgcctcgccatgaagattttgtgcgaagttcaggtggtgaatcgcgccacccagacgaacaaaacgccacgtcccgtgaaatccacactggccattggctacaagcaaagcgccagggatgcgaatggaaacaccaagaaggagctggaaatggtgctctttagtggacaaaacaagactggaaatcgctacaaggtcaaggataacattcatgtcgtgcacaccaagtttgtgctggatgggaagaccaccattggtttcatacagccgccagataacctgcttattaagtgcgatcctatccagctgaaaggattcctgcagaccctcaagctgggcatggatggcaaggacgccatcaatttgagactgaacataaacgccgctacggcaattccgcagaaggcacagccccaggtgcgcatggtaatcagcaagcggagcgagtatcccatcaagggatttccgcgcaccctcaaatcgctgaccatcaacaacagccagctagtgaagctgagcttcgagatatgcaccctgcgcaacctcacaaagctggatgtcagcggtaacaagctgaccaagattccctcggagctgggtcgtcttccgctcacctcgctgcacctgggcaacaacttactgggtactcagaatgactggtgctggctgcggggcactaagctctgtcagtcgctcggcgagctggatctgtcgggcaacgggctgacttactttccacctccgctggttaaattcgagtcgcttgtatcgctgaatctcaacaacaatctgctgagtcggctgccctttgccattcgccggatgaaagcactgcgtaaactttatgtgtgcagcaacgaactagagtccctgccctctgctgtcgaggatctacggatcgacctgttggatgtgtggggcaattgcttcaaggaattcaatgcagatgccgcgcagcaaatgtatctgcaaaaggcggcatctaattcgccgcaacctttgtggcttttgggagctcgagctgtggataagtatatgctgcccttgtccgcgggctctattcccgctgtgctaatagatctgataagggaggctcccagatgcccgtgcggcgagctctgctatgcccagcgcaaggaggacctcttccagcgcgttgttcagccgaaattcatcaccgttaagaacctcacatacagtcgtgagcatcagatctacgcggatgtggtcctctgtgactctaggtgcagtgcatctgctgaactgaagttgctcttcaatataatcttttcctgattgaatcagatggtgtacatttttagctattagtcaaagatttctttaaattatttcactaaaccacatcattgatccaaaattaa

SEQ ID NO: 13008 - protein, 428 aa, DROSOPHILA
MKILCEVQVVNRATQTNKTPRPVKSTLAIGYKQSARDANGNTKKELEMVLFSGQNKTGNRYKVKDNIHVVHTKFVLDGKTTIGFIQPPDNLLIKCDPIQLKGFLQTLKLGMDGKDAINLRLNINAATAIPQKAQPQVRMVISKRSEYPIKGFPRTLKSLTINNSQLVKLSFEICTLRNLTKLDVSGNKLTKIPSELGRLPLTSLHLGNNLLGTQNDWCWLRGTKLCQSLGELDLSGNGLTYFPPPLVKFESLVSLNLNNNLLSRLPFAIRRMKALRKLYVCSNELESLPSAVEDLRIDLLDVWGNCFKEFNADAAQQMYLQKAASNSPQPLWLLGARAVDKYMLPLSAGSIPAVLIDLIREAPRCPCGELCYAQRKEDLFQRVVQPKFITVKNLTYSREHQIYADVVLCDSRCSASAELKLLFNIIFS

SEQ ID NO: 13009 - DNA, 8872 bp, DROSOPHILA
acgttatcctcatttacaaccctttatagctgaggatcatcgggagcgagagcgccagatgctaactgccgagatgatacccacaaagcggacgcgcatctcgttctgggccaagctactggagctacaatccaagatgctgttccaaacgaagtcagtgccaaatcacatgtacagctcgatgccgcacgagtggccgctaatggacaagggcatcgcttattggttggactcacagtcgagtgcgcagatctatttgctgggaaacatactactctggtacacagccaccatgggaatacttgtctatgccggattactcgccttctacgcgatgcggcggcaacgtctttgctttgatatttcggagcaagagtggcagcgattcgtattagctggtgacaccttttttatgggctacgtgatgcactatattccgtatttttgtgtggatcgtacactcttcctgcacaattacttgccagcctttgtgtttaagttacttttattgtgctttgtcgtggagcatttggactatctgctcaggcgcttctgcaccggacgtggtgtccatctggtgcgcctttatcgcctcatgctaatcctgtggctggtgggcgtgcttagcattttctcaaagtttataccattcagttatggtgcgagaaaaatgactttaaatgaggttcgcagtcttcgatggaaggatacctgggactttgtcctgcacaagaaccaccacctgtactgaaaaaacagatgccatctccgcggccagagagagacgtgcaatgatgtactagtaccatgtacaatagactagacgactagctaaagttgaactaatactaagccataaattatttgacatgtaaacatactcatttacaagaccaataaatacaattatttatttatttaagatgttctgctttatcactcagtaatatgtataagcactctgaaaacacttgaacccacactatatacataaatacactcataaacatggccaataagggacactttatagacagaaatgcaaatataccgactgcaggattgtccaccagtggattagatggagcggaaggtgtaaaagtttgtcttagtattagcaatccagaagaattggctgagagtctagttaggcgcaattacgggcagatcaataaaaaatcccagaagttcccagccggttccgttcaacccagcagcagcatccgggatttgctcaccagcgagttgcaaaagtcgcgctttatgtccttcaaggagaagttctacgaggaaatgtacttcaaaaaggccactttgggtggggtcaagaaaacgtactccaaaccggaagacgtgaccaatataagccaaaccttcggaagtccatcgagtcaatcacaaaatgaatgtctctacgacgtcatattgccggccaagtcggcggagcaagttaataaggagtacgaggctttccacgacaagtacatcatcagccacaatcactactttccttcggagcaggttaaccgcaggtcaagctattggtcactacaaatgcaatggtgcatatttaatgaacgtcttaaatattttttagatatgcccaaccatttgatcgaaaatcaccttgtggagatatacatactcacggcgattttggactgaaagtgaagcgatgtctggaggaaggtgagaaccacctgaaggttattggcaaggcgcaagtggactttatggatcgaaacgaggcacccctcggaatgcgaaacaaaaagtaagtatagatagatatagattttgattaatagttttagactgtctgtaggtacacttttgcggtgcccgacataactttcggtgttcctctgcgcagcaatggcgatgtgaagatgctgctaaataatattgaaccctgctacaaaaccaaccggctactagatgccatacgctatttgaacaaaaaacgtcatagtttgaggaaccagctggaatttcacaagtacgcactaaattcagtgctggagaggagtgacacggatggaacgggtcacttgccactggcacgcatcttggaaattttcagaagttttcacatccgtctggatgcgcaaaaaatccgtctggccttgtccaattttcggctgattgtggacgagggctgtgccacggagcgggtgaattatgtagatttctttcgacttctctcgattcagaattctctgccgaaaacgggaaacttgaccaatgtatccgatgttagttgtctggacaccacatatcgtttgctctgcgccgatcttcaaaacaagtcaaaggataatacgggagcaattagccagaatctcgaagggaataaaacaactgccaaggatcttataacaccggatttggccattttacgtggccttactcacagtgatttcacctgtttgcggcccaaagcggaaatcgaacgtatctttagaagtctcgtaacaactgataaattcgaagctatttggcagagtctaatgactaagttcaaggaccaaaatgaaatggcatccgtcacgcagtttcgtactgaaatgcacaacaaaatagaggccatatctacataatacttagacaatttaccatgacaaacaaatatataataaacaaaaataaactatagcataagtttgggctgtcatttgtgtgaagcaaatatttgctacagcattaaactttcaaagctggtgtcttacgaccaaatatttaaatttctgtgatcagttaggaaatcaaattaatactagttttctaaatccggaaattactggagaactataaatggggtgacttcaacatcagttgatcacaacagcccttcgccgcttttaagccaagtctaatatcaattgctttgccagctaaccaacataaccaacaataacatcaaagatgaaatacctgttcgtggttgcccttattgccctggccatccaggtggcttcatcttctagtaatacaacaacaactgatgccaccaccacaacaacaaccaccactgcagcatcgaccacaacaacaacaacggccgcttccactcacaaaaagctttgttggaggggcaacaactggtgccacacccgcattcccaagcggaagtgcaagaacccaaagaggtgccacaagaccatcgtgattgtgacccacaggaaaaattaagctgcactagtagtttttgaaataaagaaattctttttaaaagaattttgcctaatattttcattttatctataaaattattttaagtagtatttgtacccttaactcataacgcatagtaaatgggtatgcaatgtgtgtttaaaagtaggtaacacttaaaaagttttcgatcctattgtattgtacacatatgccttatcagaatatatagccgatttagtctatcggtcgccaattttctaaagaaatagtttcatcgcctttaaattgcaaaaaattgcctttacatatattttcggaataaaaacattctacttcattttccactagacacttgtgcaagctaaactctgagtaataggtatctgatagtcgaggaattggacttcagctgtttctcttattttattatgaatttaaagaataataaataaaaagaataataaataatcgttttaaatagaagcaacatcacagaagtttctatttttccaggcaatactcaattcttaaaagtccattaaattatttattatctaaactgaatttgaaacattttaatgcatctgaattaccacttctactcacttcatttttaggttactttaatgtgtaaaacagctgttttactataattggaactttaatagataaataaatattataccaacttaagagacttcctatcttaataaggaaatcattttaaactgactactaaccatatgtgcttacaaggtgcaaacaagaagaaaactattaaaaaattaaagtataaaagattatgattccacattggttaatcacaaaagtttctaccttcatttgagaagcaccataaaattccaggatcatttaagatgaagttcctctacgtgttcctcgttatcgccttggccattcaattggcagcttcagctacgaattcaacacatgcccacaagactaaagttattgtgacccgaaggaaaacagcaaattgagctggacatgtttacaccatcaaaataaacatttcaaaaaaatacattcctccttgttttaaaattttggtctaattttggttggctaatgtgaaatggtatttcacgattttggagcagatgaattttattttagttccttctatttggttcatcataataaaaaaaaacattttctaaaacggctgctgtcaatataaactatattcaatgtttttaacatatgaccaacggtgcgaacaccttaagtttaaaagaagttcgtttgactttaatacttacatgttataacaactataaagtaggaaataatatacgatttttatgagacagctattggattttatacataaagaatattttgtatagcactctacgtactgtagaaacttatttcgcttaagataatacctattgtatttcaagaataaatgtgaaattaagggctatgttaagatattatattataaaaaaatagtattaaactttattaaaatattgaaaatctaatattaatattagcatgctgatatatagaaaatataaatatttaataatattaaaatatatcatattctctaatttttatattctaataatgatattaggacataactatttacatatgtacatcagaaatgttatttactgtagtttaagttttaacttcaggtttaatgggttaaaattgtggcaatttgaacagctgtgttattatccagtaaaccagttgctcatgtttgatgtagtattattgacaagtaatagtactgcttatgttaacaagaaaatcaatttccctaattatgatttccatatgtgtgtttattagcatcaaatgaggaagtcaactgtacaaaaattctcctataaaagattttgatttcgaatcgtttgatcacaacagtttctcgccccaaatttgagcttcagaagttgccaaaaaatttaaggatcagtaaacatgaagttcctctacgtgttcctcgttatcgccttggccatccaattggcggcttcagctaccaattcaacacatgcccacaagactaaagttattgtcacccgcaggaaaaccgcaaattgatctggacatttctatactatcaaaataaacatataaaaaagaatatttcttttattatttacctaaattgaggctccaatttaagtttctgaacctataagtcagaaaaatgcgcagaaacaaaaacagaggcctttttcttcgatgaaattacttggcgatcttcccccccttcccctttaaatagattgtccaggtgtggaatcgcattgataagtacaggagtcgatcgaacgatccttttttcgacttagaacatccaattcttttctggcgagtcctgtcttctctgcttcaaggacatggctttgtgggcttgggccttttcgggccaatttgatcgtcttaacttaatttaacaatatggaagagtgttgttttggagagcaattaccttaactggaaaataatttcagattttctttaaaattgtattaaacctgtcaacacaattatctaactattatttaactattaactatcatttaatttgtaagcaattaagtttaattgaaaatctgaactcttacaaattgcatagccgacatgttgaactatagcacaacacagttcaaaaagtaaagaaattatacttaaatacttattaaagtcctggcaaagaaaaactaatttatttttaatggtaatctagctaaatgtagaaatgtatatctatttttattaagctttttaaatagatacatcaacattacacataatttaccttacttgttaccgagtacacgaaccttcagtttctataagctccgccgaaagtaaaacattttcgaaaatcattgatcgtaattattgagtttctcgaatacctgttacatagctagtttaagtgcgatgaagatacagatatgccaaaaattaagaagaaaatacttttaaaaataattgtatatcataatcagtcaatctaaagcttaaaagctgaccgatttttgatacaagttgcttagccaagaaatggatagctcgtttttatgtagcagctgttttaaaaacaaatatttacagcttttgattgataggtttacactttgtgaggaaatcaatttgatttatatttctgtacaaatgttatcagcatctacggaactgaacagatatctataaaagcataatctcaattcagtaaaccactacactttcttgcaccaccgcgataaggttttgaatccattatcagttcccaatatttccaacataacaagatgaagtaccttttcgtggttgcccttattgccctggccatccaggtggcttcatctgctagtaccacaacaacaactgatgccaccaccacaacaacaaccaccactgcagcatcaacgacaacaacaacaacggcctcttccactcacaaaaagctttgttggaggggcaacaactggtgccacactcgcattcccaagaggaagtgcaagaacccaaagagatgccacaagaccatcgtgattgtgacccacaggaaaaactaaaagtccatttgactattcacttttaacagatataaaaacaatatttttcgtataaaaataaattcttaaaaaagaaaaaaaaattgagtattttctataaacggaggatttactttctggatgccaaaatttacgaaatgaaattggttatctgaaactattcatctgtacagtttacctcagtggcaatctgaagatcttaagtgaagaaaaaatatgtcattaattaagatgatcacaattaaatatattttaaataaatatgcctacttcactatcatatatcctctatgcaaatatggatgctagacctaagcatctttcaaataaaaaaactacaataaagcatataaaacaaatgtaatactttcttttgaatcttagatgctatttataacaaaaagtttcggaattctttagtagttttacatgtcagctaatatcttattggcataagcaaaacacttaaaataagcataaatcaaatataactacaatcaaaattaaaccaggctataattaaccgaaattttccataaccttctaaattaataacaaaattcaacatatgtattatgtaattggtaaaatgtattagggttggcacagctgtctttacatcgcggtagcaatagaaagagggcccatatgaattacaaatatttgacttcaagacaatatatattcatttcatgaattattatttgacaaatgtatttgccagacctaaacaagaaacacagttagtcgaattcgactataaaagactttttattcattccaattgatcacaacaccctttgtctccactttgataaggaagtttcgaaaaatcccaacccaatacaagatgaagtaccttttcgtggttgcccttattgccctggccatccaggtggcttcctctgccagtaccactacaacaactgatgccaccaccacaacaacaaccaccactgcagcatcgaccacaacaacaacaacggccgcttccactcacaaaaagctttgttggaggggcaacaactggtgccacactcgcattcccaagcggaagtgcaagaacccaaagagatgccacaagaccatcgtgattgtgacccacagaaagaactaagggcttaagatcaacaagtttgaagaaaataaaacatttaacagttactagttacgtactacttcaataaccaaagtaactttccgattatagtcacataaacttaatgattttgactatatatcttttaatttggttacttgcgatactcacatacaaagccacccatcttcttggatttaactaccaaaccgagttcaacatatccaaaatgtcaaaggaatcaagctcacctacaaatttaaagacactcatagaaaactgaatacataatatatataaaaaaaaaaatataggaaacataagcagaccgtgtacaatggctaacaaaggacactttatcgagaggaatggggcctttcgtgctgccggattgccctccttcggggacgataagatttctttcaaggattgcgtgatcattgcccatccgtcggaggaaattcgtcatcagttagaattggagtgcagaagaaacaagcctcaacccttcggaaaactatcgccaattctgccggagagcaaaatgggcgaacttcttagcagcgagggtcaaaagtcacgtgtggctgtgttcaaggagaagtttctggaggatatgtactgtaagtttggaaaaaccggacaaatacagccgacgcactcgaaacccgatgatgtcaccaattggagtcatactttcggacgcgccaatcctccagcggaaacgttatatagcactataatgccgaaaaaatcggccgatcaggttaatcgcgaatatgccgagtttcatcgaggtcacatcgttagtaacaaccattactttccatctgagcagatcaatcgcaggtgggtagtatgtttatagtatgtagtatgtagtttatagtatagtatgtttatagtgatatatatatatattatagcgtgatatatgtttggtatagttcgcctgtccgtccgtttatctgtctgtccgtatgtttgtccttatgtttgtccttatgtttgtccgtat

SEQ ID NO: 13010 - DNA, 2102 bp, DROSOPHILA
tcataaacatggccaataagggacactttatagacagaaatgcaaatataccgactgcaggattgtccaccagtggattagatggagcggaaggtgtaaaagtttgtcttagtattagcaatccagaagaattggctgagagtctagttaggcgcaattacgggcagatcaataaaaaatcccagaagttcccagccggttccgttcaacccagcagcagcatccgggatttgctcaccagcgagttgcaaaagtcgcgctttatgtccttcaaggagaagttctacgaggaaatgtacttcaaaaaggccactttgggtggggtcaagaaaacgtactccaaaccggaagacgtgaccaatataagccaaaccttcggaagtccatcgagtcaatcacaaaatgaatgtctctacgacgtcatattgccggccaagtcggcggagcaagttaataaggagtacgaggctttccacgacaagtacatcatcagccacaatcactactttccttcggagcaggttaaccgcagatatgcccaaccatttgatcgaaaatcaccttgtggagatatacatactcacggcgattttggactgaaagtgaagcgatgtctggaggaaggtgagaaccacctgaaggttattggcaaggcgcaagtggactttatggatcgaaacgaggcacccctcggaatgcgaaacaaaaagtacacttttgcggtgcccgacataactttcggtgttcctctgcgcagcaatggcgatgtgaagatgctgctaaataatattgaaccctgctacaaaaccaaccggctactagatgccatacgctatttgaacaaaaaacgtcatagtttgaggaaccagctggaatttcacaagtacgcactaaattcagtgctggagaggagtgacacggatggaacgggtcacttgccactggcacgcatcttggaaattttcagaagttttcacatccgtctggatgcgcaaaaaatccgtctggccttgtccaattttcggctgattgtggacgagggctgtgccacggagcgggtgaattatgtagatttctttcgacttctctcgattcagaattctctgccgaaaacgggaaacttgaccaatgtatccgatgttagttgtctggacaccacatatcgtttgctctgcgccgatcttcaaaacaagtcaaaggataatacgggagcaattagccagaatctcgaagggaataaaacaactgccaaggatcttataacaccggatttggccattttacgtggccttactcacagtgatttcacctgtttgcggcccaaagcggaaatcgaacgtatctttagaagtctcatgaaatacctgttcgtggttgcccttattgccctggccatccaggtggcttcatcttctagtaatacaacaacaactgatgccaccaccacaacaacaaccaccactgcagcatcgaccacaacaacaacaacggccgcttccactcacaaaaagctttgttggaggggcaacaactggtgccacacccgcattcccaagcggaagtgcaagaacccaaagaggtgccacaagaccatcatgaagtaccttttcgtggttgcccttattgccctggccatccaggtggcttcatctgctagtaccacaacaacaactgatgccaccaccacaacaacaaccaccactgcagcatcaacgacaacaacaacaacggcctcttccactcacaaaaagctttgttggaggggcaacaactggtgccacactcgcattcccaagaggaagtgcaagaacccaaagagatgccacaagaccatcatgaagtaccttttcgtggttgcccttattgccctggccatccaggtggcttcctctgccagtaccactacaacaactgatgccaccaccacaacaacaaccaccactgcagcatcgaccacaacaacaacaacggccgcttccactcacaaaaagctttgttggaggggcaacaactggtgccacactcgcattcccaagcggaagtgcaagaacccaaagagatgccacaagaccatcgtgattgtgacccacagaaagaactaa

SEQ ID NO: 13011 - protein, 697 aa, DROSOPHILA
MANKGHFIDRNANIPTAGLSTSGLDGAEGVKVCLSISNPEELAESLVRRNYGQINKKSQKFPAGSVQPSSSIRDLLTSELQKSRFMSFKEKFYEEMYFKKATLGGVKKTYSKPEDVTNISQTFGSPSSQSQNECLYDVILPAKSAEQVNKEYEAFHDKYIISHNHYFPSEQVNRRYAQPFDRKSPCGDIHTHGDFGLKVKRCLEEGENHLKVIGKAQVDFMDRNEAPLGMRNKKYTFAVPDITFGVPLRSNGDVKMLLNNIEPCYKTNRLLDAIRYLNKKRHSLRNQLEFHKYALNSVLERSDTDGTGHLPLARILEIFRSFHIRLDAQKIRLALSNFRLIVDEGCATERVNYVDFFRLLSIQNSLPKTGNLTNVSDVSCLDTTYRLLCADLQNKSKDNTGAISQNLEGNKTTAKDLITPDLAILRGLTHSDFTCLRPKAEIERIFRSLMKYLFVVALIALAIQVASSSSNTTTTDATTTTTTTTAASTTTTTTAASTHKKLCWRGNNWCHTRIPKRKCKNPKRCHKTIMKYLFVVALIALAIQVASSASTTTTTDATTTTTTTTAASTTTTTTASSTHKKLCWRGNNWCHTRIPKRKCKNPKRCHKTIMKYLFVVALIALAIQVASSASTTTTTDATTTTTTTTAASTTTTTTAASTHKKLCWRGNNWCHTRIPKRKCKNPKRCHKTIVIVTHRKN

SEQ ID NO: 13012 - DNA, 2459 bp, DROSOPHILA
aagctttaaataatttataaatgttaatttatgattagttgagaaagaataatcaaaaatacactacccaaataaaataaatgatttaaattgaaaacacaatgtttttcttttgcgggatttcaaaattttataaaatatttattttgttatattaataaatataaacaaactgaacgatattatgcaaacctaacggaatactgttcattcttgtcccagtccgccaatgttgtttactgccccaataaattacctttaattgaacatcacctcaaatgtatgcaacacattttcgactcgaccctgattcattcccataagcagatcatctaattggagcctgttcttaccaccaatctgatcggcaatcaacagatcctctctacctgcccgataactggttggcattgtggtccaaatcaacaggccaaacaacaaccgtcaatatgcactacctgctggcaggtaaattgatcaacaataagaccaaaaaaggttcaggatcgaatcggattagggtccgctcgtttttcaaatgagtcatgccaattaagaaaggacttcgctccccatttattttctgtgttgatttgtaaacggaaaattgttggaacaataagggggaaacaaagaatttagattcctattcaattattttttttttgggtgaaatgtaacacaatttttggtaaagattaccaatttccaaatgtgtgatttaagagaaggcccatttcatacgatttatcaatgattaaaagtaaaaaaaacagtggttgatttcatttaaattgtatatatattttgatttttttgtgtttgttaagtaaaatgtatcacaatttttgtaaagctcttcagttgagttgatcggcttgcgtgttaatttttgtggaatggtttcaaaaattaacggaagacgttgattaaagctggagatccaatggaagacatagttgccggatgatggatgcaggttgcaggacgctgatattttttaggcctgaacccaacgatcctgggggatagcgatggcgttggaggtgctgcagtagaggggctcgacgaggtcgttgtcggctggcaaatcggagacggcggtccagaagaatgtgccgtgagcggtgcggacgaagtgaacgggaacggtgggcagttgctcgaagtcgtagtcctcaatttcgcaggactgggagagacgctcgttggcctcgttctcgcaggactccagagaggcgcagatggaggcggattccagatcggcgttgcggctgttttccatggattccagagactccaaagagttggccttgagggcgttcttgaggttctgctcctcctcgacgcgctgttgctgcttgaagatcttctgcagcagtttcttcacgctgtaggacagcttcttgttcgatttgatggtcatggtgttgttggtgttgatcttgttctggcacatgatgatgtgttttggaattttgtgtttagctgctgtgtagctgagatgtgtactgtacgaagcgttgagctcgaatgatgcctgatcctccgagccagggtccttttatactcgccaggacgtggagaaacccgaagccgagcaggtcacaaaacaccgagtgtgggaaactacaaggatacgtgtcccgaaaaatcctatacacagtgcggatacatggcgaggcaacaacaaaaacggcaggtgtgtttttcgaaaagggactgcatcggcattaacctgcgtgcgtcggagtgtgacggcatgtagtgtcgctccgctcgcacctgttgaaggtgcgggcaattttatcctgctgcaggatcgtgagaaacgagactttctaccagttcccacagtttcggttcgaaaggatcctttttgacaaggagattcgtttttttccctttttctgccgatcacttttggtttttatgtgcacttatctcattatgtaggcagtgcgagcgggacggacaatgatggagccggggggcgggggaaatccgttttccatttctcgaacacgtgtgcagctcgagaacgtgggagaatattttcaattttcaacgctcgaacggaggcgaacaattaatgcccgaaaccagaagataaaatagctcaataggcaaacaatccgtagaatttgatggagtagggggcacacagatcccagacgagggaccaggaatccttaactgcgagcatttaatgcgctgtaatttgaaatttatcaaattgtatgtggaggcgaggcgttgcccgaaggagcgagatggcaaaggagctggaggacaaggatcgtcgacgaaggagttgcttttaatttctgttgctgatggcacacaattagcaggggaccgattcgtattatgatgggtaaaaaatatgtaagagggaaggaggagcaggaccacgagtacatcgttggaggagcacacgcacagcgagcgcctgatct

SEQ ID NO: 13013 - DNA, 459 bp, DROSOPHILA
atgtgccagaacaagatcaacaccaacaacaccatgaccatcaaatcgaacaagaagctgtcctacagcgtgaagaaactgctgcagaagatcttcaagcagcaacagcgcgtcgaggaggagcagaacctcaagaacgccctcaaggccaactctttggagtctctggaatccatggaaaacagccgcaacgccgatctggaatccgcctccatctgcgcctctctggagtcctgcgagaacgaggccaacgagcgtctctcccagtcctgcgaaattgaggactacgacttcgagcaactgcccaccgttcccgttcacttcgtccgcaccgctcacggcacattcttctggaccgccgtctccgatttgccagccgacaacgacctcgtcgagcccctctactgcagcacctccaacgccatcgctatcccccaggatcgttgggttcaggcctaa

SEQ ID NO: 13014 - protein, 152 aa, DROSOPHILA
MCQNKINTNNTMTIKSNKKLSYSVKKLLQKIFKQQQRVEEEQNLKNALKANSLESLESMENSRNADLESASICASLESCENEANERLSQSCEIEDYDFEQLPTVPVHFVRTAHGTFFWTAVSDLPADNDLVEPLYCSTSNAIAIPQDRWVQA

SEQ ID NO: 13015 - DNA, 4639 bp, DROSOPHILA
aattgaaagggaattactttttacagtacttggtttccgtgctgcaaggaattgacttgtttttaaacgttaacttcatttgcatggcttacatttttagccccaaaatcaataagagctggtttcccaactatcggtaagcaaaatcaaacaacttatttcagttttctagaaactttaaaaacctgttagtttatgtaaggaaacctacatatcttgttgttatttacattttcgaattattttcattttttttttatatagttattaatagccaaatttgactcgaacatagctacgcgcctatcgttacaaaaatctccgttagccgacttcaaatgctaccgatagcagctgcgaaagcgatagcgtcggcaatcgaatccgaatttcccactttaaaaactaagaagtttttgtaagccactatggaaactccacccactcccaccacgaccacaccgccatcattgacaactgagggcaccatggacgacatccaatacctgctgcacctggaggcgatgcgccgttttcaggaagacagccgcaatgtaaagcgccaggtggaggagcaagtacgcatttggctggacgccaagtgtgagtatcagcgggactttgggcggctggcgaggctcctgaagtgcggagccctgcaggcggccgtggatgcccatcgtgtatctgatgtgaatcaagtcgaccaggcggccaaggatatcgctagtttgcgatccaaactgggcagtgatctgcgtcccgccattctggactccaacgatgtgaagcagtgcctggaacatctgaacaccacccacaaaccgcgcctaaatctatgccggcaacaacgggagttcgcccagaaccaagaagctctaagaagtttgcgtaccgccgtcgatggattggagaatggtatggagatgggcatgatacaggcaatggaccgccttgtggaggatcttctcccaccgcgggaaacaaacaactagccggtcgtctcaaaagtatatataatattgtatgatataaactagtttataacattaaaaacggaaactgtaaatgaaaactacaagctacaacgaagccaggatcatccgatgaagaatattggtagcggaaatctaaaaacaaaaaaaaacggattcaaagctgtttaaactcagttatttatacggagaagatgaggagattaccatttggagcgcttggaccagtctttgggtgtccagtgcaggcatttcgagtcgatgcggatcttgcgcttgtccattgctcgccggtgttgctcgatgataacccggttgatgcacacgatgtactggcccttgtagtagttgatcaggttcaggttctgcagcgttgagatcacgtcctcttttttgatggatgtgcattcgcagatgtcgctgtgaagaaaaattttgggagcatgattaatctatgtttcggcaatgaagcacaatctctgtggattgaaaattgtattactttaagcttagaactagccatactttatagttatagtgggcttttcgccgtccgtgctcgggttttggctgataaagatctccagtatggtttgcgcccagtacgatcgataggacagcaaacccagatcagacaatggtttctccggcgatcccgtcttgccctcgaacttggacaactcgtagctgaactcaatgagcagcttgccgtagcccttgcgctgatacggaggcattgtgagaatgcaggccacgttgtagtcctctgtgctctccttctccttggagaagtaccctactatgtggaagccgcgcgagtcgaactctgtcattacgtagaagagaaacggatcggtatcatagtagagtgtcttgtggtcgagaaagagtttggcaagcaggcacaagttctgggcatacaccttgtttttgcgtccatcgatttcaaagaaggaaattgtatgtttgcgatagatctcgtttcccggtggatgcctaagattgcacttggacaggtgcctctccaggcacttcctgctcttcctgtacttcaggcagaactcgcagatgtagatgcagggcatttgacacagctcttgcggatagggtgagaaataccagggcttaatgcgatgcctgcccagctcgatcatctccacgttcttcatgcgggtgaccacgtcgtcctggtgcgtaaccatgctgcctgattgcctcggcgtgggcgtcttgccatcctgcgatccatcaccatcatcattggccgctccgcttattaaaccgtcgccggtcacatgcacgggcgtagccgtgggtgtctgcggagttgtaggatgcggatgtgactgctgctgttgactggtcagactgtggtgtccatgggccgagcctccgtggttttttcgcttgcgattgatgcgtttctgaagggctgcggccagattgttgccattcacaagctctcccccactgcttggtgttccgggtggagccacagagtttggaatgccagcagggggaggaacactgcctgatgcaccagtaggagtctgggggatggctgccagagccccggaaccagggtgttgcggtgatgtaggccgagaaacgctgcccgctagggaatggtggcgctgtggcgtggtcactccagtgctggtgcctgtttgtgagccgtctctccgcggaaattgcacctttcgcgtgtacagatcctcctcgttgacccactcgtccaagcgcttgttgactgcggattggcagttatactaaatatgctcccactggacgacttggtactcacagtccacatagtgcacgtaaaactgccggcgcccatccaactccttgatgctcacaatctccgctagtggccagtcgtccgttttgtgcatcctgacgggtaaacgacatccctcggttagggcggcctgcaagtttgcggttaaaaccattagaatgaacacccaaaacacgccaaggcgtagcggaacccaccgttgactcgcatatggaggccacatcgtcgtcgaactcatatttgtggttaattttcatttgtttatattttacgcgttttttttttcctaaaacagcagtattgccagatagcgaaacgtaaataactatcgaccaatcgattaccgccacagtgaatcagcggtttaaaaatgttgatgacatgggcagtgctgcgcagcgtcgcgtcgccttttcaaagtgctgcacaacacaacaacaattccagagagtttttcaattcgggttcggtattttttctcatgtgcctactgtgcaattaaacaatttcgcccgcttacaaacaactgtaacatattaagcacaaccgttcgactcaattgcagttgctagaacttgagtgcgcagttatgtgctcccttcttttcagttgccaaaccaaaaaataaaaacgctgagaaggtcagagaaatgtacacaggcgtaaatttgtgtgcgtgtgtgtgggtgcgtacattcgtgtgcgctcgtgtgagtgcgcagaaagttatacagctgtcatcgactggcgtatttatcaataaatgactactgtgatccgcggaaaacttcagttactgggtaattgtgaccacaactgctgggcaactgtgccgcagtgccccaatgctgacgagctgagcgggaaattggtgaaaaagctgtgtcaaaatgacgtgttttgcgatagtgttgccactgacaacagccgcagggctgccaactcgatgggcatatcccactaattagttgcaaaacgggcaggcaatctcgtgttgattagtaagatgcaagcctagagcaaacgccgatttagcaatctcaacggcttgcccctacaaacaacaaacagcatttgtcaaccctggcacgcagcgtagttagcaacactgctttttagccaaaaaaaaaaaaaaataaaaaaaatgaatatggaaagagaccagtgctttttaaagaaattcgaagtcagtgggccgcaaggggtcgccaaagactaaacagacgcacctgctaccacccaccgccccttgtcgctcgtccgcatgaccagaacaacaacaaatgctgcaaaacacccagtcagtggtccaatgtctcagtttcagttttagtctcaacttcatccccatttcccaatcaattgcagatccgtgcgcacacatttccgtattccggtctgtttgcgagcaatccgcatccccgtgcccaggaacctacgtaaatgccgcgagcaaaggtttgagccggaggagagctactgacgacaggcctgtcaagtgcagcaggagtccaaactgatgcgcaataggtgggctcccctgtgcctcaaaccgtctggaagtcgagaggaatcgttaggaatcggcggaacagcctgcagagcacttgcagtcgcggtggcaaccacacggcggctgggcagctgggctacctagaaacatcgcgaagagaagaaacagtttgtaagcagttaatgggaatgcgagatatacccgtttactaaaacaaacattcccctcttctcacacgccctaacagattcgaggaattcgaatggcatttgtttttctccttcgttgcatgccaccaaacgaaagaagatgaacaatgaacaaacgccg

SEQ ID NO: 13016 - DNA, 2341 bp, DROSOPHILA
gggcactgcggcacagttgcccagcagttgtggtcacaattacccagtaactgaagttttccgcggatcacagtagtcatttattgataaatacgccagtcgatgacagctgtataactttctgcgcactcacacgagcgcacacgaatgtacgcacccacacacacgcacacaaatttacgcctgtgtacatttctctgaccttctcagcgtttttattttttggtttggcaactgaaaagaagggagcacataactgcgcactcaagttctagcaactgcaattgagtcgaacggttgtgcttaatatgttacagttgtttgtaagcgggcgaaattgtttaattgcacagtaggcacatgagaaaaaataccgaacccgaattgaaaaactctctggaattgttgttgtgttgtgcagcactttgaaaaggcgacgcgacgctgcgcagcactgcccatgtcatcaacatttttaaaccgctgattcactgtggcggtaatcgattggtcgatagttatttacgtttcgctatctggcaatactgctgttttaggaaaaaaaaaacgcgtaaaatataaacaaatgaaaattaaccacaaatatgagttcgacgacgatgtggcctccatatgcgagtcaacggccgccctaaccgagggatgtcgtttacccgtcaggatgcacaaaacggacgactggccactagcggagattgtgagcatcaaggagttggatgggcgccggcagttttacgtgcactatgtggacttcaacaagcgcttggacgagtgggtcaacgaggaggatctgtacacgcgaaaggtgcaatttccgcggagagacggctcacaaacaggcaccagcactggagtgaccacgccacagcgccaccattccctagcgggcagcgtttctcggcctacatcaccgcaacaccctggttccggggctctggcagccatcccccagactcctactggtgcatcaggcagtgttcctccccctgctggcattccaaactctgtggctccacccggaacaccaagcagtgggggagagcttgtgaatggcaacaatctggccgcagcccttcagaaacgcatcaatcgcaagcgaaaaaaccacggaggctcggcccatggacaccacagtctgaccagtcaacagcagcagtcacatccgcatcctacaactccgcagacacccacggctacgcccgtgcatgtgaccggcgacggtttaataagcggagcggccaatgatgatggtgatggatcgcaggatggcaagacgcccacgccgaggcaatcaggcagcatggttacgcaccaggacgacgtggtcacccgcatgaagaacgtggagatgatcgagctgggcaggcatcgcattaagccctggtatttctcaccctatccgcaagagctgtgtcaaatgccctgcatctacatctgcgagttctgcctgaagtacaggaagagcaggaagtgcctggagaggcacctgtccaagtgcaatcttaggcatccaccgggaaacgagatctatcgcaaacatacaatttccttctttgaaatcgatggacgcaaaaacaaggtgtatgcccagaacttgtgcctgcttgccaaactctttctcgaccacaagacactctactatgataccgatccgtttctcttctacgtaatgacagagttcgactcgcgcggcttccacatagtagggtacttctccaaggagaaggagagcacagaggactacaacgtggcctgcattctcacaatgcctccgtatcagcgcaagggctacggcaagctgctcattgagttcagctacgagttgtccaagttcgagggcaagacgggatcgccggagaaaccattgtctgatctgggtttgctgtcctatcgatcgtactgggcgcaaaccatactggagatctttatcagccaaaacccgagcacggacggcgaaaagcccactataactataaacgacatctgcgaatgcacatccatcaaaaaagaggacgtgatctcaacgctgcagaacctgaacctgatcaactactacaagggccagtacatcgtgtgcatcaaccgggttatcatcgagcaacaccggcgagcaatggacaagcgcaagatccgcatcgactcgaaatgcctgcactggacacccaaagactggtccaagcgctccaaatgatttccgctaccaatattcttcatcggatgatcctggcttcgttgtagcttgtagttttcatttacagtttccgtttttaatgttataaactagtttatatcatacaatattatatatacttttgagacg

SEQ ID NO: 13017 - protein, 509 aa, DROSOPHILA
MHKTDDWPLAEIVSIKELDGRRQFYVHYVDFNKRLDEWVNEEDLYTRKVQFPRRDGSQTGTSTGVTTPQRHHSLAGSVSRPTSPQHPGSGALAAIPQTPTGASGSVPPPAGIPNSVAPPGTPSSGGELVNGNNLAAALQKRINRKRKNHGGSAHGHHSLTSQQQQSHPHPTTPQTPTATPVHVTGDGLISGAANDDGDGSQDGKTPTPRQSGSMVTHQDDVVTRMKNVEMIELGRHRIKPWYFSPYPQELCQMPCIYICEFCLKYRKSRKCLERHLSKCNLRHPPGNEIYRKHTISFFEIDGRKNKVYAQNLCLLAKLFLDHKTLYYDTDPFLFYVMTEFDSRGFHIVGYFSKEKESTEDYNVACILTMPPYQRKGYGKLLIEFSYELSKFEGKTGSPEKPLSDLGLLSYRSYWAQTILEIFISQNPSTDGEKPTITINDICECTSIKKEDVISTLQNLNLINYYKGQYIVCINRVIIEQHRRAMDKRKIRIDSKCLHWTPKDWSKRSK

SEQ ID NO: 13018 - DNA, 2657 bp, DROSOPHILA
cttgtggttttcgggtttcctgtcccaaaactcttttttatgtccgtttttgcaacgtgtcttgtggttgagttgataattatcggatccaactttcctgaatggggcaagcttatcagttcccctgatagctttttgttattattgcccaatcgtggttacctctagagtatgagccaaatttaatcaatgacttattgtgatatacccacatacaaaatcctccttccactgaagagatccatcttacaggtcccattgacgtcagcgcctaactggggatattaacacaggatattgtctgcaatcaaccttaattcttttacatatagtctgggagcatcgatgtgacagttaccgcaagatgataccagtttggcatctaccactcctttcatctcctttgatcggtttaccaacccgtctgggcagaccgctcatctgtcagggttcattaggttccactcataacactgcttccgttatcctttgctctgatcttcgttcttccgttatgccagtacttcaagagatcgggttcttctttctgatccccaagagtgataaagcagaataggtgctattatcaattttttatgtctgttaagtcatcctcaagatgatggatctatatagtttgaattgcttctcaaggtgataatacaccaaaggaaggtccaacctgttaattgcattaacaacgaatcctactcacagccctattaaccataaaacactaaaatacactggattttattatcaggctgcttcctcgcaagcccaatcaataataaaacatatccttttcatgttcttttcatctgtattgtacaaaatgattgtttatgttttattttacatgcaaattagtatcacatcaacaacgttaatattgcgcagggaaataaataaatgaaattacaataataaggggggtacgacccccatgagaatgagatctattcagtgatgggatgaggtgattgtgggcggagtacaactagcagagcgttccgggcagctgactgaagctctggcaaagcaaggcgtgcagaagatcatcgtccacccgatcctgggtgttggcccagaagaaggtgccattgtccgtgctgatgtattggaggggcaactgcagatcccagagattactgggcaactgtgttgcactgctgctgttcatattgctgctgctgctgctactgttgatgttgctgctgctgtgatgtcgatgctggcagttgcgtccgtgttggcagttgccgcagctctgggcgctgaccttgtccacatgcacgctgctaatcaatgtgggtgtgttgggcggctgggtgagggacacctgctcctcctcgggcaattgcctcagctccagaccgtacttgtggatagactcctctggcgttgacttggtgtcatcttcaatgagcaactcctgctgctgctgctgttgctgctgctgtgtgttgttgagatccacgttgttgggatgggccaaggtcgcctgtgcggtgcgacctttgccacccactttcagtaggcgactcagcggtttccacacgttacgcatgcgccgtgttgactttgagttcgatgctgtggccgctgtcagcgctgaagtgctgctggctgtcaggtttttcgtatccagatacatgttgctgctgtgctttgcggagcttttacttgaatcttgctgtaatgttgtttcgtggacagcgagcgttgcgtgtgcgcacctcgcaagagctggtcgtttactgatgctgctgcgccggcgtcgctcatatttatatatgaggcgaagttgctgcgctgccgatggccagtcaagagtgaaatcgtacgccggctgatctcacgagcggctataacccaagcaccgtacgaaatttgagtgcactctcacacacagaacactgaaccacagccaggccggggtgagaggtgagcccgctggaggaggcgggggaggagttaaggcctttttatgtgcgcgtatttcccaaataaattccaacaggaatccacaagctccagtcttctgtgtgtgtacttttcccatgcacgtacaatcgacaagggccgcttgatgagttttggctgcaggtagatgaaaccacgtttccgcacagtggttcaagcgggcttgaaaaattgttatcaaatatatatggaattgtaatttatagcctgataaaggaatatgcaatttataatatttaatttgcgaaaaaataaaggattaattatatgcatatatatatttatgttaaaaaaaaacattgtagttctttttgcaagttttatatttacatcagatgtaattattttttggaggtaccaaattgtaaatgttagttatccataatcctgttattagcctagaactactgtgcgcatcgcctgttcgtcatttatgcacgactgactttgttttcacattcacacggtacccagagcccggagcccagtagtacatgggttgttgtccggtcttcaggcttcgggatttcgggcgatgcggtgggaggaggaggggttagggctcgccacagagccgtcgtcgaaggggcctcgaatagcacctgttcccttctgcgagcgtgggactaagacgctgcgcatttccgtcctggggaactggcaatggttag

SEQ ID NO: 13019 - DNA, 657 bp, DROSOPHILA
atgtatctggatacgaaaaacctgacagccagcagcacttcagcgctgacagcggccacagcatcgaactcaaagtcaacacggcgcatgcgtaacgtgtggaaaccgctgagtcgcctactgaaagtgggtggcaaaggtcgcaccgcacaggcgaccttggcccatcccaacaacgtggatctcaacaacacacagcagcagcaacagcagcagcagcaggagttgctcattgaagatgacaccaagtcaacgccagaggagtctatccacaagtacggtctggagctgaggcaattgcccgaggaggagcaggtgtccctcacccagccgcccaacacacccacattgattagcagcgtgcatgtggacaaggtcagcgcccagagctgcggcaactgccaacacggacgcaactgccagcatcgacatcacagcagcagcaacatcaacagtagcagcagcagcagcaatatgaacagcagcagtgcaacacagttgcccagtaatctctgggatctgcagttgcccctccaatacatcagcacggacaatggcaccttcttctgggccaacacccaggatcgggtggacgatgatcttctgcacgccttgctttgccagagcttcagtcagctgcccggaacgctctgctag

SEQ ID NO: 13020 - protein, 218 aa, DROSOPHILA
MYLDTKNLTASSTSALTAATASNSKSTRRMRNVWKPLSRLLKVGGKGRTAQATLAHPNNVDLNNTQQQQQQQQQELLIEDDTKSTPEESIHKYGLELRQLPEEEQVSLTQPPNTPTLISSVHVDKVSAQSCGNCQHGRNCQHRHHSSSNINSSSSSSNMNSSSATQLPSNLWDLQLPLQYISTDNGTFFWANTQDRVDDDLLHALLCQSFSQLPGTLC

SEQ ID NO: 13021 - DNA, 5711 bp, DROSOPHILA
acaacagtcagccttgttgtggcgtttttgtctttacattgttttgcgaaagttgtttccggttcccaacccgcttggaaacatcggctaagaacgtgagccacatcgtaaattactttgagaggaagatgatgatgatgtcggttcctgccgagattgtcatctatgagtggcaaaacatccatcgaagtgctgtgcctttcgcatttcgccttttgcccgcttgtcacggcttgtttgtcaaatatgatttaatttactgggtctggcccccctagagtccccaaaacaaatggcccagacaatatgcatttgtgtgtgcccgcctatttagataaatctaattaattaataatattgtgatgggattacttgcgggggctgagaatctaatccaattgtgcgaagcagtgattcttaaagctgaatttctctttcatctatcgtacagtttcctacgaggaggcccaaatcaagtacgtctggaaaaacgatgaggacactctgcggaagagtccttcgctgaccacattgaacgcgtacttaatcaagaatcaaacgacggcctgcgatcagaacagctggagaggtaagtcattgggatcgcaattgccagtaatcgaatgccaatcacttcatttgcttatactttgtattagccaaagaaattacaaccgggaaatgttttgctctttagtaatcgtagtgtttttgatggtaaactggtatttactttgtacaacatacaaaaacggcaaattccatacaattattttaggttttttcgtgcaaaacggaccttctcagtttagtactccattctttggcttggctttaaaataataattatttttcttatttacttacgtagtctcagatcttggctagacttgcttttgcagcttatacattttagcaaagaatctacaaaaatattgtaaatccaatgcctatctaatggtctactctttgtctaccttcccacacctactcttttataaaaaaaaaaaaaacgctacaaatcaaccaacaaaaacaaaaacccgaaatgcaaaaaataatgcccctagggaactacagctgtcttagggtcgatttaatctttaccagagatcgtgcattctatttcaccaccgtttttatacccggcattatattggtgacgtcgtcctttataactttctggctagaatggaatgccgtgccagctagatcgatgataggtaacaataccaaaaaaaaaaccaatcaatcaatttaaacaaaatgaaaaaccataccaaaaaccataaccaatttttgccctcgctctctatatctctcacaccaaacaaaaccaaatactcttaataaaaatacgtacttttaagaaattaaccgaaccaaaaatcaattttgtacgccattgagaattgattttctttccgcctttcgtagcatttgcctttttcgattgcccttctgtaatgtaatttgtacattttatgatttctaattgtcacttttccatttcatttcaatgcggccaacgtagtagtaataaacatatatatttgaaatacagtgcccactcaaagtatgcccacaccaaaaggattctagattttaaggtttgctgcatgggttctgttccttgaatgagagccatcccacccaaaaaatctggaaagcattacctaaattaccgaaccacaagtttagttcacttttaacattacatatttgtttccttctgaaagtacgagtatagtttagccaaagtaagccaacacaaaaaaaaaatcgggaaaagtacaggctagtgtaaggtccttagcggagtatagttcctacaattaggcctctctatctatatatctctctatctctctctctctgtttgtctctgtgtgtgtgcgtgtgttaacccttggccgaatttgcataatgcataattccggccttgtttcttaaggtaattacagttgcctacaggtcgagttgacatttacccgtgatcgtgcgtattattttacaaccgttttcatacctggcattatattggtcacctcgtcgtttatcacattttggctggaatggaatgcagtcccagcccgggttatgatcggtacgtaaaaaaaatgactaaaatcaaattgaaaactttcgaaagaagttccaagttctcaataaagcaaacagaaaacccaacaaaaatcgaagtcttccaaaccaatgaaaaaacagtccaaatcacattttagtccttaacgaaacgtagcagtccagtaagttttagtccaaatttaaacgcaaccacgagacaattggccaaatctcaatgataatttagaagtttgttagcttagaacagcttaggaacatttaactcattaaaagttcaagtttagctagccgctcgatttaaatggattcctttttttacatttcgatccattacttggactgattttaccaatgttaattttctcattttgtattttctacttcctgcactcgtatttggtaaacgcccaactcctttgagtccttgtgcattgcatgacttcttaacttaaactaggcaatttttggcttttttactttgagaagctttggtaaatccatatacgaaaatcaactgaagcatacataaatcatgcttaaacttaaaatgactactccaattcatgttcaattagattgcaacacacatacatttgaatagaaaatgttccactactccgaataacaaacaaaataatggtattaataaccaaaaataaaataaattaaaaatataaaaaattatgatattataaacagtaaaacttatttgtaataacaaaacggaagataaggtaataaaaaaatgtattatcgtggttttaagagcaggaaataatatattccatatgtagtatattgttctcaaccgttcacaaagtgaggcaaggataatgcgattactatgtcctagtcctggcgaaatgtgggcaagggaaaccgaaatgaaaataatgagagcggcaaagggaatgtcagccgaaacatcaagatcctacgtcgttggcagctgcatcgggacaggagacacagaaacacggacacggccgtatcctggcattttacacggcttgtggcacactccacatccctgggatcatgatgatgatgacgtggagcggtggtcacatcatacacgatgatttatgcataagccatatggtcagcatggactaggcaaatagaacagaaagcgctctgtgcgtgtaatgcaaaaactacaaagttacggcaaggatggaaaacttgcaggcggcgttagaaaagcttagttcttgacttgactttaaaatatagtaaaatatatatactaaagccatgaaaatttgttcaacatcattgaatactatcagttttaaagtacaaacctatattgaaaatgacattcgcgcttttaaagataaaaccatttgaatttaatatcttaacttctttgattctaaaaatattcatgtgtgtgaatagtccaaagtttataaccagaaaattgcattcaatttcaatttaagtcgtctttaaattgctgcaatgagttttgaacaattttccagtaataatgctcttgaatcgttcgatgacaaaacgacgacatggcactcaaatagcattgtggaaatcgaagacggggaaggataattccatttctggccgtcattgtctgcgcaagccaaacacaatcaaacgacatttcaatgacaaaaggaaactaaataaataaatagtcaaaaaacggcgaaatggctccaaggcaagcgatgccgttttgttagtcaaagtgctgacatagcatgcattttacagcagctccttcttagcatggcagcatcctttttgcctcatttgtgacccgctcgcagctcgagcttttcctcgaagcatttgcagttgagtgcagcgttgagattttcctccgatatttttcttttttgattttttggtaagagtagggcggatagcagaacgctggcaaattgaaaatcaatgtggttcgtggatgcagcgatgcgaatgcagcaagagctccttgccacatgccaaactagttggagaattgttgacgcaactaattaggcaaccaagatggataatgttgcatatcgagctgtttttttatgtcgcgcgttcatgagctgaataattaatattaaatgctccagcattacctctgattaattttatttgcgctaaaatggagaaaattccaatggagtaagttgattaatgaagcaaggaacttagtgatttgcagcacaatgctgtgttaatggatttacataatttaacacatgactttgatttataacatttaatgcgtaatcaaatattatttattgctcattagcctttaggtttatcacaacgaaataattattatgaattaacttattaactttattaatcagaaccatcaattataaagtgcaaaaatgtgaattaattgattaccattacgcaagttattgcatacaattattgtaactatttgattagttctgttcgtatattttaaaaatataaatatattttgaaacaaaatataaaacataataatataaataattaaacataacaaatacataaatgctttctagataaaagcgtttattgaaccaatagacgaacttaaaataataaatcacatggaacaatactctgaaaaattaacattgataaaactacagaaacctattactgcattacattttcgcatatattagaactactgctccttatcaaataagtagaatttaataattttctttagcttctgcacagtttataaatcacaaattaaaagcaaactgataaaccgaacaccatgtgatatgataactacctttttactctccgtaaaccggacttaaaactaaaaactaaaaacttttgtacatattccaaaaccaatgaaacaactcaattaattgccacataaaatatattctacatacgtacatcccttcgtccttgacacccgtttgtccccagccccaaagtatgcaatgcttttctaattacgtgtcaaacggctaatacaactttctctacaattaccatccacaatcggcaactttaaacgactcgaaacaacttggaacaacttttgacaaccggaatgaaggcgtgacaacaatgctgaatttcttcactacctcgaacggtttccggagcactctgccggttgtttctaatctgacggcgatgaacgtgtgggacggcgtgtgtatgtgcttcatctacgcctccttgctggaattcgtctgcgtcaattatgtggggcgaaagcgacccctgcacaacgtcgtctatcggcccggcgagaatcccgtaacacaggtaaattaaataatcatttaatccgattcacaccaggcagccccgacccaagaaaaaagctaatttcgtatgcattttgaaagcaattaaatatgaattttacatgagcgtgcaaagccaacaaaaaaaatacgtatctacatatatagtattatatgtataaataaaaccaagcaaatgatataaaaaagaaaacacacagcgaacacaactatcaacattcgtactatataagttattcaagttatttgttcttccttggttaagaagccagcaacacctgagcccaagtcatgaaaacaaacagaaaaaaaaaaaatatatatatatat

SEQ ID NO: 13022 - DNA, 604 bp, DROSOPHILA
aaaaaaaaaaaaacgctacaaatcaaccaacaaaaacaaaaacccgaaatgcaaaaaataatgcccctagggaactacagctgtcttagggtcgatttaatctttaccagagatcgtgcattctatttcaccaccgtttttatacccggcattatattggtgacgtcgtcctttataactttctggctagaatggaatgccgtgccagctagatcgatgataggtaattacagttgcctacaggtcgagttgacatttacccgtgatcgtgcgtattattttacaaccgttttcatacctggcattatattggtcacctcgtcgtttatcacattttggctggaatggaatgcagtcccagcccgggttatgatcggcgtgacaacaatgctgaatttcttcactacctcgaacggtttccggagcactctgccggttgtttctaatctgacggcgatgaacgtgtgggacggcgtgtgtatgtgcttcatctacgcctccttgctggaattcgtctgcgtcaattatgtggggcgaaagcgacccctgcacaacgtcgtctatcggcccggcgagaatcccgtaacacaggtaaattaaataa

SEQ ID NO: 13023 - protein, 183 aa, DROSOPHILA
MQKIMPLGNYSCLRVDLIFTRDRAFYFTTVFIPGIILVTSSFITFWLEWNAVPARSMIGNYSCLQVELTFTRDRAYYFTTVFIPGIILVTSSFITFWLEWNAVPARVMIGVTTMLNFFTTSNGFRSTLPVVSNLTAMNVWDGVCMCFIYASLLEFVCVNYVGRKRPLHNVVYRPGENPVTQVN

SEQ ID NO: 13024 - DNA, 3688 bp, DROSOPHILA
tgtttgcagagcccacagcaaccaatatgttttcattgtctgcccggtttgtcgctcaatttatttgtgatgttgactttccaacagtgacgtcagtggaggccacagacaataccacatcatcgcaacaattataaatggtgtggtggcgaaaaaacgtccttgtgcccattgttcagtggggcgaactgaaaagtggattttccagcgcgtgccaggaaaatgaatgaaaatgcgggacattcttgaagtcgttgcctttattctgctttcacacataattatgaaataaatattagcttaaaccaaattgactacaacgttatgctctattaactcttatggtctacttatgcttaatgggttttggtttaagatgcttgggcatgtttatccaccattacgagtggctatatacacggatgagttggaatttaaatggccttaatagctagttaggactggaaagaaatgcattttaaatttctgataaatggccgcgattcacatacaagtaaaatcagtctgtttaagagaatataactaaaccgagctactaatggattgaaacctaggttctgagtggtggacaaaaaatcttaatagttttcgaaacacttatttcattaggataccatatacttaaattaatttctccagtttaaagttgattgcaaaaatgcctaattaaatgtttcaggtaagttttttggaaatataaaacctttgtaccaatatcaaattataatgggttctttagttaaaatttaataaaaatcaaaatcttgaatagattcaattacccattttgacactttagatttttaattttagagttaattaaatgccgtataaatgttatcttaactatagattgcgaagtagaaataggtttgaaattcgtagcgtagacttggcgtacttacgactagaaacatacatttggctttacccatgcctggtataactatcgaacttattgtctaagcctctggtgccttcacaggatgtccgtgttcccctttagagaaactccgcgtcgctaaaggacgtgggaccatgaatcgagaacgcggatcttttccggctggtgtgggccagctatcatacctccgacatggctggcacggtaaccaccttggtgggacgttcgcagattaccacacgggcgttcgtcttgttggtggaccttcgggaaaccgtcaacgaagtggtcagtgtcctcatcgaatcgcaactgttgtgaagccgacgaccaaccgtgtggcagcggttttgctgcgagttgttgcggtatgacttgcagcagcatgtgaaccacttaaaaggcggaaagcgactggaaatataataaaaataaaaatatcaaagtaagtaaattaaagcataagaaaatgtgtaagattttttaacatgaaatcttaacataccttaatgtgcgaaagacctgcgatgagaagaggcaatagattagtggattcgccgccgagttcagcggtgccagactttggatgaaggtggcgatggcaatgttggtctgtgagtgtggaatctggccaaagacctgcagcagatcgaagatgatatacggcgaccagcagatgatgaacacaaacacgatggtcaatgtcatcttgaccgttttgacctttgcccgtggaataatgcccctcgagctggccctcctggcaggtgcagctccaaaaccagcacgttctgttaaaatataattaacaaataaaataaaattatttttgggaactccgatttggcaatatgcatagccagaagatatcttacccgtgggtacaaaaatggaaccctttgcccaaatcgtctttacgatgatcgcatagcaggcagatatgatcagcgcaggaatggcaaatagagtggccgacaccaggctcatgtacacctgccaggcgatcggtgaacccaactcaatccagcattgcggatgtccttggatgagcttctcctcgtacaaaaccaggatgggaagcgaaaacaacgccgagatgagccatgcgccagccaccaggtgacgggctcttttccctaaaagcataaaatttaaatatatatttaagtgaaatatatttctaatttaacttaaatttgtatattttttttggttaattcccgaactaaattatccaagcagtgtaagcagaagccacaaacagcgctcatctttggctaacaacatttggcaattagaaaacttttcatacgacgacttaacttacacgactttgagaagttcatggggtgtgtgatggcatcgtatctgtcgatgctcatggccaccagcacgtaggtggacgagtatgtgacgcagacctgcgagaagcggatggccttgcaggccaggttgcctgcccgccacgaaatcgtgatgcgccatatgatgtcggtgaggacgttgagcagtcccacgcacagatctggaaataatggactgggcattagaagcaagggaagaggtcagtcccaatcccaaaactcacctgccaatgccagctgtttaatgaagtagttcatccgcgacttgcgattcttgttgatgaacatcacgaacagaacagctgaattgcccagaacgatgacggtgaacaggatccagagcacagcaaactgttcggtctggaagagtgcaaagaacaaagtgtggtcacatttcattaaacgcctatcaagttcattgtcaacaaagtgttaagcacggaaatcacgcataaaactcaatttaatgccatccaagcacacacacacacacacgccttgtttatggctctttaaatagccataaaaatgatagagctatgaattcaagctggttggtgcggcgggcaggatgtgccggcggaagtttgcttcttccagttcagtactaacaagactaggacaacacgacatcctgcactcaaacacccgtggacgctcacccacacacccagacgtgatggaagacagacagccaccgttattccagcaggaaattgctgccaagatgaaggacctgcacttcgaaaaatatttctttcgacttttaaggcagtttcacagctcaaaatgcgtggcttggtatttaatttatagaacttatactccaggcattcgaaattcaattcatagcactcaaatctaaaattgtaacaattcttatatagaaaactagtagataaagaataatgaacccttattacttttacttttttaactgaactgttattattttaaaaatattttaaacagtgtgaagtgcagatatgacagtgagtagttctgctagttctagcttattgccgaagaaaatgaaatattctttatacgcccgcatgcagtttatatagcagaatatcgcatatatgctaatatgactaatgatctcttcatggtatctacaaagttttttgctgcaaattaaatttgctctcaaggcatctccccctatgcccacgtctattgaagttaagtttgaattatggcctcggggtcttgcagtctgacgccaacaccgatgttgatgcggacttacttaagggcaggccaagtaaacttgtcccgaaaaaaaagctgaaatcctgacaggcttcgtccttggaactgcgctcagactgaagacgccccaccttattctacaactttttgtccataccaaacttgcagtattcactttttg

SEQ ID NO: 13025 - DNA, 1191 bp, DROSOPHILA
atgaaatgtgaccacactttgttctttgcactcttccagaccgaacagtttgctgtgctctggatcctgttcaccgtcatcgttctgggcaattcagctgttctgttcgtgatgttcatcaacaagaatcgcaagtcgcggatgaactacttcattaaacagctggcattggcagatctgtgcgtgggactgctcaacgtcctcaccgacatcatatggcgcatcacgatttcgtggcgggcaggcaacctggcctgcaaggccatccgcttctcgcaggtctgcgtcacatactcgtccacctacgtgctggtggccatgagcatcgacagatacgatgccatcacacaccccatgaacttctcaaagtcgtggaaaagagcccgtcacctggtggctggcgcatggctcatctcggcgttgttttcgcttcccatcctggttttgtacgaggagaagctcatccaaggacatccgcaatgctggattgagttgggttcaccgatcgcctggcaggtgtacatgagcctggtgtcggccactctatttgccattcctgcgctgatcatatctgcctgctatgcgatcatcgtaaagacgatttgggcaaagggttccatttttgtacccacggaacgtgctggttttggagctgcacctgccaggagggccagctcgaggggcattattccacgggcaaaggtcaaaacggtcaagatgacattgaccatcgtgtttgtgttcatcatctgctggtcgccgtatatcatcttcgatctgctgcaggtctttggccagattccacactcacagaccaacattgccatcgccaccttcatccaaagtctggcaccgctgaactcggcggcgaatccactaatctattgcctcttctcatcgcaggtctttcgcacattaagtcgctttccgccttttaagtggttcacatgctgctgcaagtcataccgcaacaactcgcagcaaaaccgctgccacacggttggtcgtcggcttcacaacagttgcgattcgatgaggacactgaccacttcgttgacggtttcccgaaggtccaccaacaagacgaacgcccgtgtggtaatctgcgaacgtcccaccaaggtggttaccgtgccagccatgtcggagcgacgcggagtttctctaaaggggaacacggacatcctgtga

SEQ ID NO: 13026 - protein, 396 aa, DROSOPHILA
MKCDHTLFFALFQTEQFAVLWILFTVIVLGNSAVLFVMFINKNRKSRMNYFIKQLALADLCVGLLNVLTDIIWRITISWRAGNLACKAIRFSQVCVTYSSTYVLVAMSIDRYDAITHPMNFSKSWKRARHLVAGAWLISALFSLPILVLYEEKLIQGHPQCWIELGSPIAWQVYMSLVSATLFAIPALIISACYAIIVKTIWAKGSIFVPTERAGFGAAPARRASSRGIIPRAKVKTVKMTLTIVFVFIICWSPYIIFDLLQVFGQIPHSQTNIAIATFIQSLAPLNSAANPLIYCLFSSQVFRTLSRFPPFKWFTCCCKSYRNNSQQNRCHTVGRRLHNSCDSMRTLTTSLTVSRRSTNKTNARVVICERPTKVVTVPAMSERRGVSLKGNTDIL

SEQ ID NO: 13027 - DNA, 5851 bp, DROSOPHILA
ctaatatcttattggcataagcaaaacacttaaaataagcataaatcaaatataactacaatcaaaattaaaccaggctataattaaccgaaattttccataaccttctaaattaataacaaaattcaacatatgtattatgtaattggtaaaatgtattagggttggcacagctgtctttacatcgcggtagcaatagaaagagggcccatatgaattacaaatatttgacttcaagacaatatatattcatttcatgaattattatttgacaaatgtatttgccagacctaaacaagaaacacagttagtcgaattcgactataaaagactttttattcattccaattgatcacaacaccctttgtctccactttgataaggaagtttcgaaaaatcccaacccaatacaagatgaagtaccttttcgtggttgcccttattgccctggccatccaggtggcttcctctgccagtaccactacaacaactgatgccaccaccacaacaacaaccaccactgcagcatcgaccacaacaacaacaacggccgcttccactcacaaaaagctttgttggaggggcaacaactggtgccacactcgcattcccaagcggaagtgcaagaacccaaagagatgccacaagaccatcgtgattgtgacccacagaaagaactaagggcttaagatcaacaagtttgaagaaaataaaacatttaacagttactagttacgtactacttcaataaccaaagtaactttccgattatagtcacataaacttaatgattttgactatatatcttttaatttggttacttgcgatactcacatacaaagccacccatcttcttggatttaactaccaaaccgagttcaacatatccaaaatgtcaaaggaatcaagctcacctacaaatttaaagacactcatagaaaactgaatacataatatatataaaaaaaaaaatataggaaacataagcagaccgtgtacaatggctaacaaaggacactttatcgagaggaatggggcctttcgtgctgccggattgccctccttcggggacgataagatttctttcaaggattgcgtgatcattgcccatccgtcggaggaaattcgtcatcagttagaattggagtgcagaagaaacaagcctcaacccttcggaaaactatcgccaattctgccggagagcaaaatgggcgaacttcttagcagcgagggtcaaaagtcacgtgtggctgtgttcaaggagaagtttctggaggatatgtactgtaagtttggaaaaaccggacaaatacagccgacgcactcgaaacccgatgatgtcaccaattggagtcatactttcggacgcgccaatcctccagcggaaacgttatatagcactataatgccgaaaaaatcggccgatcaggttaatcgcgaatatgccgagtttcatcgaggtcacatcgttagtaacaaccattactttccatctgagcagatcaatcgcaggtgggtagtatgtttatagtatgtagtatgtagtttatagtatagtatgtttatagtgatatatatatatattatagcgtgatatatgtttggtatagttcgcctgtccgtccgtttatctgtctgtccgtatgtttgtccttatgtttgtccttatgtttgtccgtatgtttgtccttatgtttgtccgtctgtctgtccgtttctaccaaagttagtctcttagtttgaaagctatctgcatgaaacttatgtgcttatgttttcgtagagtatctgaacttcggctgtctttaatttcagtttcaaatattttgtagatacgataagccctttgatcgattgaatacctatggagttttgcaaggcgccgagcacagtggttcgaccatgaagaaatgcttaatgcaaggtgacgagcatttaacagtggtctcaaaaccgtggatggattatgtacaaaaaaccaaagctcctttgggtaaaaaatacgaaaagtaagtatactggctttttcactttcctaaccgaaaaaaaattccactcgatcgtaactgtgcaaaaaaccgggtaaagcttacgtcagagagtaaatttttgccaccttgacttaagtttgttctttattgtttgcgcaaatggtggcaaattaggcctaagcatttcattaaataaataaataaattcaagtaatattatttacttagatacttagataaagtgccggacgtgttctttggctatcgtccccatacggacaagtgcaccattagaatgttgctggaggacattaggccgtgtgaagaggacaattctttggtgatggctctatcctatttgaatcggctgcgtgagagtcttcacaagcggaatgacttctatatgatggatctgatagcatcgctggagagagaggataaggagcatacgggtcacatgcccctctcgcagatccttgggaccatgtacaagctgcacatccgtgtggatgcggcgaaaattcgtaccatgttgtcgcatttcggtaagatcctcgacgagggctgtcccacggagcgggtgaactacgatcacttttgccgtatactctccgttcagcaaccgctgccgaatgtcggatgtattggccatattccggataacatgtacaacaaggaaactacgtatacaaaactatgcaaggatcgcatggcagatatacctgtgtcgccggaatttaactggccaaaccggagtgctcatcgtacggacgatatcaacacacatgtgaaggatgtcatacaaccggaactgccaataaaagttggcctcagacccagcgacaagacttggccacggagcaaggatcaaatagagcgaatattcgataatattgtctccaaggatgcgttcgaaaatatttggcagcgtataatggcaaagaagaagaccaatgatcaggatctaaaggaattggcatctgtcgcacagtttcgtgctgcaatgaactgcgaaatgcatgcatctacataaaaaaaaattgcaattccttttcataatattatcatgtaggtgagaaaataaaaaaacatattaagagtcgaatgagtttgaaagtaagaaagaagttaaaaacagatcgttacacaaaagtcaacttaaagagcaattcgagtattcacattctcatatatcaaaacattcaaataacacataatagtatcctatactcactggactttattaaaacaatacagatggcaaacattggtcgttacatagaaagaaatccgggaatacgggctgcaggattgacatcgaccgtgcaatttaatggggccaaggattgtctgttcgtcgtgagtttggaggaggaggccgaggatcgtataagggctctgtgtcgtagaagtcgacccaaaccagccaaacgaactcccaagctgcccacccatcaaataggtgacattctcaataatgaaaatccgggactctttgccgagcttcaaaataaatttcgcgagaatatgttccataaaaagcccggtttgggcgaagcaagagaaactaactcaaaaccgagctatgtaacgaatttgagtcacacctttggtaaaatcacgcaatcaaattgcaatgattctttgtactctatcgtcctgccaccaaaatcagccgagcaggtcaatcgagagtatggcgaataccatgataaacatattatcagtcataatcactactttcccgccgaacagattaatcgcaggtcggttgagcatttcactgcaaatattgctatagaataatggcacgtacctttttgtttagatactcaaagcccttcaatcgttttaatactttcggcttgccaccgactctcgatccttcaggtatcaagatgaaacactgcttggaggagggtgaggagcacttgaaaatagtcaaaaaaccccaaaaggacattgacgatcgcactaaaggacctttgggcaaaaagtattcgtaagtctgaatgaaagtctacttttattttgtgctctttaaaaccttcgatcactttaggtggtatccctaccagatacccgaaaatatgacctttggtcgcacgctgcctcgggaaaccgatgtccgatctctgctagaatacacctcaccctccataaagtccgagaaattagcgattgccgtgagtcacctaaatatgctgcgcaaaatgctccaggagcgggacgactttaatatgaaccaggtgatctcggctttgggaaaaaaggatacggaggggcagcgtcaactgccactggacgaggtcattaacgtgttgcacaagctaagtattccggcagatgcggaaaagattcgcaacgctgcgtcccactttcagttgtttgtggacgagggatgctgctcggaaaaggtgaaatacgaggaactatgcgatctcctttcgatcctgaaatctctgcccttgattggatccattacacccatgccaaaggtgacgtacaaccaggatacagcctatcgtcagttgtgtgctgatttgatgaaaaaacccccagagggaccgcaattcaaaactgcgaaaaaggcgtccattaaacaggacatgaatgcagcacctttcaaagactttaatagtccgcaaaaggcgcctattgaacaggatatggatgaaacacggtccagggactacaaaacttcgcaaaagacgcccattcaacaggatatggatgacacacgtgtcggggacgtaattaatccagagttttctaccttatgtggcctatggccaagtgattttaaggcattgcgtagcaaggatgaaatcgaacgaatattcaaggacatcgtctcgaaggaagactttcaaacaatctggctgagtctaatggatgagcagaaggatcaaaacgaaatggcatccgttgcacaatttcgtgctcagatgaagaagaacattgaatcataattcaagttaggtttttattcttagaagcgatttgtacaaataggtatgatttttcacagtcaataataaatgcacaatatttatttgtataattttaatttgttttaatatgttcgaaagttaaattgctccatgtatacaaagcaaaagaaacattttttgatatattattttattaatgccataatgcaaataaggtaaaattataaagctatttgtgaatcgggaatcgggatcttgggtatcggggaagtgggttggatcaggtggtgggtttactcaagcagtttaaccgctgcggttgcggttgcgccggatcttcctgaccttcttggggcggtgcaccttgcgcttatagtggatcacatgtttcttcttcttggaagaggacgcttcagtggtggtcgtggtgtccgaggacgaagttgtcgtggtagtggtgtccgaagacgaggcggtggtcgttgtggtcgtggtggcatctgtaatgatgaactccaattaagaacacaagtccgtttttaagttgaaggcagccgtcgggctgacatatatttattcaatttcttcttttgattttagagtaggcagtaatggttctgtcagctcaacgtctacagagtctctctgattttacagtttttaatatatttggacttaggctaatccgcgtagctgcgctgccgggtacgccagcagcggagcggcgttcttatgtatatcttatatatctaggcttatcgggagagcgagatatgtatgtacgtatgtaatatgtatttggtcggcgtgtgaatgctgaccatgcacttatactttttgccttcgagtgggcaatgcacttatactttgtggccttcgagtgggtgatcatgtacatccgccctg

SEQ ID NO: 13028 - DNA, 3024 bp, DROSOPHILA
atggctaacaaaggacactttatcgagaggaatggggcctttcgtgctgccggattgccctccttcggggacgataagatttctttcaaggattgcgtgatcattgcccatccgtcggaggaaattcgtcatcagttagaattggagtgcagaagaaacaagcctcaacccttcggaaaactatcgccaattctgccggagagcaaaatgggcgaacttcttagcagcgagggtcaaaagtcacgtgtggctgtgttcaaggagaagtttctggaggatatgtactgtaagtttggaaaaaccggacaaatacagccgacgcactcgaaacccgatgatgtcaccaattggagtcatactttcggacgcgccaatcctccagcggaaacgttatatagcactataatgccgaaaaaatcggccgatcaggttaatcgcgaatatgccgagtttcatcgaggtcacatcgttagtaacaaccattactttccatctgagcagatcaatcgcagatacgataagccctttgatcgattgaatacctatggagttttgcaaggcgccgagcacagtggttcgaccatgaagaaatgcttaatgcaaggtgacgagcatttaacagtggtctcaaaaccgtggatggattatgtacaaaaaaccaaagctcctttgggtaaaaaatacgaaaaatacttagataaagtgccggacgtgttctttggctatcgtccccatacggacaagtgcaccattagaatgttgctggaggacattaggccgtgtgaagaggacaattctttggtgatggctctatcctatttgaatcggctgcgtgagagtcttcacaagcggaatgacttctatatgatggatctgatagcatcgctggagagagaggataaggagcatacgggtcacatgcccctctcgcagatccttgggaccatgtacaagctgcacatccgtgtggatgcggcgaaaattcgtaccatgttgtcgcatttcggtaagatcctcgacgagggctgtcccacggagcgggtgaactacgatcacttttgccgtatactctccgttcagcaaccgctgccgaatgtcggatgtattggccatattccggataacatgtacaacaaggaaactacgtatacaaaactatgcaaggatcgcatggcagatatacctgtgtcgccggaatttaactggccaaaccggagtgctcatcgtacggacgatatcaacacacatgtgaaggatgtcatacaaccggaactgccaataaaagttggcctcagacccagcgacaagacttggccacggagcaaggatcaaatagagcgaatattcgataatattgtctccaaggatgcgttcgaaaatatttggcagcgtataatggcaaagaagaagaccaatgatcaggatctaaaggaattggcatctgtcgcacagtttcaaagaaatccgggaatacgggctgcaggattgacatcgaccgtgcaatttaatggggccaaggattgtctgttcgtcgtgagtttggaggaggaggccgaggatcgtataagggctctgtgtcgtagaagtcgacccaaaccagccaaacgaactcccaagctgcccacccatcaaataggtgacattctcaataatgaaaatccgggactctttgccgagcttcaaaataaatttcgcgagaatatgttccataaaaagcccggtttgggcgaagcaagagaaactaactcaaaaccgagctatgtaacgaatttgagtcacacctttggtaaaatcacgcaatcaaattgcaatgattctttgtactctatcgtcctgccaccaaaatcagccgagcaggtcaatcgagagtatggcgaataccatgataaacatattatcagtcataatcactactttcccgccgaacagattaatcgcagatactcaaagcccttcaatcgttttaatactttcggcttgccaccgactctcgatccttcaggtatcaagatgaaacactgcttggaggagggtgaggagcacttgaaaatagtcaaaaaaccccaaaaggacattgacgatcgcactaaaggacctttgggcaaaaagtattcgtggtatccctaccagatacccgaaaatatgacctttggtcgcacgctgcctcgggaaaccgatgtccgatctctgctagaatacacctcaccctccataaagtccgagaaattagcgattgccgtgagtcacctaaatatgctgcgcaaaatgctccaggagcgggacgactttaatatgaaccaggtgatctcggctttgggaaaaaaggatacggaggggcagcgtcaactgccactggacgaggtcattaacgtgttgcacaagctaagtattccggcagatgcggaaaagattcgcaacgctgcgtcccactttcagttgtttgtggacgagggatgctgctcggaaaaggtgaaatacgaggaactatgcgatctcctttcgatcctgaaatctctgcccttgattggatccattacacccatgccaaaggtgacgtacaaccaggatacagcctatcgtcagttgtgtgctgatttgatgaaaaaacccccagagggaccgcaattcaaaactgcgaaaaaggcgtccattaaacaggacatgaatgcagcacctttcaaagactttaatagtccgcaaaaggcgcctattgaacaggatatggatgaaacacggtccagggactacaaaacttcgcaaaagacgcccattcaacaggatatggatgacacacgtgtcggggacgtaattaatccagagttttctaccttatgtggcctatggccaagtgattttaaggcattgcgtagcaaggatgaaatcgaacgaatattcaaggacatcgtctcgaaggaagactttcaaacaatctggctgagtctaatggatgagcagaaggatcaaaacgaaatggcatccgttgcacaatttcgtgctcagatgaagaagaacattgaatcataa

SEQ ID NO: 13029 - protein, 1007 aa, DROSOPHILA
MANKGHFIERNGAFRAAGLPSFGDDKISFKDCVIIAHPSEEIRHQLELECRRNKPQPFGKLSPILPESKMGELLSSEGQKSRVAVFKEKFLEDMYCKFGKTGQIQPTHSKPDDVTNWSHTFGRANPPAETLYSTIMPKKSADQVNREYAEFHRGHIVSNNHYFPSEQINRRYDKPFDRLNTYGVLQGAEHSGSTMKKCLMQGDEHLTVVSKPWMDYVQKTKAPLGKKYEKYLDKVPDVFFGYRPHTDKCTIRMLLEDIRPCEEDNSLVMALSYLNRLRESLHKRNDFYMMDLIASLEREDKEHTGHMPLSQILGTMYKLHIRVDAAKIRTMLSHFGKILDEGCPTERVNYDHFCRILSVQQPLPNVGCIGHIPDNMYNKETTYTKLCKDRMADIPVSPEFNWPNRSAHRTDDINTHVKDVIQPELPIKVGLRPSDKTWPRSKDQIERIFDNIVSKDAFENIWQRIMAKKKTNDQDLKELASVAQFQRNPGIRAAGLTSTVQFNGAKDCLFVVSLEEEAEDRIRALCRRSRPKPAKRTPKLPTHQIGDILNNENPGLFAELQNKFRENMFHKKPGLGEARETNSKPSYVTNLSHTFGKITQSNCNDSLYSIVLPPKSAEQVNREYGEYHDKHIISHNHYFPAEQINRRYSKPFNRFNTFGLPPTLDPSGIKMKHCLEEGEEHLKIVKKPQKDIDDRTKGPLGKKYSWYPYQIPENMTFGRTLPRETDVRSLLEYTSPSIKSEKLAIAVSHLNMLRKMLQERDDFNMNQVISALGKKDTEGQRQLPLDEVINVLHKLSIPADAEKIRNAASHFQLFVDEGCCSEKVKYEELCDLLSILKSLPLIGSITPMPKVTYNQDTAYRQLCADLMKKPPEGPQFKTAKKASIKQDMNAAPFKDFNSPQKAPIEQDMDETRSRDYKTSQKTPIQQDMDDTRVGDVINPEFSTLCGLWPSDFKALRSKDEIERIFKDIVSKEDFQTIWLSLMDEQKDQNEMASVAQFRAQMKKNIES

SEQ ID NO: 13030 - DNA, 2960 bp, DROSOPHILA
ttagataggaccactaaagtcggttcgaactaccttatctgttgagattttgtgccgaagatatgaatgaatgaacttcagccacacggtcgccaaaattactttcccaatccaagagtattaatcccgatacggatctaatcagggctatgggcttcgagtggatttccagatcgagccgctgcgataccaaaggcctagcatggggttgctaattaatttgattagttttacacatacgcgatatatacataactatatattgcgatacaaaattggcaaaggtttgctttgctcttcagcgtatcttataattcccatggtagtcgagtgctatcttatctcctgtctatagggtgagaagccgtaagcccacagtttagttgggtttgtttaccttcgataaaggtcaaggagtaggacgtgagttggtcaagactgcttaaacttcataggaaatcataccgccgtctaacaattgcgtatctggactctctctttgattacaaacacgcaaatttcagttgttttcgcaaccgcagccttctttatcagcgaaagccgcgtgattttatgacgcgttcaaccgaccacatcactgcggttaatagccaattcagatggccaattgaaggcgattagcgggaggaggcgctgcggtctgtacccaatatgccctcaccaaaaacggacactcaacccaatgatttcaatttcagtggcgattcatcagcaatttccatggcaatgtaatttttcttttgtgcccttattgagctccccaaattgacttgctcttctgcaatgccgaaatgtttattgttatttatcggtaacaattttcattcaagagaaaacaaccacacataaaatggaccatttgcaccttcctttctcgacagaagaacctgttttggtttcattgctcaaattggttttattgtctgggccgactatattgtttagcaattaatgggctgcaattaggcgttaattgcatttagttggtcattgccgtttgctgtcggatccatggcaaatatgcggttatcctggtgtagacagtgggaccccccacctcgcatccttcggcactgccgaacgaggtgaccccaatcaggtagctaacattgcgccagtggtacacaacggggccaccggagtcgccattgcaggcaccacgtccattgcttccatcggtgcacaggtgacgtcgctggctaaccaatcctggcaggaaatagcagatgcagcgttcctgatcgatcacctccgcatctaagtactggaggagtcgcgtccgtttgtcggttgaatctcccaagtaaccccagccagatagggtcaccactttgcctaccagaaagttttgatgcatgaactccccagccaactcaatgggttgcacttgttctgaagttctgacttttcttggcagtcgtattaaagccaagtcactatatcctccaaatcccaagtaatcaggataaataatgaaatctctatgcgtgacttgtaactcctccacggagtcttctacatcggcaaatacggtggcgcccgtgtatatctttgcagctatggcatcggtcagacaatgggctgcagtcaaaacaaattgaagagtgataagggaaccaccgcacttgaccagatctgcgccactcagctgaatcaccagacccacttgatagggaaacatgccgcgcgtggccaattctcctccagctattcgagttctcacagcagcggtttgattaccttccatctcgaatttttcgcagcgaagtcgaaagttttcgtagccaagctgccaacgtctttccatgattgcatcgtcatcgtccggtgtctcctctttggggtgctcaaaagtatctagccaaggctcacttgatttaactagtgtggatgatagaagtagcaggaagaaagcacttgtagcctggtattgcgccattttatcactacggaattgaaaaaataatatggggaatacctgttattgcattctatactatatcttttaaatgtaatatttcctttttctgaccaaattcatagaataccccccgccccccccccccccttaaatatgtgaataggaaactctattcattatgttgaatgaaatttatgaatgaattgcctttttatttacatatattatatatatagctgatgttcctcgtaatgagttagtccaagttcaggtctgagtgggctcttcacgtgaagtactgggcttgttgttgtatttgctggtgtttttatagtcagcgattgtggcatcgacattgcgtcatcgacttggatgcggcacgtgtccgcatcgtttgttaattgaatttgcttgggccgagtgcaaattatacggagacgggaggagcagcagatgtttggcattcaattcctccagctaccgtgtaattgccgcacgttttggcgattatgttgcttaggctaggccttcgtctccctttggcatactgcagtttccttaattgctttcgaaccccccattttcccgggtcctcaattgcacgatttcagtcttagcccccaacattggccagaatgtctgggtcggggtctctgtatttattgactgtcgttttatcaacgcttagtttattatttgtttaatttactgcacaccttcgcctgcatttcgacacatgaaaggccattgataattttcctggagttgaatggctgtggggttttacaatccaaggccccgatttcgtcaccgatcataaagtacccactttggcgatatcaaaagccagaagtgtattaagttagtctataagagttattatgaaatctgattcattaaacggtaagagagtagatctcaatctctagacattatttaaaagtctaacatgtgtaaaatcatgattacagttttatttataatattttgcagttttcatatttcatacttcaacact

SEQ ID NO: 13031 - DNA, 960 bp, DROSOPHILA
atggcgcaataccaggctacaagtgctttcttcctgctacttctatcatccacactagttaaatcaagtgagccttggctagatacttttgagcaccccaaagaggagacaccggacgatgacgatgcaatcatggaaagacgttggcagcttggctacgaaaactttcgacttcgctgcgaaaaattcgagatggaaggtaatcaaaccgctgctgtgagaactcgaatagctggaggagaattggccacgcgcggcatgtttccctatcaagtgggtctggtgattcagctgagtggcgcagatctggtcaagtgcggtggttcccttatcactcttcaatttgttttgactgcagcccattgtctgaccgatgccatagctgcaaagatatacacgggcgccaccgtatttgccgatgtagaagactccgtggaggagttacaagtcacgcatagagatttcattatttatcctgattacttgggatttggaggatatagtgacttggctttaatacgactgccaagaaaagtcagaacttcagaacaagtgcaacccattgagttggctggggagttcatgcatcaaaactttctggtaggcaaagtggtgaccctatctggctggggttacttgggagattcaaccgacaaacggacgcgactcctccagtacttagatgcggaggtgatcgatcaggaacgctgcatctgctatttcctgccaggattggttagccagcgacgtcacctgtgcaccgatggaagcaatggacgtggtgcctgcaatggcgactccggtggccccgttgtgtaccactggcgcaatgttagctacctgattggggtcacctcgttcggcagtgccgaaggatgcgaggtggggggtcccactgtctacaccaggataaccgcatatttgccatggatccgacagcaaacggcaatgaccaactaa

SEQ ID NO: 13032 - protein, 319 aa, DROSOPHILA
MAQYQATSAFFLLLLSSTLVKSSEPWLDTFEHPKEETPDDDDAIMERRWQLGYENFRLRCEKFEMEGNQTAAVRTRIAGGELATRGMFPYQVGLVIQLSGADLVKCGGSLITLQFVLTAAHCLTDAIAAKIYTGATVFADVEDSVEELQVTHRDFIIYPDYLGFGGYSDLALIRLPRKVRTSEQVQPIELAGEFMHQNFLVGKVVTLSGWGYLGDSTDKRTRLLQYLDAEVIDQERCICYFLPGLVSQRRHLCTDGSNGRGACNGDSGGPVVYHWRNVSYLIGVTSFGSAEGCEVGGPTVYTRITAYLPWIRQQTAMTN

SEQ ID NO: 13033 - DNA, 3871 bp, DROSOPHILA
ccaataagtagccatcgtcactctgcactgtgtaattctccgccgggtatccatatttggaaatcaattgtatctgcaaaaacaggagaaacaaacacggcttaatataactattcgctagagatttgcccttaaatactttgagtgtacgtagtattgagtgtacgtagtatttagaatacatgagattataaaactatgaccaatcagcgagtaatccgacctttatagtaagagctataacctagaaagctatatatgtacttacactcacacaaattgtgtctatatctacagatgttttataagtcgaaatataatgcactatattaatctagatttttagatctggataaacttcctatgctttattccaaatgttactaatcgttggaacccgaatgatttttgaacttaccgtattcaagtgtgcatcttctaaaactgatgaaggtatagccagttgaaaaggattgaaaaatgcattggcttccagctggaataggcccaaaaagaaggtccatataagaaatttcgaagacgatgatagagacatctgactttattagagacaaactttactaatccgatgtatacaagttccaagtggaaactgaagcaagtaaaattttgggatactaaaaaagattgtacgtaggcaataaaagtgcaacactttaacctatgaataaaatttacatttaccgcttgggtctcaacttaaatactttcggaaataaatatcattcatgtaacttaagcaaaaagtttgttgcttagcaaaatcgaattaaaagatatatactaattttcatatcaaaaaataggaatagaaaagatgggaattaatattaaaaatgtattaattgtaagttgtttttattggcttttatcgttgtaaaattgttgtaaatcgtcttagtttctactaaacaataaatacctaactaataataatatactgtgaataactaaattataaccatagttctattcccctttagataattgaattctcatgatttcgcattatttccagcattcgatcccacaaaagttcccgggcatcgatgccccaaatgaaatccaagtggttgaactccttgtcgtccaccagatatttctccacgacattgggcagcttgcggttcagcatttccacatcctccggcggagccagccaatcgttttggccataatatagtgccaccttggcccgaacattctccaggtggtaggatggcgggtcaatggttccgtagatccagtggtttctgagccatccgtgatcatactgccggaaaccgccagatctgttgagctgtccaaaatgctgcatctgcttggtggaggctccggccggagaatgacccacgattaccggcagcatagtctcgttcagctggagcttgtcgaatccggtggtcaggaagatgacgtttgaacaaatctctttcgtaatagtggtctcgtcgcagatgatccggttgaacatgctgatgaactcattcttaggcaaaaactcgtgaacgccaatcagcttgaggaccaactaaaatattaaaataatataagttaacatgaacaaattgaatgagaagagaaggagaaagatgttttgcactggatcgtgtttataataaacaatgattaaatttacattaaatttggatgtattccactgcaaaaacgctctttgaaaggatgggataattaggatggggtaacttacgctcaccgatagatgccactcggccaggaagttgaccaccggactgcggcagtgcttgaggaatgccaccggtgccaatccctgcatcagaatgatcttgtccatatactcgggcttctcgctggccatgatccagaacacaacggttccctgggagtgaccaatgtagtgcaattggcttacgcccgtggaattgaggatgtagtccattgtggcgggtatatcatgctttcccatctcgtggaatgtaaagtcccagaacttggcatggtgggtgctatacttaacatgctttctcgagtacgtattgccacgaacattggccatccagacatcgtacccctgatcgtagagcaggtaacctttggaacagagcaacgcaatcagcatgggacatttggagatagcctatgatcttaccaagtcccttgttcggtcccatcatcacccaagtggctgagctatccagtagtccgtgcaccagaagcactggcgttgctcccggtctagcgatcctgtgcaaggtgaggatgtatccatcatccgtctccaaggtgtgattctccgccgggtagccgtacttttttatcagactgtactgcagaagggaaaagagacgaggttattacaattgtactaagaacaacaaattttctaagtgtaagtttctatcagcgtaatcgttaatttaacgattaaattgatatgtcaattttcaataatgtaattacttttcttaattattagggagaggtacgaaaatcaaaaagcttcctatacaaacgtaatatcgtaaaaataaagcgatgacaacatctgactaacttttaaacgtatacattaacacattttagcagcaaatatgtactattactactagatcttttattggcgttaactttttccgactatgggtattaacttacggtattcaagtgtgaatcctcctgaatattgggatccacatcgttctccaaccgcacattgctatccaccgccacggatcttcccaaaaaagttggtgttttgaagttaacattaaagagggttatatctccgagtgataatgatataccctcgacgatgcccgactgcaggaggcacaaactaagcgctacaattagcaatttcaccgacattatttcaccgattttacgactaatctcagcggttacactcgtactactattataatacaatagatatatgggatctatggctcggcggatgcgatcggtgcgaggcacaattgttgactgatggcagtcccgattgacggcaacaaagaaaccttctgtgaacgcgagaaattcgacacttgcccacacgacatatgtattttcgaaataatcagcacttctcgtacaatactttcgagggaattgaatcactggggcacagtgttatagctacattcaacccaccgataacctgactgccttcgtcactggccaatcgatgataagccgtgggtccggctcgcaatggtcttgactttggaatcacttacgcacgagatgtcaaagccgccggcccccagcggcaactgaagaagatgttttgtcgttataccgattttgatttcgattttgattccacacaacccaaggggatccaccttggcaacattcgctcggcgggtaaacaaacaattcaacatgttgccaggccaattgattcgcccaacttaactctccgcatgaaaaaaaaaaataataacaactggttgttgctctgctcagccggaaagagaaaaaatgtgaaatattattaattacaaccacgcgttgtgaaaactgtgattcattgctggctcattttccagatgcatgcaaatcaactaaaactatgtagtatcattttctgacctcaagttgtaatcttcaaaacataaattctgtgaagattagcacggattttgaactaatcaggcaaagtccattcccgagactataaataaataccaccaattaaactattcatctagcttagcagacctttgaatactttacttgagttggaaaattcattaccactttccttgatctccagcattcttaattttttttgatttcattagtattatattagtttattaaattaacctgtacatcaagtaaatctttattgtaaattaag

SEQ ID NO: 13034 - DNA, 1305 bp, DROSOPHILA
atgtcggtgaaattgctaattgtagcgcttagtttgtgcctcctgcagtcgggcatcgtcgagggtatatcattatcactcggagatataaccctctttaatgttaacttcaaaacaccaacttttttgggaagatccgtggcggtggatagcaatgtgcggttggagaacgatgtggatcccaatattcaggaggattcacacttgaatacctacagtctgataaaaaagtacggctacccggcggagaatcacaccttggagacggatgatggatacatcctcaccttgcacaggatcgctagaccgggagcaacgccagtgcttctggtgcacggactactggatagctcagccacttgggtgatgatgggaccgaacaagggacttggttacctgctctacgatcaggggtacgatgtctggatggccaatgttcgtggcaatacgtactcgagaaagcatgttaagtatagcacccaccatgccaagttctgggactttacattccacgagatgggaaagcatgatatacccgccacaatggactacatcctcaattccacgggcgtaagccaattgcactacattggtcactcccagggaaccgttgtgttctggatcatggccagcgagaagcccgagtatatggacaagatcattctgatgcagggattggcaccggtggcattcctcaagcactgccgcagtccggtggtcaacttcctggccgagtggcatctatcggtgagcttggtcctcaagctgattggcgttcacgagtttttgcctaagaatgagttcatcagcatgttcaaccggatcatctgcgacgagaccactattacgaaagagatttgttcaaacgtcatcttcctgaccaccggattcgacaagctccagctgaacgagactatgctgccggtaatcgtgggtcattctccggccggagcctccaccaagcagatgcagcattttggacagctcaacagatctggcggtttccggcagtatgatcacggatggctcagaaaccactggatctacggaaccattgacccgccatcctaccacctggagaatgttcgggccaaggtggcactatattatggccaaaacgattggctggctccgccggaggatgtggaaatgctgaaccgcaagctgcccaatgtcgtggagaaatatctggtggacgacaaggagttcaaccacttggatttcatttggggcatcgatgcccgggaacttttgtgggatcgaatgctggaaataatgcgaaatcatgagaattcaattatctaa

SEQ ID NO: 13035 - protein, 434 aa, DROSOPHILA
MSVKLLIVALSLCLLQSGIVEGISLSLGDITLFNVNFKTPTFLGRSVAVDSNVRLENDVDPNIQEDSHLNTYSLIKKYGYPAENHTLETDDGYILTLHRIARPGATPVLLVHGLLDSSATWVMMGPNKGLGYLLYDQGYDVWMANVRGNTYSRKHVKYSTHHAKFWDFTFHEMGKHDIPATMDYILNSTGVSQLHYIGHSQGTVVFWIMASEKPEYMDKIILMQGLAPVAFLKHCRSPVVNFLAEWHLSVSLVLKLIGVHEFLPKNEFISMFNRIICDETTITKEICSNVIFLTTGFDKLQLNETMLPVIVGHSPAGASTKQMQHFGQLNRSGGFRQYDHGWLRNHWIYGTIDPPSYHLENVRAKVALYYGQNDWLAPPEDVEMLNRKLPNVVEKYLVDDKEFNHLDFIWGIDARELLWDRMLEIMRNHENSII

SEQ ID NO: 13036 - DNA, 2638 bp, DROSOPHILA
attcaaattgtcaatcgattagtgttaaattattacattattaaatacatagttgcattaaaactgccgttttgaatttatttcaaagattatatttaagtattttaatgagatttatttattatttaaatctcgtttgtctttgaaagtgccgatcagacagcctacgtaaatacgcaaataactgacacctaatcatgtaataatctacttgcaatgaacgcgcgcttttcgcactgacattccggctcactgttatcagtaaaaagctcgctgataacattgaatagtgaatggtttgaacgtagatctttagttgcattgcagaaaagctttcatgttttcgtcagcgcgaaacgaaaagctcaatcagctcgaatacgtcggcgattgtttatcaccaaaacatggacggttaaatggtcagcgtgtatatatttataggtatactcgtactggggcgacctgcgatcagcggtcagatgaatttaaatacgcagtattgtcaatacgcgacggcgagacggcgcccaacgcatgcgggcatgttggcaggcgcaccgaatatctgatagatactttttatcactgcgacatatccgaaatagacccagataaacatacacctgccaggccccttccggcggaatcccttgaaggtcaccgcccagagggaaagttggggatcgaacagaaaaagaacttacacctgaaatgggaatatggcttattattgctaaactatttccaacattatcttagagcacgaatgataatgccacacaagttaccattggaggccgccaatgccttggctattttaatagccacatttgttttgaaatcataaaagtcaattggtttattcaatgactgcttcgtttattcgctacgtccgtttttcgcttttttttgggtgcctcaataacaaactttaagttggacattgacaagacattcgaaattattattgtgtgttttgggttacgtttcttttggccgaacaatatgcatttcagtatgtatatatttttttagtttttgtgtgcgacaagcaaggcgaaacgtatcatattctcatgattctttctacacctccttcttcgtgctccccccgatccacagcatcagtccttgagtttttgcagcgatttccgcatcgctgccacgcctcccgcccgccgatttacgttccgcccacttagtcattgtaactatagcgctgcttgacacttcggtacttcttcagcgagtacagggcctccacctccttggccaagtaacgtccttgggctagcagggcgacgatcttcttgggatcctgctcgtccttgtggttcatgaaggcatcgtggatctgcttcctgaacttctgcggcccgttcaggccgggatattcgcggcccaaatactgcaactgcaagtgtttacgcaatgtcaattggggatggtctaggttgaacttttttcggttctgctttttcgttgggtggggtggtgcacgtgccgccgggaaactgtgcgcaacttacgtgcttgtagaggctaatgactttcgagcgcagctgtgacatcaccagtggtcagcggaattggtttgtttgttaaatgcaagttaacaactgatttgcagaagcttttctctgctttttgtttattttatttcaagcgaagtgaatcacacggctgtttgaaagggactaacgcgtagctgtgagttccccgctagcgatggcagcgtgagtgcttttggcgaaggcactaactaatctagactaggtcgtgactcattcgtgactcgtgaagatacaagtagatagagatattcatatgtgatacgaatattatattttgagcgtaatttgttgcacactatttaacaatgcatttcaataataatggtcagtcggatatttcttgttattgttctaccattgaaattaatgttgcatttcttcttttgaaataataatgataattataatgatagactattttttacctaaacgattatgttactttattttttaagattatttttacagctaaaataaatgacaagtaagtgttgtgtcacaacacaattaaattttattattattcaaatgacagctgtacgcgccatcttcaccagaaacctgcgcatctctcccgtgagccgtgactatggcgcgtcacccggcgttgccagtcagttaatagctgcttgttgtgcatccccgatcgatcagctgttcgcgaagaagaagaaacgatgggagtgttttcgtccgaggcgaaattatttttatttttttcgcgcttcatagccagcgattaatgagctaatctagcttaaaacgcgaccgggtagttgcaactcttgctgtgataaaaggcagtgagctgcctcgatgagaaggcgagaaaaaacgaatcgaaaattgagacacccgcgacctccgaaacaaagtgggaaaaatcgaacctgtgtgcgtgtgtgtgtgtctgcgttcattaaaagtgtgtgtgtagaatagtaaatttaatttaaaattaaagagcccaatgtgtgcaatccataatcgaatcatatacacaacctgcgatcggtgataatgagcgcggcgatgagcaatcgctaatcgcgagtgcaaaa

SEQ ID NO: 13037 - DNA, 523 bp, DROSOPHILA
agcttctgcaaatcagttgttaacttgcatttaacaaacaaaccaattccgctgaccactggtgatgtcacagctgcgctcgaaagtcattagcctctacaagcacttgcagtatttgggccgcgaatatcccggcctgaacgggccgcagaagttcaggaagcagatccacgatgccttcatgaaccacaaggacgagcaggatcccaagaagatcgtcgccctgctagcccaaggacgttacttggccaaggaggtggaggccctgtactcgctgaagaagtaccgaagtgtcaagcagcgctatagttacaatgactaagtgggcggaacgtaaatcggcgggcgggaggcgtggcagcgatgcggaaatcgctgcaaaaactcaaggactgatgctgtggatcggggggagcacgaagaaggaggtgtagaaagaatcatgagaatatgatacgtttcgccttgcttgtcgcacacaaaaactaaaaaaatatatacatactgaaatgcatattgttcg

SEQ ID NO: 13038 - protein, 85 aa, DROSOPHILA
MSQLRSKVISLYKHLQYLGREYPGLNGPQKFRKQIHDAFMNHKDEQDPKKIVALLAQGRYLAKEVEALYSLKKYRSVKQRYSYND

SEQ ID NO: 13039 - DNA, 11198 bp, DROSOPHILA
caacatggcaacaatctacccgctctcgctcgctctctctcccactctcgcacacgcttacgctcctgccccccgcgcatggttatgtgcctctcgctcgcacgctcgacaacgacgacgacgccgcttttctgggtttcctcgctggacgcatcgattgctgcgctcagttcaaattgaattttcattgcgagcgcgtctgccgctccttcacgctcgccctctcgctctttcgctcgcccactggcccactcgctctctgccgagaaaaaagctgataaacggtggacaaaaccaaacgaaagcaaaccgaaaccgaacttttgcccaagtgcagttttatttaatcagtgtgcaaagacgcgtcgtttggttaacgccggccgacggctcagcgaagcaaataaataaatacaaataacaaacacacatatttttttttcaagtcctacgcgagtgaacacctgacccccgcgcaaaataaaacccccttctaacgaaattgtgcataaatagacctattttcatggcctaaactacggaccataatggttttggagacctccgagggcgataccaaaaagttcctgaccaacaacaataactcgagtgccagccgaaataacaacagccacaataacaacaacaacaatcacagtcccaaggaaattccggaggagactggccggagtagcagcaccagcagtaacagcatccccaacgcccaccggaccaacgccggtcagcatctgttgggtggctccccatcgagcgcctgctccacatccgtatccggttgcggcatgccctccgagggcctccatccgacggccgcactccagctttatgccgccgccgcccaactggcgcctaatggcgtccgcgtaccgccctggggtcccttccttcagttcggcgtgccgggcgtctttggtccgaacggacccttcctcgggcggccccgtttcgatgccgcctccgccggcggacatccgaattccgctgctgccgccgcggccgccacgcaaatggccgctgtgaatgctagcaatgcgttcgccaatctaacgggactgagtgcggcggcgctgcgaaacgtgagtgccgcccaaacgacggcggtggcggccgtcgccagtacagtggccaccatccagcaccgactgatgatcggcaaccggcagagtttgccgccggcgggaccacccagcgaaggatctaatgaggatggcggtaagtccaagctgcgttgttttgcctcaaacatttgatgaaaatacagtcagacttgcgaagataagcaaacagtagctactgcttaagtaaaacgttatagattttttggtttaaggaagtggtatttcttgaatgtaaaagtgtatacattatgagagtcttgcttacaccatttcgcttggatgacaacgcagtagaacttccttagcttaaacttctagcattcaatatatactataaactattaataaagttgcctaaaagagaatctgatctagggataaatattcacagtaatttatgaattagagtatttgataaagatgaaaaaatttaagcaatttatgttatgcaaagtaatcattaatgacaacagaaacctgcaggataatatatattattaggaaaagtaaagatagtttagctttcagcggaatgagatctgcttacagttccaaagtttcttatcgtcacaaggtttttctttaataattcactttatgtaaagtaatagagggcacctttaaggatttggggattaacttgatataactagcttactttgcgtcaaggatgttggattagtttctagattattatcacacccgaaaaacatggttttataaaaaaagtgttaagggcaggtgcttttaactttaagcagatgaaatattccaattgatatatccaataggattgcatccatttgaaatatcatcttcgaacaaaacaaattttgaaaattgtagcttacccaataataggtaatatcattttgtataaaaggttaagcttagtaaatacagttggtaatttgctccatttgtccgaaatcaatgatccaatcaagcagtccaaacaaaggctgctttatatgaccgaaacctcctactcgagtgaatttcgaaagctgatacaatgtatgtgtgtatatggattagctaagtagcaaacgatcttacacaaaatcatttcattcgtatgatgcacaagtgactcaatgagcgatcatcaattaagtaataccgttaacaggctgacggatcctaaagttaatcggcgacacgtgtgtgtggtagcctgaaactcgcgtcacaagtcgcattcctcagtctttcccatgaaatcaatttccagcgccaactttcgccggctgttagctattgggatatattcataggcgagatcggagaacggagaacggggatcccagatcgacaaatgaattatcaagtcggacggaacacgcgcctcctccatcgcgagtggaggtcagcgccggctgatcgatccatttggccagatcggctcggatcgaatttctattagcatgtgaataggggctatagacgccatagcttcactgcactcatcctgctcgttatcatgctcggagcacggacaatatgctaattcattcaattagccctgctaaacgctttccgattgtcagccagtcagccagtcagtcattcacgctgtttttgccccaatcgagcattctgtatcaggcgggccagttgtgcttgacttttgctacctgcaaaacacatttattgatttagctaatcagcgatcgattattatgtaaagtccgattgatttcgttgattcgatttagcatacaaagtagtgtgccaactgccagcgattgccgcctgctgtgctcccccggaaaaggtcgtagacacccaaattgggcacacatccatatccatggaccatggcgatccataaacaataaacaaattgactgacccatgtcatgctaaaactgtggcaacacacaattttcaaagtgtgaacggtaactcgttgttttgcctcttaattggctaagatcccttgccacatttgcgactagtttccaaaagtgcacacaagccttaaattcagtggtattgttatctttaaaaaatataaatattcgtattttagaaaagtattgcatcaggtatcaatatttcatctactgtcactcgtatataatatatatattatgaatgttgcaacatatatcattcctgaaattattttcttgaccaagtactcacaagtttgtgtaacctttgggttaagaaacataacacataccctagaaagagccaattaagatctccagcacttgaacagcttaaatggcgaagctcattgggtaatcaaacaattgtctaacctattccgtaatcgtaacaattccgggaaactcttgttagccaagaaagatcacttttcccattgatgatgaattaagttcatcttgtttgcggtgagcgcgacttactttctttcaattcgtttgtccggacaattggaggggcgcaatcactagacccgaaattgatgggacgccatttgctgtgatcgcccagttggccattaagtggcgactcgaaactcggagctggaaaaccggactggtcactggtcaccactggccagttggcagtggccagagcgtagcagagatcgtggctcattgaccaattagcattaacaaatgatggctagttggtgtaattatggccataatgcatatatccaaaggcggggcgttagcagggggcgtgttcgcccgcttgttgtaattaactgcacttggctgggctttgggtgtgggtttgggccttcgagttcttctgtccccagatcggggacttaattaattgccagccaacgcaggggcacttccttcttgaaaagtaattattaatttgatttgattcaatttgattaggctggcgattgtgcagattgtggatacccactcttccagtgggtgttttccctcttattttttgttttttgtctgagcttgcggcagaggcagggttgccatcgcactctttgctcattaatcattttgcggcagagagttgacatgcaaccaaaagtctgcgatttcgatgggcatacgttcgtaggtatataggtggatgtgggtgtgggtggtggtggaggtggtgaaggtggtgggacgtcatcatcatcgtcgtgacgtttacttgcctttgctcatttcacgccggaaatgaagaaactgtcataaggcgatcggaatcatttatcatgcgattttcagtttaccatcacacagcggcgccattttgttttcttcttgtcttgttttctggtcctaatgaattccgtatagccaaaaacccgaaaaggggtttttgcgggaagtacacatacatacatacatatacacataattgtagagcacttccgttccgccttcaaaacggaagttggcccattgatggaacgacggaatgatggcatgaaggttccattccgccggagtaactgactgactgactgactgaatgataaatcgtttcgcactccgtctcctttgatttagtcacattctcgattttcagtgttcttatcaaaaatggttatacccgttcgctttttaagtatttccgccttttaatgggtttttttcttcagtacaagattttattttcgtgtgactggaaatgaggtgattttctcaattatgattgttggagaaccttttcattatatcatcttgttttaggattcataactatgagttctttaagcataagcagcatcatattacacttattttttatatttatacaaactttttaccaaaaacttcttttacgtgattacaacctttaggaaattgtatgtaccttaacaaattgtgataattacttatgtaacaacttaacgttgttaatggattgtatgccttgtatgtccacatttttgaaaatgtttaactttcgataattatgggcttgttttggatactcaatacttacaagagtgctctcattagattttgggaatgtaataaacaactcacaccctcttttgaatgccctacccgtgcgcctctgccatgcaccccttttggatccccttctccacccttaacttttagtgttctctccttcacctcttttcgccttctactctcctttgctttcatgtcttacctttttttatattttcgctttaatttttatgacttaagtggctcgcccgcgagaatcgagggggtcgaatggaaaggggggcaaaggacgaagggttgggggtgtggttattggcgactggagtgtatgtgtgtatggtgtgtgcgtctgggtaactgttatattgcctggctgacgcgagctgtaaacgaaaatagcttgccacggaatgtgactggggcatgcaacaacatatacactcgtaccctctgattttgctaccttccttgcataccctaactaagggctttcgaatttttgtcactcactgagaaaagtatcttgaaaatatttcttaaatatctttaattttaaaaccttaatgagtctgctactaaactgagcgaagatattcatcatagtgtgaattaattataaacattataaacatcttaattgaatgtttcattttcagtttttgtttccgttgcgtttctgctcaccgttccctttgctcatcgttttgaggatttttggtgaagtgaatcaatgcgacgttgccaaatttcagtctgctcgcttgcacattgttaaattgcatgctgcatatagcatactgcatattgcacatggcccattgcaaactgcacactcggggcgtgcaataatcataataaatttcaattatcgtttgcatttgctcccacactcgcttctcgatctcgtttcggcggtacaactcgccactcacaaatcgcaaagagccaaaaacatgaattatgttccagttgtcgggcactccaaatgaatgcaaccccaaccgcccaacccccttccaccactttttgatagaatagaaaccgcccttggccccaccccccccccctttgagccacccctgttaacttggcctgttattattaagtcatttgaatgcactttgtgctggccatctcgctcgcaccgcggcaccttattcagtcggtgtttgtcgcttttggctttaatgtctccattattgttgtgtatttggccgtgttttgttattgagttattaacctctctctttggcacaccgaatcgctggaaacaaacgagtttccgtctttactttccctcgctggcgtgaaagagacgggaagaggggcgcgttacagtgcggcacgcataattaggtacacttaacagcagaatgcaagccattcattaggggcgtcctcttgttattgcgctttaatgtcgggtgtgcgtatgcagtaggtaggtagccagccaaccattgtggcaaggccgccaaagggggcgggcatcggagggggtggtgtccggagtacagagtgtactgtgtacggagtacagtgtctgtctaaaaacccaaattaatgcgattacaaagtcagctgagtggcggcgctttgagtggtcgcttcatcggccaacggcacaatgctaagccactaaatggctcattgtatgccatgcattcattttgctggaaagtgagtcgagtgaataattgcagtggtcgcatcagcagtgttgtatttagtgcccatcgatgcccgcgtatcgattatttcgattggcatgtgcggataggatgattcaatgagtttaaacattggtagttttaactcttatgacagaatttattattagaatgattaactatgattgtttgtacaaatagtattatttgctcccagtttctgtcttactgccctgcgctgtgttttgtggccatcatctaatgtccaaacaccttggctccttcaaccttccccatttctcaaaattcaaccgtgttcctttggccagatccaagttaatttgataaattgcgctgccttttgcatgcattcgctgtgaatgtgagtgttggccacgccccattcggggtatataatctaaatataggaaactatagataggatcggatgggatcgggtggaaccgggtacataatggtgcgtcaggagcagggaaacgtaattaaattgtttcatttttattgtgggccggcggctgggaattgaaattgggaaaacgggaagggggagggggagctatgagttataacacgataccatatagcatatagcaaatacaggggggacactcgtttgtggcccctttggcggtgtaattgaaatatatgattatgaatatttatgcattccgtgtgtgcctctgtgcgtcggctaatttaaataattttccaacacttaattatagggtttttagtgtcggttacaaagtgttttgcgcccatgttcccaatacgttcgtattgcgttttccatttttgggtaattttcggggtcccatgtgtgtggagttcggtggttagtttttggttttcggtttttgggtttttcggttttggcaccaccaccctaattagttttaataagccaacttccatccgtccggctggcgaatattaatgactctattctcgtgtttttgaatcccatttcatttagatttccccattctccgtttgttttccctaggttttcccggcgacggcgacgacgacagcagtgcggccaagcggcgcaggtcgcgcaccaacttcaactcctggcaactggaggagctggagagggccttctccgccagccactatccggacatcttcatgcgggaggccctggccatgcggctggacctcaaggagtcgcgagttgcggtgagtttagttccgatcgattcgaatgtagttataccatatccaagaagaagaagattacccccgttctctgaaccatacatacatatttgtccttttgcgagcacctttgctgagattatacgctttgttccagataggtatggttccagaatcgacgtgccaaggtgcgtaagcgcgagcacacgaagaagggacccggccgccccgcccacaacgcccagccgcagacctgcagcggtgagcccattccgcccaacgagctcaaggccaaagagcggtaagttagccggaattgaatccagttaaatagtaactttaaacagcaatcggggcggtgataaacatgcaatttaaaagctataccaaagtctcaactacccatcgaatatctgattattaacaccaataacatattaaaattcaatcatttgcgaaattgcatattcaagttgtcataaacaatgtgatttcgtaaaatgtacggctttcaaactggctatcattttttaactccaatttagttgattaggaccgcagacgatttgatcattgttactttttgaacatttgttaagtgatattttaacatatagccattgtaaggctcaagtaattttgatcatttatcaatttgtatagtgaaatacttgtcagggccaagttttatgtatctaaatccaagatagggacaggatataccaatagcttcttgaccagaagtactacaatcaaaccaattggaagttagctaatactaaaccgaactttcctcccttttccccttctttttacatcttccagagcccgtcgtcgaaagaagctggccaaggccatcgaccggcaggcccggaaactgcaggccaagggcatcaccgtggacctggaggccctcaaggccgagtacatatcacagcacaaggcgaacggcaccttctccgattcggacctggaggacgatggcatccagatcgacgtggtgggcggcacggacagcgacgacgagggcgacagcgacgccgtcagtccggtgcgtctcggtggcggaggaggtggtggcggtggcactggaggcggcggaggtggtggagcctcctcgtcgctccactgcggactggatggcgatggcgacagttcgcgggcgggcagctttatcggcggcggcggtagcctgggcagccccagttcggtggccccaccctcgatgctctccaatggagcggtccagttcggcaagctggagccaatggatggcaatgagtccgaggagcgggacagggagcgcgactcgccaaagccgctcctctttcccgccaaggccttccatcaactgaacctgcagagcagccaacagcaccacggtctggtggtgggccagggtcagggatcgggatctggacacgggcacgggcaccagcacaaccaccatcagcaccaccttcatcatggcagtgcatccgcctcggcggcggcagcagtggccaatctggtgcaccagacatcgccgatcagcatgcgccggagcaatcccttcagcatcgagtccttgctgttcaacaacacgtgaggcaaccacgcgatggccacgatccggccgaatcccctcgagacctctttgatttccgcgttcctagaatgttttgctcaacttatttccacgtctcccactctaagtttccccatttgtatgtatcttcggttcagagcttaaatattccctaagtgatttatttattcaaatgtaatgtgtagtgcatttttttttaaattttttttttaattttttttatcgtagaccttgttccccgagagagactaaattagtgttgtaaatgaatttattatttgtactgcgtatatatactataaataatctttttttttggagtggctgctgcccaaagcaatgcttgaaatatgaataatataattatgtaatagaagtctattgactaaggacattttttttcaaagtgtgaatgcgtgtgaatgtgtgtgctgtgtgtgtgtgtgtgctatgtaagagagcctgtgtaaaaatgtaatttaatttagcaaaacaagagaaaaccaattgacgatgggaaacacaaagaattgcatagaaatccacgagttaagtaagcgaattttttttttgtgtcgaaaaaagcaggctagaatattacaaatatgagagaacccacacaatattacatatagacatgcaaagaacggcgaaatggctgctaaaaattatattgtatctaaaaactgattgtcaaacaagaataaaatgcgaatctgtaaagagagaaaaaccacataaacaacaaattacgattattatttacccattttcgtttcgagtcgagcttaaccacaataaacaaaacacacaaaataaaaactgcgcaagccccgaaaggcccctctgaaaattacccaattcccaatgaaatggaattcaataaatggcaatttaaatggcatcaaaaacacacacttaaatctgatgtttgaaaagtgttttccttgagcaatggcgtgcaaatccgagcgagtgcgccaagtggttgcaaaggatctcccaatggcacggacatcatctttatacggcccgttaatattatggacctccaacattaagaaatatatcgatggaattgatatcagcttgaaatacatcaatggaatgggattatggttaaatgcagctgctaaaagagtccatttctcatggaaagctctgaggaaattatattgttaacatgagcatactcatgtctttggtttttaaagatacatttaaatctgaagatacatattgtattcagagaattacaggtttccgatttggttcgtttaatgttaaatatctactcttttgaagtatgtaaacctttgcgaataggcaattcttttgataataggattcaaacataattgcagatctcaaatgctttacttttcaagtttcgccaggaatcgtattgaaatgtacaacagaacagtaatgatttcatcccttacttatagattcgagttacctgatcaattacagactgaccaaaaaccaaagcacttgaaattggaacaagttttcgagttgagcccattaatcaggctgcaactcaggcctcaaatcggtcggtgtgttcataaccgatttgcggttgggcagaggcatcggtttaatttttttttaggttttttttttttttcttatgagaggaagaagagagcccccatggagctgcatggttttggggctgcgagaatgagcggcaaacctgtccacgcagtcgaaggccggcgaagtgtca

SEQ ID NO: 13040 - DNA, 2053 bp, DROSOPHILA
cgctgctgccgccgcggccgccacgcaaatggccgctgtgaatgctagcaatgcgttcgccaatctaacgggactgagtgcggcggcgctgcgaaacgtgagtgccgcccaaacgacggcggtggcggccgtcgccagtacagtggccaccatccagcaccgactgatgatcggcaaccggcagagtttgccgccggcgggaccacccagcgaaggatctaatgaggatggcggttttcccggcgacggcgacgacgacagcagtgcggccaagcggcgcaggtcgcgcaccaacttcaactcctggcaactggaggagctggagagggccttctccgccagccactatccggacatcttcatgcgggaggccctggccatgcggctggacctcaaggagtcgcgagttgcggtatggttccagaatcgacgtgccaaggtgcgtaagcgcgagcacacgaagaagggacccggccgccccgcccacaacgcccagccgcagacctgcagcggtgagcccattccgcccaacgagctcaaggccaaagagcgagcccgtcgtcgaaagaagctggccaaggccatcgaccggcaggcccggaaactgcaggccaagggcatcaccgtggacctggaggccctcaaggccgagtacatatcacagcacaaggcgaacggcaccttctccgattcggacctggaggacgatggcatccagatcgacgtggtgggcggcacggacagcgacgacgagggcgacagcgacgccgtcagtccggtgcgtctcggtggcggaggaggtggtggcggtggcactggaggcggcggaggtggtggagcctcctcgtcgctccactgcggactggatggcgatggcgacagttcgcgggcgggcagctttatcggcggcggcggtagcctgggcagccccagttcggtggccccaccctcgatgctctccaatggagcggtccagttcggcaagctggagccaatggatggcaatgagtccgaggagcgggacagggagcgcgactcgccaaagccgctcctctttcccgccaaggccttccatcaactgaacctgcagagcagccaacagcaccacggtctggtggtgggccagggtcagggatcgggatctggacacgggcacgggcaccagcacaaccaccatcagcaccaccttcatcatggcagtgcatccgcctcggcggcggcagcagtggccaatctggtgcaccagacatcgccgatcagcatgcgccggagcaatcccttcagcatcgagtccttgctgttcaacaacacgtgaggcaaccacgcgatggccacgatccggccgaatcccctcgagacctctttgatttccgcgttcctagaatgttttgctcaacttatttccacgtctcccactctaagtttccccatttgtatgtatcttcggttcagagcttaaatattccctaagtgatttatttattcaaatgtaatgtgtagtgcatttttttttaaattttttttttaattttttttatcgtagaccttgttccccgagagagactaaattagtgttgtaaatgaatttattatttgtactgcgtatatatactataaataatctttttttttggagtggctgctgcccaaagcaatgcttgaaatatgaataatataattatgtaatagaagtctattgactaaggacattttttttcaaagtgtgaatgcgtgtgaatgtgtgtgctgtgtgtgtgtgtgtgctatgtaagagagcctgtgtaaaaatgtaatttaatttagcaaaacaagagaaaaccaattgacgatgggaaacacaaagaattgcatagaaatccacgagttaagtaagcgaattttttttttgtgtcgaaaaaagcaggctagaatattacaaatatgagagaacccacacaatattacatatagacatgcaaagaacggcgaaatggctgctaaaaattatattgtatctaaaaactgattgtcaaacaagaataaaatgcgaatctgtaaagagagaaaaaccaca

SEQ ID NO: 13041 - protein, 428 aa, DROSOPHILA
MAAVNASNAFANLTGLSAAALRNVSAAQTTAVAAVASTVATIQHRLMIGNRQSLPPAGPPSEGSNEDGGFPGDGDDDSSAAKRRRSRTNFNSWQLEELERAFSASHYPDIFMREALAMRLDLKESRVAVWFQNRRAKVRKREHTKKGPGRPAHNAQPQTCSGEPIPPNELKAKERARRRKKLAKAIDRQARKLQAKGITVDLEALKAEYISQHKANGTFSDSDLEDDGIQIDVVGGTDSDDEGDSDAVSPVRLGGGGGGGGGTGGGGGGGASSSLHCGLDGDGDSSRAGSFIGGGGSLGSPSSVAPPSMLSNGAVQFGKLEPMDGNESEERDRERDSPKPLLFPAKAFHQLNLQSSQQHHGLVVGQGQGSGSGHGHGHQHNHHQHHLHHGSASASAAAAVANLVHQTSPISMRRSNPFSIESLLFNNT

SEQ ID NO: 13042 - DNA, 7667 bp, DROSOPHILA
tttccgatagagtagccggcattcggatatacctggaagctttcgatgataggacagatgccacgcgcctagttatttttgccaaagtgcgtaaactaacgccatgggccattgcagttaatttggggtgcttaaataagaaaaaaatttagtaacaaatcttagttttcatttttggcgggcaattttgaaagccagttcacacggttttgatgtacatacaaattcgcgagtctggcatacagaaatgtttactgtacctctgtgccgccccacaagcgaatagcggatagaatctgcaaatctattggaacttgctccctctttaacggctcaaaatattcaatttccaagtcatcccgtacaatttcaataattctgcgaaggttttccttagtgtatcggtactttagtcgaaatttatgctcatttagatcggtcaatggattaaatcttgggttccttttctttatatgcgttgcccgcgctcgagaattgtgtttgatattcagaaaacattgaaagtctttgaaataatcaaagtcttttagagacctttgaaatctttgtatatcttccattttcacttgtttacttgcatagcagggtggctgttttgtatatattagaaaatacctcatacgtacatgcggtatttaaggctcttgcaacgattgaaattttatgatgaaactttacactttaaaaataatctttttaaatgttgttaattaaaaaaatgtaagtaagtaaattaatacttttattttttttaagcacgttatgtacttttggagttaaataatttttttttatgtatttctatacttttaaaaaaacagaacagaaagaaatcaaagctcgaagtaccaaaaaataaatactagggaaatagaacctattgcgaagatttgcaaaagcgattgttttcagttgtgaagactaatatctacacattccaaaagcttaacgatctttgaaatctggccatttggtcacactgagtccaaagcgtcgttttcaaagtactctttcagtttccattgtgaagttttaagtgatcgcgagtgccaaaaagtaacaatggctgatgatcagggacgtggacgcaggcgtccacttaacgaagatgattcctctacttcccgaggtagtggtgatgggccggtatgtaaactcttattcaagctaggaaaaaaaatcatagcggtaaagcaaattccttataattccgttatgtcgcaaacacaaacacagccatgtacatagattgtaaatgcgcgcatttcttcggaattcgacaccaaaaggaagcactaaaactaacaaacaaaaatctgctatgaatttgagcttgactgcataaaatcttcttgaatttctgttgaccaagcacttttttcaaagggaattcattaaacatatttccaaaaacgcttctttcaatttgaatttccaaggaaatgtaaagcattatctgtttcgtttcatttatttttttttaataaaaactgctaaaataaccatcacctgacaggaaggtggctgtggcaagccgaatcttatttacccttgcagtctatgtctttggaatctgcatgcccgacgttgatatggacggacatgaccaaatggacccggctagtgatactcatcaaaaatcatggtcggaaacgcttccttctatctgtcacatacatttgattcctagaaactctacgagtaacgggtatttctccgatattcatcccaattctatacaactttgagatggctttcagcattgatatactctgaaattgcaggcaaagcatactacaaaaactattttttaccattttttttctgcttcatctttgattatgagtaacaatattttcgtagcttgaccgttagttttatgatttaaaatctgtcgtactttaggtagttgtttaaatggctcacatttaggaatcacaactatttgtttaaaccccttaatattttttcttttaataataaataataaacaggtaatactttttgattgttcatcgcgattgttttcaatgtacaaagttgagtctttctggtgtttattgctgtctcgtgtttattgctgaatctcgcacgatctctctctttcttctatgttattttttccatcggcgtcaattattcataactgccgctaggtggagctagtgtgcagtcattcacttctattaggagacagcgtcctctatatctaatattataattttttttaaatgagtaacttacatcatttaatgctttcatgcagcgggtgaaagtattcagaggatcttcatcaggtgacccgagagcggatcctcgtatagaggcttcaagagagagaagagctctcgaggaagctcccaggcgtgaaggtggcccgacagagcgaaagccgtggggtgaccaatatgattacctgaatacccgtccggctgagctggtatccaagaagggaaccgatggcgtcccggtcatgctgcagacgaactttttccgattaaaaaccaagccggaatggcggatcgttcattatcacgtggagtttgagccgagcatcgagaatcctcgtgtccgtatgggagttttgtccaatcatgctaaccttctgggatcaggctatctattcgatggactgcaactgttcaccaccaggaaattcgagcaggaaatcacggtgctcagcggaaagtcgaagctggacattgaatacaagatatccataaagttcgttggattcatatcgtgtgctgagccccgctttttgcaagtcttaaatctaatattgcgccgctccatgaagggcctaaatttggaattagttggccgtaatctctttgatccccgagctaaggtaatttcttttggtatcgttttaagtgctgtttggtcaaatatgatttattttagatcgaaataagggagttcaaaatggagctatggccgggctatgagacatcgattcgtcagcacgaaaaagatattttattgggcaccgaaataactcacaaagttatgcgcaccgagacgatctacgacataatgcgacgttgctcacacaatccggctcgtcatcaggacgaagtacgggtaaatgttttggacttgattgtccttacggattacaataacagaacttatcgtatcaatgatgtcgactttggacaaactccgaaatcaacattcagttgcaagggtagagatatcagtttcgtggaatactatctcactgtaagtctaatatttaccacggatatacatcggcgtcttatttctcccaacatttgttctctttagaaatataatatacgcattcgcgaccacaatcagccgctgctgatctccaaaaatagggacaaggctctaaaaactaacgctagcgaattagtggtactaattcctgagctctgccgagtgactgggctcaatgccgagatgcgctcaaactttcagtaagactttaaactatatttaaattaacaagctcttgtgtcgcaaactatctatttcttaagttatattctgtgtatcctttctttacatgactaaaactatattaatttcgctagtccgtccgattcttgacctgtttggagtcaacgagttcatgccgatcggttcgaaaaaacttcttactgtttgcaaacctgagattacctccttatcccagtagactaatgttattacaatagaactaataactaataagactaatatgagatagaattattccccgactatcagatacccgttactcagctagtggaacggtaattttcatcatttttctgtggtatcgatagatattgaggaataaaatgagaacattttttaaaaatttaaaactaaaattttaaaagtctggtcgtgaccgttttggccgtttcgtatgtgaaatgagaggcgcggctaaagtgttttagctatacaaataaaaataggcaagacaaacaataaaacgaagaaaaatctgagcacttttcaaaagtgtgggcgtggcagtttagggcggttttatggcccataaaaaatgtaatatttaattattataaacaggcttatgcgtgccatgagcagttatacgcgaatgaaccccaaacaacgcactgatcgattgcgcgcttttaaccaccgtttacaaaacactccagaaagtgtgaaggtcttgagagactggaacatggaactggacaagaacgtcacagaagtacaaggccggataattggacagcagaacatcgtgtttcataatggaaagtgagttgagcaagttaagagcactgcaagtttatagttaataattttttcagggttcctgctggagaaaacgctgattggcaaaggcacttcagagaccaaaggatgcttaccactccgagcgatggcctcgatcgttgggctgtcatcgcgccgcaaaggaattcccatgaactccgaactctacttgactctttgtatagagcagctagtggaatgggtcttagaattcgaagcccccaggagtgagtttttataaaaaaacacgtatacctcacattacgtctttacttaattcgtaaagagaggtttcgtgcttcgttttctgggtatatatccactttaactatcgttttacaaacagattcataatttatgatgatcgcactggaacttatgtgagagcaatggatgattgtgtgcgctcagatcccaaacttatattatgcctcgtacccaatgataacgccgaaaggtatttattccctaataagtgtacaaatctaaacttaatgactatatttatcgaagacattgtttaattttggtacactaaagttaatataaatgaaagtactgaagtaaacctttttattttagatactcatcaatcaaaaagagaggatacgttgacagggcggtgccaactcaagttgtgacccttaaaacgaccaagaaccgtagccttatgagcattgccaccaaaatagcaatccaactgaattgcaagttgggatatacaccctggatgatcgaactacccttgtccggactgatgacaattggctttgacattgcgaagagcacacgagatcggaagagggcctacggagcattgattgcctcaatggatctacagcaaaactccacgtacttcagcacagtcacggagtgcagcgcctttgatgtgctcgctaacaccctttggccgatgatagcaaaggccctgcgccaatatcaacatgagcataggaagctgccatctcgaatcgtattttatcgagacggtgtgagctccggctctctaaagcagctttttgaatttgaagtcaaggacatcattgagaagttgaaaactgaatacgcccgcgtccagctaagcccaccgcaattagcttatattgtggtaaccagatccatgaacacgcgcttcttcctcaacggacaaaatcctccgcctggtactatagttgatgacgttataactctgcccgagagatacgacttttatctggtctcgcaacaagttcgtcagggtacagtgtcgccgaccagctacaatgttctttatagcagcatgggtctctcaccggagaaaatgcaaaaacttacgtacaagatgtgccacttgtactacaattggtcgggcaccacacgagtgccagcagtttgccagtacgctaagaagctagctaccctcgtgggtacgaacttgcactctattccgcaaaacgcgctcgaaaagaagttttattatctataattggatataatttagaatggagtattaatccttactaagaggccatatatgaaactagcccagacatttatactttttcaatactttcttacttttgctaagcacttcagcatttatgactaaatattttgtatttgaaatgcattactgctcttttttcaaacaaaagcaaaattgaggattaagattctggtatttaagcataagaccagaggaaattcccaaacaaacatttaaagttatctatcaagacatgttcattaatttggaatataattactttattttttattgtatattttagtttatgtaaagaaaaattacatacatccatgtttgcttacttaaccacacattcatggctgcttatattcgtgaaacatattttattaattatacaggtatttaactttcacaaggataatacaatttcatagcttgttgagtatactgaaatgctacggagttcgatatattttaatgtgtttgtatttacaaaattctaaattttcattttggataaatgttttatattaatcgtatcgattgcaagttggggtaggattgagttcagtgataatatcgattatttataatttaatatccaaacaccgactactatgatacagaagcccatatctactcagaccttgactccaaagaagcgaacaaaattagcaagtcttttaaatcgctttccttggattgtcgtctaggcttaaaatgcaaatgcgttcgttcactatagcgattaatttaacgataattactcgttggtgtatatacaattcaatgaaacttttgattttagacatattatttaggattaggtgtatattgtataaagggtggtagaaaagctttggtgcttttgtgtaatccaatttcataccacgcttggtttcgaccatcgtatggattaattctctttggaattacttcttctttttgttttttagaattatgtcaggctttaacgagttaatcagggatcaagccgatgtttcgttcggttccatccagccctcgctgtcgtcttcgctatccgaatcctcggactcggataattcgatagccacacgtctggccaagattgaagccacatccaatggcgccgcgtttcgttcaatttccttttgctctgacttttcaactttacgtagagtaatacctggaaagattaatttgatgatatttttgcattcgaaccttgaatggcaattacttaccatctcgaatggccttcatcaagtcgttgcgtgggtcatggaatggaggcagcatcttcttgggtgcgacaatgtgaggcacaccattttgttggccgggctgctgcatttcgccattggccagtgatttgggaagaatttgatgcgggcgcagcgtgtgttggttgccactgcccatgccttcctcgactggaggcggtggcggcggcggtggtggcgcggcattaggtggcgacatcttaggcgagtgctgtaaggttttgccacaaattaaaccaaattgtgatatattaacacccatcagtgaacaacaaacctgatctggaaccggcggcggtggcggcaagtcgctaagggagttcagttgattgcccgtcataccgatgctgtggaaagtattgctcagttgcgtcatgaccatatcattggcattctggacgctgttgggagatccagctcccgacgaactgttcgcccggccaagcagtttggccgccatatgcccgctgttgactccgttcatgccagacattggtgaaatgacgtctggaactggtggaggcggtggcaaggcatcccgactggtcgacatacttctgccccttgtcggagtgttggcattggaggctgtgggcgtaccaccaccgctgccattcgatggcggagccggtggcggctgc

SEQ ID NO: 13043 - DNA, 3524 bp, DROSOPHILA
ctgagtccaaagcgtcgttttcaaagtactctttcagtttccattgtgaagttttaagtgatcgcgagtgccaaaaagtaacaatggctgatgatcagggacgtggacgcaggcgtccacttaacgaagatgattcctctacttcccgaggtagtggtgatgggccgcgggtgaaagtattcagaggatcttcatcaggtgacccgagagcggatcctcgtatagaggcttcaagagagagaagagctctcgaggaagctcccaggcgtgaaggtggcccgacagagcgaaagccgtggggtgaccaatatgattacctgaatacccgtccggctgagctggtatccaagaagggaaccgatggcgtcccggtcatgctgcagacgaactttttccgattaaaaaccaagccggaatggcggatcgttcattatcacgtggagtttgagccgagcatcgagaatcctcgtgtccgtatgggagttttgtccaatcatgctaaccttctgggatcaggctatctattcgatggactgcaactgttcaccaccaggaaattcgagcaggaaatcacggtgctcagcggaaagtcgaagctggacattgaatacaagatatccataaagttcgttggattcatatcgtgtgctgagccccgctttttgcaagtcttaaatctaatattgcgccgctccatgaagggcctaaatttggaattagttggccgtaatctctttgatccccgagctaagatcgaaataagggagttcaaaatggagctatggccgggctatgagacatcgattcgtcagcacgaaaaagatattttattgggcaccgaaataactcacaaagttatgcgcaccgagacgatctacgacataatgcgacgttgctcacacaatccggctcgtcatcaggacgaagtacgggtaaatgttttggacttgattgtccttacggattacaataacagaacttatcgtatcaatgatgtcgactttggacaaactccgaaatcaacattcagttgcaagggtagagatatcagtttcgtggaatactatctcactaaatataatatacgcattcgcgaccacaatcagccgctgctgatctccaaaaatagggacaaggctctaaaaactaacgctagcgaattagtggtactaattcctgagctctgccgagtgactgggctcaatgccgagatgcgctcaaactttcagcttatgcgtgccatgagcagttatacgcgaatgaaccccaaacaacgcactgatcgattgcgcgcttttaaccaccgtttacaaaacactccagaaagtgtgaaggtcttgagagactggaacatggaactggacaagaacgtcacagaagtacaaggccggataattggacagcagaacatcgtgtttcataatggaaaggttcctgctggagaaaacgctgattggcaaaggcacttcagagaccaaaggatgcttaccactccgagcgatggcctcgatcgttgggctgtcatcgcgccgcaaaggaattcccatgaactccgaactctacttgactctttgtatagagcagctagtggaatgggtcttagaattcgaagcccccaggaattcataatttatgatgatcgcactggaacttatgtgagagcaatggatgattgtgtgcgctcagatcccaaacttatattatgcctcgtacccaatgataacgccgaaagatactcatcaatcaaaaagagaggatacgttgacagggcggtgccaactcaagttgtgacccttaaaacgaccaagaaccgtagccttatgagcattgccaccaaaatagcaatccaactgaattgcaagttgggatatacaccctggatgatcgaactacccttgtccggactgatgacaattggctttgacattgcgaagagcacacgagatcggaagagggcctacggagcattgattgcctcaatggatctacagcaaaactccacgtacttcagcacagtcacggagtgcagcgcctttgatgtgctcgctaacaccctttggccgatgatagcaaaggccctgcgccaatatcaacatgagcataggaagctgccatctcgaatcgtattttatcgagacggtgtgagctccggctctctaaagcagctttttgaatttgaagtcaaggacatcattgagaagttgaaaactgaatacgcccgcgtccagctaagcccaccgcaattagcttatattgtggtaaccagatccatgaacacgcgcttcttcctcaacggacaaaatcctccgcctggtactatagttgatgacgttataactctgcccgagagatacgacttttatctggtctcgcaacaagttcgtcagggtacagtgtcgccgaccagctacaatgttctttatagcagcatgggtctctcaccggagaaaatgcaaaaacttacgtacaagatgtgccacttgtactacaattggtcgggcaccacacgagtgccagcagtttgccagtacgctaagaagctagctaccctcgtgggtacgaacttgcactctattccgcaaaacgcgctcgaaaagaagttttattatctataattggatataatttagaatggagtattaatccttactaagaggccatatatgaaactagcccagacatttatactttttcaatactttcttacttttgctaagcacttcagcatttatgactaaatattttgtatttgaaatgcattactgctcttttttcaaacaaaagcaaaattgaggattaagattctggtatttaagcataagaccagaggaaattcccaaacaaacatttaaagttatctatcaagacatgttcattaatttggaatataattactttattttttattgtatattttagtttatgtaaagaaaaattacatacatccatgtttgcttacttaaccacacattcatggctgcttatattcgtgaaacatattttattaattatacaggtatttaactttcacaaggataatacaatttcatagcttgttgagtatactgaaatgctacggagttcgatatattttaatgtgtttgtatttacaaaattctaaattttcattttggataaatgttttatattaatcgtatcgattgcaagttggggtaggattgagttcagtgataatatcgattatttataatttaatatccaaacaccgactactatgatacagaagcccatatctactcagaccttgactccaaagaagcgaacaaaattagcaagtcttttaaatcgctttccttggattgtcgtctaggcttaaaatgcaaatgcgttcgttcactatagcgattaatttaacgataattactcgttggtgtatatacaattcaatgaaacttttgattttagacatattatttaggattaggtgtatattgtataaagggtggtagaaaagctttggtgcttttgtgtaatccaatttcataccacgcttggtttcgacc

SEQ ID NO: 13044 - protein, 843 aa, DROSOPHILA
MADDQGRGRRRPLNEDDSSTSRGSGDGPRVKVFRGSSSGDPRADPRIEASRERRALEEAPRREGGPTERKPWGDQYDYLNTRPAELVSKKGTDGVPVMLQTNFFRLKTKPEWRIVHYHVEFEPSIENPRVRMGVLSNHANLLGSGYLFDGLQLFTTRKFEQEITVLSGKSKLDIEYKISIKFVGFISCAEPRFLQVLNLILRRSMKGLNLELVGRNLFDPRAKIEIREFKMELWPGYETSIRQHEKDILLGTEITHKVMRTETIYDIMRRCSHNPARHQDEVRVNVLDLIVLTDYNNRTYRINDVDFGQTPKSTFSCKGRDISFVEYYLTKYNIRIRDHNQPLLISKNRDKALKTNASELVVLIPELCRVTGLNAEMRSNFQLMRAMSSYTRMNPKQRTDRLRAFNHRLQNTPESVKVLRDWNMELDKNVTEVQGRIIGQQNIVFHNGKVPAGENADWQRHFRDQRMLTTPSDGLDRWAVIAPQRNSHELRTLLDSLYRAASGMGLRIRSPQEFIIYDDRTGTYVRAMDDCVRSDPKLILCLVPNDNAERYSSIKKRGYVDRAVPTQVVTLKTTKNRSLMSIATKIAIQLNCKLGYTPWMIELPLSGLMTIGFDIAKSTRDRKRAYGALIASMDLQQNSTYFSTVTECSAFDVLANTLWPMIAKALRQYQHEHRKLPSRIVFYRDGVSSGSLKQLFEFEVKDIIEKLKTEYARVQLSPPQLAYIVVTRSMNTRFFLNGQNPPPGTIVDDVITLPERYDFYLVSQQVRQGTVSPTSYNVLYSSMGLSPEKMQKLTYKMCHLYYNWSGTTRVPAVCQYAKKLATLVGTNLHSIPQNALEKKFYYL

SEQ ID NO: 13045 - DNA, 5438 bp, DROSOPHILA
actttttcggtgtagtctgcagaatgcaacttttcccaagttgttcccagccgaatcaaagcggctgccgccgttgtcgagtgagcttttccttagatccggcttcgaatgctgctcgccgctgcatcggcaaacaattttctctcgaagaaaaaccgttggaaaacccagccaggctgaaaagcgacgcttgtgcgacttcttggacgcagtgcagccacattcagagccagagcaagacaagaaatcgaacgcagccgaagtcaagaaacgttgcgagaaatacgaagagccgaaatgcaaaatccgaagacgaagagttggcccgaagacggggccatcgggaaaagtgaacgagtagaaattacggtaaataaataaagaaagacggctaagagaaataagaaaacgcgaacggcgtcgtcatgagcgaaagtgaaatctgctaatgaattcttcaacgttgaatagttttcagtcattatggacatcgttgtacatatgtacgtacaaacacagtgccgttgtacgtggcgtatacttgatacttgatggttacccgactgtgcgtgtgcatgtgtgtgtgtgtgtaccatgtaaccgggcagaggcagccattcctgcatttcagcgatcacttgacggacctgcgcatctgcaactggaaacggagatgggaatggttgcacttagaaaaaaatttctatgatatcatttgaagcttgttatcagcaaaaagccagacgaaattattttttttaaatttcatgaggttttgacatgatgctaacgtcatgtgagagcttttgggtattgagtctattaatatcttttaacaacatctacccgattttcttactgtgtagaagcgcagagctgctaccttggttttggctctaacttgagatgcagttacgattttgggctgtggtacgcggtttccgtgggtaaaagttactagattcgttatagcaattaaccacaaggcttagagccgtaaatggccgagcaggcatcgatgccgatccgcagccagatgattgcagtgattatccgattccgactgccagtcggactcccgacattcgggttcattgaaacctgcagtgcagttttctataattcaccacttcggccaccgttatggccagaggtctttatcgatggagtgcggcttaaacttgaaatgcatttggcaggtggaaagtggccgccagccagatcaatgcccctcgatttatctccttattttcgcagtgcttaactatctgtaattcttgcccaaaaacaccaagcgaactgtaactgatttgcatggtttcctttctttatttgcaggggaggcggaaaaagtcaaatcattgatcagattgcgggcggaattgtcgcctttgttcacaggcaaacgaaatgcttccaaatatgcctgggcgtaagtgatcagcaatcccattgcatagctcttatttattcttgacttctactcctcagcgtggtggaacgggagctcaatgtgccgcttccactgtcgaagatcatcaagaagtggaacaatctgttgcaggagtacaaggccatcaagatgtccgaggagcccaagcgacgcgagtggcccttcttcaccctgatggacgtgtacttcagcgaccaggttaacgatccctcactacgtctcttctcgtccacaaagacgctcaaggagaccctggacgacagcgtcttcgaggatgatccaattatcgcctcggccattgcggcggccaccagtggcgcctacatggacattgatgagctcatccggcgacagaaggagcgtgccgctctggccgccgagcggaaattggctgccgctgccagcggaggcactggtgactacaaattcgatctgaagcccatgctatcgaacagcaagtttaacagcaacagcgagatggccaagctatcaaagagcgtcgatgacctctctatgcagcagtacaagatcaagcaagagctaatgcgccagcgggaacaggagcagcaggagaacatggtcaagatcaagcagcacgtacgccagcagcagcagcagcaacaccagcagcagcagcagcaacaacaccaccaggcccagcagcagcagcagcagcgatttctgggccaccagcaggccatgtcgcagcatccacaccgtctgtcgtcctcgtcgacgccaccagctttgcagcacgccctgcagcagcagcaacagcacatgctgcagcagcaccagttgcagcaacagctgcagcatcagcagcagcagcaacaccaacagcaattgcagcagcagcagcaacagcaccaccaactcgctcatccccaccagccgcacacaccgcgccccagtacgccacccaccacggcgcagcagatccacatcacggccacccagcaccaggccgcccagcagcagctccatcagcagcagcagcagccgtcgcacaagcagcagcaatcctacgccgatcccaacaccatcgatcagtacctgctgtcgtggaacaacttccatggcaacatgtgccgcggcttccactccctgcagaaggatgagaagatggtggatgtcaccatcgcagccggcggcaagatattcaaggcacacaaactggtaaactagcggctcagcgccaggaactcccgtactcatgcatcgcaccctcttttcgttttgtccttttcattgcaggtcctgtccgtttgcagtccctacttccaacagatctttctggagaacccatcgagtcaccccatcctgctgatggccgacgtggaggccagtcacatggccggtctgctcgactttatgtacagtggacaggtgaatgtcaagtatgaggatctgcccgttttcctgaaggttgccgaggccatgaaaatcaaggggctgcacacagaggtgggtttactgtagattaaacgactaaaataccgaaatataaagcaattttgctgttgaaattgaaagttacagcttattacgaatatttttctaagtacaacaaccttttactttcacttgcagaagaacctggacagcgatgccagcgacataagttcgccgcacgaaagcgacggcaccgagtgccgttacgagcgtggaacgcacagcgtgaacatcaccagcggtcatgccgccggctatggaggagcaccgtcctcgcagcagtcatcgccgtcgccttcgctcaatggacccaatcgctgtcccacgcccctttctagcggaggttccggcaatcccaattacgccggcttccgtgagcacatcaagtcgaaggccacgctggccgagaccttcatgaagaatctcaacaggaacaacaacaacaacaacagcagcaacaactacaaccacttgggcggcagcaatggcagtctcaacctgacggaggcggatagcaactcctttgccatcctgcaggcgaacagcaagaagatgctggattcggcgcgcaagcaacacaagtatctggccaagcgaaagatcctgatgcactacaacacggagctgggtggtgagaagcggctaaaggagatggagcgcgatcgctatccgagtgccgagcagcatgacgacgccttgaacaacaatcacagccacgcccaggacaacattatggagcccataattacgaccattgtgccacagacgccgccaccatccacgcacaacaacaacttcaagatccgcctggtggagagccatcacctgaccaacaatagcaacaacaaccagaaccagagcagcaacaacaacaacagcagcagcagtccgcaatccaacgactgcaacaacgatgaggaggcactgaatctggtccagatacccaatgccaacgggagcaggaacagggaggccacgcccacatgtgcgactcccacgcccgacattcagctgatcaagcgggaagtgaagacggaactgtcgccggcagagaacctgagtaacaacaatggacacgacgacgagatggctggagcaggatttgatcgcaagtacgatgataacaacaacaacagcggattggacatggaaacggactcgaacaacaacaacagcaagccgggaggcgacaacaacaatgggctagcattggcgctgggcaagcacaagctgctgagcgcgatcaataggaacatagagcaggatcacccagatcatgagcatcaggatcaacaggatcgggaggccgatcacggcgggaacaactgcaacagcgacgacaacaacaacaacaatcacagccagcacctggacctgagcaccatcaagaacatagccacggcggagatcctttgcggactgaagagcaaggtgctcaagctggaggaggagcagcgcgaacgggagcgcgaaagggagcgagaacgggaagcctgtcgcagtcttagcgagatcaagaatgcggagtgattcccccgatcgatcgtgggtggaacccacccactgcccagacaattatgcatttgattacacacagcatggagcggaatcagccgattctatgtttgctaattatagttatttattataccacttaatatcgttaatgtaattgtaatgacctgaccccacatgaacacattggttagtttggtaggcctagcattcgcccagcacaccatttagaatccctcctagcagctaagactcacgaatcattaaagtatcgtatcgtattgtatcgtatcgtatcagatcagctgatcaccgatcggtttacaaacttaatattagcactttggaaattggccctgttgcaatacgaattaagcccatgttaaacatattgatatcgtttaataatgtatgtgtagagcagtatgttgtagattaatacgccccccagtcgcactttcgacttcgattttcagctcttacattatttatatacacaccacatatcgtactacgaatgtatctcaacatcaatcacgcatgcatatgaacaccccccccccccccatacatacatattgccccacataccgacgagtatagtaacgacattggccccgaccatatgtaatcatataaaactggaacgggccatcatctgcaaaggatcaaaaagaaaggaacaatatatgtatctcgtttttagttttaacttgccagaccttttcaatgagcactcagataacttggttacatgcgatcgtattcagctcggcgctcaactttcacccagaagtggttccggatcttgttaattgttgtacatgcccatgtgcctggaacccagccccaagtccccaaaatgaattaaacgcacgactctggggtccatgagcccctctctcaactgcagatcaaacagaattagcaatgcacagtgtaactcgtacaatatttattcagctcctttacattaaaaacaaaacttgtgtaatgttttcgctgttgaacattt

SEQ ID NO: 13046 - DNA, 2832 bp, DROSOPHILA
atggccgagcaggcatcgatgccgatccgcagccagatgattgcagtgattatccgattccgactgccagtcggactcccgacattcggcgtggtggaacgggagctcaatgtgccgcttccactgtcgaagatcatcaagaagtggaacaatctgttgcaggagtacaaggccatcaagatgtccgaggagcccaagcgacgcgagtggcccttcttcaccctgatggacgtgtacttcagcgaccaggttaacgatccctcactacgtctcttctcgtccacaaagacgctcaaggagaccctggacgacagcgtcttcgaggatgatccaattatcgcctcggccattgcggcggccaccagtggcgcctacatggacattgatgagctcatccggcgacagaaggagcgtgccgctctggccgccgagcggaaattggctgccgctgccagcggaggcactggtgactacaaattcgatctgaagcccatgctatcgaacagcaagtttaacagcaacagcgagatggccaagctatcaaagagcgtcgatgacctctctatgcagcagtacaagatcaagcaagagctaatgcgccagcgggaacaggagcagcaggagaacatggtcaagatcaagcagcacgtacgccagcagcagcagcagcaacaccagcagcagcagcagcaacaacaccaccaggcccagcagcagcagcagcagcgatttctgggccaccagcaggccatgtcgcagcatccacaccgtctgtcgtcctcgtcgacgccaccagctttgcagcacgccctgcagcagcagcaacagcacatgctgcagcagcaccagttgcagcaacagctgcagcatcagcagcagcagcaacaccaacagcaattgcagcagcagcagcaacagcaccaccaactcgctcatccccaccagccgcacacaccgcgccccagtacgccacccaccacggcgcagcagatccacatcacggccacccagcaccaggccgcccagcagcagctccatcagcagcagcagcagccgtcgcacaagcagcagcaatcctacgccgatcccaacaccatcgatcagtacctgctgtcgtggaacaacttccatggcaacatgtgccgcggcttccactccctgcagaaggatgagaagatggtggatgtcaccatcgcagccggcggcaagatattcaaggcacacaaactggtcctgtccgtttgcagtccctacttccaacagatctttctggagaacccatcgagtcaccccatcctgctgatggccgacgtggaggccagtcacatggccggtctgctcgactttatgtacagtggacaggtgaatgtcaagtatgaggatctgcccgttttcctgaaggttgccgaggccatgaaaatcaaggggctgcacacagagaagaacctggacagcgatgccagcgacataagttcgccgcacgaaagcgacggcaccgagtgccgttacgagcgtggaacgcacagcgtgaacatcaccagcggtcatgccgccggctatggaggagcaccgtcctcgcagcagtcatcgccgtcgccttcgctcaatggacccaatcgctgtcccacgcccctttctagcggaggttccggcaatcccaattacgccggcttccgtgagcacatcaagtcgaaggccacgctggccgagaccttcatgaagaatctcaacaggaacaacaacaacaacaacagcagcaacaactacaaccacttgggcggcagcaatggcagtctcaacctgacggaggcggatagcaactcctttgccatcctgcaggcgaacagcaagaagatgctggattcggcgcgcaagcaacacaagtatctggccaagcgaaagatcctgatgcactacaacacggagctgggtggtgagaagcggctaaaggagatggagcgcgatcgctatccgagtgccgagcagcatgacgacgccttgaacaacaatcacagccacgcccaggacaacattatggagcccataattacgaccattgtgccacagacgccgccaccatccacgcacaacaacaacttcaagatccgcctggtggagagccatcacctgaccaacaatagcaacaacaaccagaaccagagcagcaacaacaacaacagcagcagcagtccgcaatccaacgactgcaacaacgatgaggaggcactgaatctggtccagatacccaatgccaacgggagcaggaacagggaggccacgcccacatgtgcgactcccacgcccgacattcagctgatcaagcgggaagtgaagacggaactgtcgccggcagagaacctgagtaacaacaatggacacgacgacgagatggctggagcaggatttgatcgcaagtacgatgataacaacaacaacagcggattggacatggaaacggactcgaacaacaacaacagcaagccgggaggcgacaacaacaatgggctagcattggcgctgggcaagcacaagctgctgagcgcgatcaataggaacatagagcaggatcacccagatcatgagcatcaggatcaacaggatcgggaggccgatcacggcgggaacaactgcaacagcgacgacaacaacaacaacaatcacagccagcacctggacctgagcaccatcaagaacatagccacggcggagatcctttgcggactgaagagcaaggtgctcaagctggaggaggagcagcgcgaacgggagcgcgaaagggagcgagaacgggaagcctgtcgcagtcttagcgagatcaagaatgcggagtga

SEQ ID NO: 13047 - protein, 943 aa, DROSOPHILA
MAEQASMPIRSQMIAVIIRFRLPVGLPTFGVVERELNVPLPLSKIIKKWNNLLQEYKAIKMSEEPKRREWPFFTLMDVYFSDQVNDPSLRLFSSTKTLKETLDDSVFEDDPIIASAIAAATSGAYMDIDELIRRQKERAALAAERKLAAAASGGTGDYKFDLKPMLSNSKFNSNSEMAKLSKSVDDLSMQQYKIKQELMRQREQEQQENMVKIKQHVRQQQQQQHQQQQQQQHHQAQQQQQQRFLGHQQAMSQHPHRLSSSSTPPALQHALQQQQQHMLQQHQLQQQLQHQQQQQHQQQLQQQQQQHHQLAHPHQPHTPRPSTPPTTAQQIHITATQHQAAQQQLHQQQQQPSHKQQQSYADPNTIDQYLLSWNNFHGNMCRGFHSLQKDEKMVDVTIAAGGKIFKAHKLVLSVCSPYFQQIFLENPSSHPILLMADVEASHMAGLLDFMYSGQVNVKYEDLPVFLKVAEAMKIKGLHTEKNLDSDASDISSPHESDGTECRYERGTHSVNITSGHAAGYGGAPSSQQSSPSPSLNGPNRCPTPLSSGGSGNPNYAGFREHIKSKATLAETFMKNLNRNNNNNNSSNNYNHLGGSNGSLNLTEADSNSFAILQANSKKMLDSARKQHKYLAKRKILMHYNTELGGEKRLKEMERDRYPSAEQHDDALNNNHSHAQDNIMEPIITTIVPQTPPPSTHNNNFKIRLVESHHLTNNSNNNQNQSSNNNNSSSSPQSNDCNNDEEALNLVQIPNANGSRNREATPTCATPTPDIQLIKREVKTELSPAENLSNNNGHDDEMAGAGFDRKYDDNNNNSGLDMETDSNNNNSKPGGDNNNGLALALGKHKLLSAINRNIEQDHPDHEHQDQQDREADHGGNNCNSDDNNNNNHSQHLDLSTIKNIATAEILCGLKSKVLKLEEEQREREREREREREACRSLSEIKNAE

SEQ ID NO: 13048 - DNA, 9848 bp, DROSOPHILA
taagttctcgaatattttatttaaaattgtgttgtacttcagttttagtctgataataagacatacaatttaataaaacaacaaaccagttttcatgccacttaaaatgaaaaccaagaaaacacatttaaaaacaagcccaacaaaaaaattgggtacaaagtaaaagagataaacaattttaataaaaataacactttaattatgtatttcgtctttttattaggcgggctaaatattaactaaataaaaacaagattgaacgctacagtctggatcctcgaattgcagataaacgatactctggtagtagaagttcccgccagaaatcactattttttacgaatactccaaccataaataaaataaaactaaaattttggatttattgtatgtttatttatttgaaatatcagtttgtatgctgcggttctctataatttatttcaattatccataatgatttagtattatctgaaccttctttgttggtattatggtgttaaatacagatcttgagcatcgttaatattgcttaacttttccgttttcatgttagatgccttgctaaatgtgcatttttatttcatacaaactacgtaatttccgtacgttatgaagatgctgagttgattgtatctttgtttgaagagtagatgcgtttacttattttggttttgattttagatgctgatgtagttttatgctataaatatttagctacgttcaattctgcttaatatttagagaacattaaattttgaagattttatttcctaaatattccaatgatttgctacaaatccaacagatgaacgtatgaggtttaattcttagcctaaaactttattattaatgtatatgtgtttcaactccatgaaattccgctcgtaactacttactaagaaatgttaaaataaatattttacgttaatgtgtaaatttaaatacaatatatatttattgcaaattgctttgtaaatttaatataattttgtccttatgttgatttttgtagatttaatttatttaaacgttgtgaaggggtacaaagtgtgacgttcaggctacgcttaactaacaacaaaattcacatataacaacaataaaatgaaaatgttacaaaaaatatatatccttcaattagtttatggtgtatggtaaaaatacaatgtaaatatagagactttttgtttcgttcgtgtgtactattcatttaacattttgtgctgcttcaacggtttcccatataaataagttcccctgacacaaggagggaaaaatcaaaaattatttcgatgcaggtaagttggattcgacaaaattcgtttcaagtgtgggtgattttaaaggtttcgaactcacagcatggtcaacaatcacacgaacttatctatatatccttgcagttcttacaatcaataattatatctgcaagggtacacaaacatctgtttaagatagacgtacgatcatattgaccattatactgtttggggatcgtttgaggagtaaatatacagaatgctgtttgtcaacagaatggccaacacttacatataatttcctaacgttttgcttttgctcctagcttatgctcaaataaatagatcataaataaattaaattacaattttgtaaatacataaaatatttggcatttaatttcgcgaagctctacaaattgaatggtattcgattttagcacaacattttgcacaaggttcagaagtgatttgaaaatatattttcggctgggtctttggatggcaatgcgttttaaccagaacaaaaatctgtcaatcattctcattcttgtggaatgctataatcatatgttacatcatacgtctatatgatttcatatctctttcttttggcattgtgttagcatacaaaaatggcaacatcaaaaaaaaaaagtaatcgattcaaaagtcttatgggaggaaacaaatcgtaagagaaatgtacatgatttcttttttacattttcccatttgtttttggcatttaacattatacttttgtgcttatgctttgatctatatatttaatatatagtatgtatctatgaattcaaaattgtttcgctaggctaagtattatggagctgcttatgttgttcgtacatatatgaagtttactgtctgtgttttttgtggtagaaatattctgttaaaaaagagttttatgtttttgctctcctggcatatcaagttcatatataaagtcgcttctgaggctcctgtggattgtgctttaaaaacgttttacaaattccaaatggttgcctcatctctaatacaattgctcatctgtctcgtgttgttttcgcttgtcttgttgttaaaagtactacaaaagtgtgttgtttctgtcgtcagtagtgttgttaaagtattgaccagggaacatcgtacattatctcgctagccttcgctgctaaatgcttttccccattcgcacgtcttcagtgataacgctcgctatgcatccgtttcgatttggtttgttagtacttctcatcgtccgtaatttccctatgggaattctgtaattctcaggccttgtagtgctgattcctcaccgcgcagcagaggctcagggcgaaagtcagggacagcagctccagcagaatgacagcggcggtgacggcgaaaatggtgacccagttctcgtagatgatttcaatcagcttgtccacgcagccctgcaagagacgtttaatatgaaactcattaatcggtttgtgtaaaagtcagctcgattttcattcagtttgtttacagctcgcaatctctggatctactacccaaccagactggcagacagaagtttgagatgcgtgttgaatatcaatattaattaatacgtttttatcgtctcagcattggcgggcgtgaatgtttattaacccaatgctttcagaccgcagaaaaaaaggattattagtttttatggccaggcggcgatagcgatcggtaggccaagaaattatgattcgggcacacctatcaattgagttttgatgattttttggaaattcactgaatcgaaaaacgatcttttctggtaaaattcatatgactcacggaatcgaaaaactctttggttggtcattggcattacctgctgataaatggcgttgttcaatgggccaccaaatttcaggcgtctggacagctcacactcattatcctttagattatccttgcagcaggactcgggtatgttatagaagacattcatggaagacacggcgatctccacaatatttgtgcgatccacattattaaaccgactcgtggcccaatctccaggtccatcggcgccgcagcatttcaactgaaacagatcaggaaagttcgcataaatcgtttttccgacgacgtggtgggtatgtccaagtacttacattcttttgcagcgtatcaaaggtgacggtgcgcgaactcatcgtggactggccgtactcctcctggactgacgacttgacagccgcccgcacgatgtcatccagcttgtctttgttgtggaaggcccatgctccggctgcaatttgtgccaccatcacgatgagtatgacacagaagaactgcaagagaatttcagatttatgaatgacggagtccggcccgtgggcgttgagtaaataaactggttgcgatttaagacagatatgtttgcactcgcaataaggaactccaattaagtgcaacttttgttttctttacatcatttatatgtataagatatactttctgttatatatatttaataagtactttaaatggcaatactattggataaattttctgtattcacagtccaatttagttaggtataaaattattttggcaagtgcatcgttttgccaaactgccaagacattgtgggcgaacctccgttgcaatcatatgagcggaaccgtgtgggccacacatttgcatgcattttaattggaattcccagacactggttatgatattacttttcacttaccgaaaccagcagacattgcgactcacgacagactccgcaacagccaaagaatgcgcccaatgtgatcagtatgccgatggcgaggaaaacatacagggctatgtgataatgattgtagttctgtgtcatcgacagcataaatgtgggatccgtcagcatccaaacggaggtcaccacgatggtcagtccgatgagctgcaagcgaaaagaatacaaaatatagtagagcattacctatttttacacattttcgctgtaattctcaaattgttgcatccatctcacgctgggcacacgcgtcaatgacgccatctggcggcaaggcggcaattaaagtgggagactgccccgcccagtttcgccttgctttaaacttctatagtttcatacatatgatgtcagcttagttggacgcagactatatacatagcaactgctgttgcgcttcttttaatttaattaaaggcagtaaacagaaaccaagtacaaattacaattttccccattccattcaatttgttaaaaaaaaaatcagtaattctatccagtatacagattcaaaggcagctttttgagctccgaactttcaaaacccgataagaaaaggcccattaagtttgaaaatcaatgatgcgataaaatttggtttaaagttaaattttggccttcatcgccaagacatactgtatgtatatacatatagaagtggcaagacattgatcccaagcgagaatatgagaattgcgagctcgtgttatctcacttctcgggttatcagcaaacgaaatatgaacttttctttggatttccgctaaaagaattccggtaatgtatttcttcttaaattttcctacccagatattaaacactaaacttgctattgccaatccatccaccagaaaaatgttgttccgctcgtgcaatgagtaagagaatctaatatagaggtaatgacttaatgggttggtcgaggtgtctatgcaagttcattaattattcagcaaaattattcatcgcagggaaattgagtgtgcgatgagagctaatcaagagatgtaaacaagtgcacatattacatgggaaatatgtaaatttagaaccacttaagaaccgatggctaactgagaagcatttccaaatacaaaacacttcttatctcgtattttttctcagcccgcaagcttttgtaattgccaagagcatcagtgctttccgataagattacgcagtggatctcgcaataagcaaatatctatttaacttaaagatacagcaaaatataagatacagtttttggcgcccaggaaaaacggatgaaaaagcatgaggaagtctcgtaaatttcatgaaaatcttatgaaatataagagaagcggagaccggcttttatgtgggtggtccacgaaagagagagctgccataaagtgagcgagacaaaaagtgtgccacaaagtgcacgatatgctggccctaaagttcatgaatgtgcatgtgtgcagctaacggaaaaactactcatggaaacgtaatacaatgttgccccattcgagggcagtttattgagtaagtacattgtaaccagaagcccttgtttgcatagattttacttatttttccaggtcaggttttcgggtatggatcagtaacataatcttgaatttgttcatgtgttgaattaaaaaaaaaaatgtttctgaagaagaggtttattcctagagctcttataaagtatgtgtatgtatatactactttggataaacctcaattcccttatccttttagggaacaaaagttgacctcgttttgaatcagtcccattatccctgaacgaactgaatccacgccttgtttgtagctctgtttgttggaatttttacgattccccgaacgttttcacacacatatatttttacacatctgacactatgtcgcgtgtccaggacaaacaaacaaaaatcctgccgaatgggccaataaatgtacagagtccttcgttgacccagttttcagagccgaggcgtcgaaagcggaaaacgagagagcattttactgctgctaaattgcaaaaaaaaaaataaaatggggccaaaaggcagctgggcttgcattgcatgtccagtcacagttttgtcccacaattaaccgcatcgatggcaaatcgcagccaacagccatcatgcatcagccataagctgaaaatacaaactgaaaaatgaatgaagcgccactcatgaataattgagtgaaaaatagcacagcgaattaagtatgtagatgtgacatgtcacagcgaattgaaaatagatacaggccagcttcgttacttggagaaatatttttaaatattattttattcacagcaaaagattacatttttttcaggaatttaagaattctgcactatggaagtctgactgtgctgaaataaatggtttttttagtgggtggacaggataggattgtcagatggtcgaccgaatatttggaaatctttcagttttggtcactgtcaacttcaatgacgacagcgccggccgtttagcattttagacgcttatggcataggcctcccccagcatcttggatgtgggatatcggccccattggagcgtcagcgtcctcagagatcgtggcgtttgatcacgatgccccacggcgacgatgaaaatggaaatgtttggaaatcgatgcacagtggagagcgagattcaaaactaatcggacagtggtcattttttgcgaagttatataaaaatactattattaaatttattatggctttgtggggtaattgataacatgccctggctaagaatagcctcaaaacaatgtataaaaagtcttatataaaataatatctgacgcactttcatccataaatcgctctaaaaatagttcaaacgattagtgaaacgaactgcatcacaaacacatcacaatttctatcgctcattgttcctccactgaaatcaaacacaccactgtgcatccaacaacaacaacgatgaatactaaaacatcacagatcaaggaacattacacagaaaccaattattggatataatcttattgggatcggttaattttaattttttttacatgacatatatacaataaacgaaaaataattgaaaggtattcgaaagtttccaaacacgaaacttggctaggcatcagtattttctttctgtgtacaacaacgaaaaactgaacggacgcgtaagtttgtgttgttcctcgcccgtattcgaaaatagcttttgactaataaatactatagacagaaatcgaaaaaaggcagcaacaatcaacaaacgaacgaaaaaaaaattagaaatcagcccgcataagaatcaaaattttaaatttgttgcccaaaggaaaagcgaaactgatttcgcaagccgcggaagacaagaggaaaccccaagaaaaactcaaggaaactcaaaacaaacgcaaacaatcgctgtggcagatagtaattgaatggaaacaattgaaagcctaacgaggctatgttgaaagtcgaaaattgcgtaaaacaacaagcagataagttggccaaagaaagtaaaacccttttttttggggtgaggagaggtccttttttaccgaattaagccaaccgaagtttgtaaaaatatcaacggcacgtatacgttataaaaataataaaacaaaaaaagagagacaggaagagacagaagcaaaagaaaaacaactgaacaaacatgtggagggaaaagaaaacagtgggaggtgggaatggagatgcttaaatgtttatctgtctgtgtgtgtgtgtgtcccctcccacaacggaacttctattgtttttatgcgggagtacgagcagagcggtagggagtgcgagcgggagatggagagatacagtgatgtcgcttttaaaagccagttgaagttttgaagttataaatggtagaaaataatttaaagtcaaatagttcataacaaacaaaaccgatttgtttaatttcaaaaagaaaaacccttctattaatgtttttaattaaccgcgtacttgaatatttatataatcttgtccatttaatgtttttaagcccgctcattaaaaaaaaaatatttaagttaatatattattatatttattttattatttatttatttatattttttacttccttttcgattaaatatttcaagccgtacttaaataagtttcaacttatgttttgggcacctctgggatcgagagagtggaaagagggactgaaagagcggtaggactccaaagagcgtgcgcacggctcctccctccgcccgcgcgccaagcgtgagaaagaggggcgtagggaatacacaacacacacacattcgctcacgcaacacccacacacacgcgcgcgaaaaggaggtccgtgtgttccagttgttgttgtgatgggagagaaccgaatctcgcattgttgttgttgctgctgctgctggaatctacatacccagaataaaatgtttataaggaccatcagatatttgacgcacgaacagcagccgttgagacccatggcgcggattgatattcttaaataggtaactccttaaaaagtagctgcaatttaactggtttttcaaccacttggagatgctctttttccaaggaaccccgaactgcagtgtcgcctgcacttttcgaccttttgcactttttcaaaacacccgctcgattgtactatatttttcaaatttttttaaaatttcccgtgctaaaatccaccgatttgagccactgtttgcgcgattggccgttgcacccgatttgttttaaaaattttatttgtgcatcgaggcgtccgtccaacgtaaaattcttgtatcagtgcgaccattagctcggccgttcaaatataccagcgggtatagaaaggctaaaaaccgaaaagtggtgacccttagaagataccaaagaagtggttgaataactttgatgaggcttagcatggcttgcaacctgcttggatttgcagcctatacgcaaaccaaagtggcctatcgatattttggataagttctattgccaattttcccaataaaataaaaacttcacttgaatgttaaaagtaatttagtttcagtgtttacataatgttcaaataaccttttgattgttattatgaaagttaaaaattaaaaatttagatattctaactaactattatccccaatgtttcagctataatcaccatatttaaagtagatttcattttaaagtataaatttgtggttgtttacattattttaacatgtctatttaattattactatgaaagtgggtaattgaaaattaggatattccaggtttttgatttactttggctatgattttcccaaaatatttaaatctgtaaatgtaaacagtttgaaatgtgaccttaatagttcatgctttgttcattcttctgcgaaacggtcacactgttcgcgcaggcgaaaatggcctaaagcgtgaaatgtttaattcgttgttgtttctcctccgcaatagttactaatagaaacaaatgcaaaatggctgtctaacgtttaagtgcagcgaccgccgaagatcgtggaaatatgcatgaaaagcggctcgcaggcaaatgaaaggcgcgtgaaaatgtagcagacacctttttatcgcgaaaacgaacatcggtgcaaagggaaaaacaaaaaccaaggaaaatacagccaaacgcgaatgtgaatgtgaaggcaaagtaagcgaaaagtcccccaacttttttggggagtatcgagtgcaccacatacgtttttcaatatatatttcgattgcattgaaatcagaaacatgacaa

SEQ ID NO: 13049 - DNA, 2663 bp, DROSOPHILA
ttggacggacgcctcgatgcacaaataaaatttttaaaacaaatcgggtgcaacggccaatcgcgcaaacagtggctcaaatcggtggattttagcacgggaaattttaaaaaaatttgaaaaatatagtacaatcgagcgggtgttttgaaaaagtgcaaaaggtcgaaaagtgcaggcgacactgcagttcggggttccttggaaaaagagcatctccaagtggttgaaaaaccagttaaattgcagctactttttaaggagttacctatttaagaatatcaatccgcgccatgggtctcaacggctgctgttcgtgcgtcaaatatctgatggtccttataaacattttattctggctcatcggactgaccatcgtggtgacctccgtttggatgctgacggatcccacatttatgctgtcgatgacacagaactacaatcattatcacatagccctgtatgttttcctcgccatcggcatactgatcacattgggcgcattctttggctgttgcggagtctgtcgtgagtcgcaatgtctgctggtttcgttcttctgtgtcatactcatcgtgatggtggcacaaattgcagccggagcatgggccttccacaacaaagacaagctggatgacatcgtgcgggcggctgtcaagtcgtcagtccaggaggagtacggccagtccacgatgagttcgcgcaccgtcacctttgatacgctgcaaaagaatttgaaatgctgcggcgccgatggacctggagattgggccacgagtcggtttaataatgtggatcgcacaaatattgtggagatcgccgtgtcttccatgaatgtcttctataacatacccgagtcctgctgcaaggataatctaaaggataatgagtgtgagctgtccagacgcctgaaatttggtggcccattgaacaacgccatttatcagcagggctgcgtggacaagctgattgaaatcatctacgagaactgggtcaccattttcgccgtcaccgccgctgtcattctgctggagctgctgtccctgactttcgccctgagcctctgctgcgcggtgaggaatcagcactacaaggcctgagaattacagaattcccatagggaaattacggacgatgagaagtactaacaaaccaaatcgaaacggatgcatagcgagcgttatcactgaagacgtgcgaatggggaaaagcatttagcagcgaaggctagcgagataatgtacgatgttccctggtcaatactttaacaacactactgacgacagaaacaacacacttttgtagtacttttaacaacaagacaagcgaaaacaacacgagacagatgagcaattgtattagagatgaggcaaccatttggaatttgtaaaacgtttttaaagcacaatccacaggagcctcagaagcgactttatatatgaacttgatatgccaggagagcaaaaacataaaactcttttttaacagaatatttctaccacaaaaaacacagacagtaaacttcatatatgtacgaacaacataagcagctccataatacttagcctagcgaaacaattttgaattcatagatacatactatatattaaatatatagatcaaagcataagcacaaaagtataatgttaaatgccaaaaacaaatgggaaaatgtaaaaaagaaatcatgtacatttctcttacgatttgtttcctcccataagacttttgaatcgattactttttttttttgatgttgccatttttgtatgctaacacaatgccaaaagaaagagatatgaaatcatatagacgtatgatgtaacatatgattatagcattccacaagaatgagaatgattgacagatttttgttctggttaaaacgcattgccatccaaagacccagccgaaaatatattttcaaatcacttctgaaccttgtgcaaaatgttgtgctaaaatcgaataccattcaatttgtagagcttcgcgaaattaaatgccaaatattttatgtatttacaaaattgtaatttaatttatttatgatctatttatttgagcataagctaggagcaaaagcaaaacgttaggaaattatatgtaagtgttggccattctgttgacaaacagcattctgtatatttactcctcaaacgatccccaaacagtataatggtcaatatgatcgtacgtctatcttaaacagatgtttgtgtacccttgcagatataattattgattgtaagaactgcaaggatatatagataagttcgtgtgattgttgaccatgctgtgagttcgaaacctttaaaatcacccacacttgaaacgaattttgtcgaatccaacttacctgcatcgaaataatttttgatttttccctccttgtgtcaggggaacttatttatatgggaaaccgttgaagcagcacaaaatgttaaatgaatagtacacacgaacgaaacaaaaagtctctatatttacattgtatttttaccatacaccataaactaattgaaggatatatattttttgtaacattttcattttattgttgttatatgtgaattttgttgttagttaagcgtagcctgaacgtcacactttgtaccccttcacaacgtttaaataaattaaatctacaaaaatcaacataa

SEQ ID NO: 13050 - protein, 268 aa, DROSOPHILA
MGLNGCCSCVKYLMVLINILFWLIGLTIVVTSVWMLTDPTFMLSMTQNYNHYHIALYVFLAIGILITLGAFFGCCGVCRESQCLLVSFFCVILIVMVAQIAAGAWAFHNKDKLDDIVRAAVKSSVQEEYGQSTMSSRTVTFDTLQKNLKCCGADGPGDWATSRFNNVDRTNIVEIAVSSMNVFYNIPESCCKDNLKDNECELSRRLKFGGPLNNAIYQQGCVDKLIEIIYENWVTIFAVTAAVILLELLSLTFALSLCCAVRNQHYKA

SEQ ID NO: 13051 - DNA, 3995 bp, DROSOPHILA
caccaccaacgaagtggaaaatcaagaatcggaacttccgtccactagctgcgttccgctcaaaactgaatgcagttttgccgttccaaataagaaggcaagttttgtcagcgatctacttgcactgattgattttggcaaactttcgcccaaggaattctacgatggacccggcaaatccaatttccttagcctggctgagaagtacgagcatatgtatcaaatcgccaagaactgcgttacggccaaagatgaactgcagctgaagatggcattgaccacggaacagaagccccccctaccttccgaatcccgacgcatagttcatatgggaggaagcttaatgcgcgacgaaccaacggcttcttcggttacctcgcattacctttcccgacccatccgtcgatatcgcgcctggtcagcacacagtgacgtctaatctcgagatatatatatatatacatttgtaccaactccgagatatactcagtaagattttgaagcttcgctttagctgtggactgttaggacctacaattaactgaattaaaactgtaaattcatttacaaagcacgcaatttttctaaaaatgccatatgtgtggaatacacgatgcaacgagaaattcaagtgctattagcaaaagcagaaattatctgtacatagctttaaaatgaatacccatatctaagcatatcttttgtgaatacaagtctctaattcacaaattatttacctacaaaacgtgttaacatattagtaatgctgataaacaaatcgacagagagcagaaatttagcttcttatcaccaaacttattgttctgttcaaataaataatacaaatgatctcgatttgtttttctgtgtacctccgatgtattcctctgtgaaagtgattgtatctcacactcacaaaggcaaattcacattgttggatgccggcaatctcagagattcgttctccgctcaaaacaattctcagttgagtttcaatcacgaagcgaggcggtcgcatcacagtcagccaaaaatcaaattgccggctaattgaggaaatggcaatctccgcttggatgccgcttctggtggcgctgatcgtcgtgtggatttcggcagcggaggtcgacgcacaggtgccgggaccacggactcgataccaacccaactgggccagtttggaccagagaccattgccccaatggtacgacgatgccaaggtgggcatctttctgcactacggcgtttactcggtgcccagttttggttccgagtggttctggaccaactggaaaagtatgaatgtttgattagcaatccgaaataaaatacgtactccaaatttattgtaatataatttctctttcagatcttcgcaatccagagtacgtccaattcatgcagcgtaattacaagcccgacttcacttatcaggaatttgccagtcaattcacagcggagctattcaatgccaccaagtgggcgttacttttcaaagatagcggagccaggtactcacacatatatacatatatatatatagtgctatctgtataattccttcgatcattaatcctcatcacaatctttagatatgttgtgctcaccagcaaacatcacgatggcttcacgctgtggccctcgaagaatagctacggatggaattccatggatgtgggacccaaacgagatatagtcagtaagtgagtctgatcgtaggtaatcccatatataaaaacatgtatacattcttattttctattctcttagaggaactggctgccgcaattcgaaaggagtccgatcttcgttttggactctattattctctattcgaatggttcaacccactgtggaccgatgacaaattgcatctgttaatgcaacagcactttgtggagcgaaaggtgcggccggagcaaatggaactggtgcagcagtatctgccggagatcatctggtccgatggcgattgggaggctccagcgaaatactggcgctccgaggagttcatcgcctggctatataatgatagtcctgtaagggatacggtggtgaccaacgatcgctggggcttcggcactgcgtgtatgcatggtgacttctacaattgtgccgatcgcttcaatcccggtgttctgcaagctcacaagtgggaaaatgccttcaccctggatcgcaccagctggggtcagcgattcgatgtctctttgtccgattttatgacctccaaggaagtcattaaaggtgtgtgcctataatacaacatagtatttaacatatactactttctataaaatttttttttagagattatcaccactgtgagctgtaatggcaatgtgctgatcaatgttggaccaaccaagtttggtaccatactgcccattttcgaggagcgtctaagggacatgggtcgctggctgaagttcaatggcgagggtatttacggcagtgtaccctggatttatcagaatgataccatcaatggaaatgtttggtatacgcggcaaaaggaggcatccaatggaaaaatcaccatatacgcatttgtgctggagtatccgtacgacaccaatgaactggatatctatccgcttggcaaggatatcaatatattccgaaatgtaatgctgactggaatcgatatgggcaccggtggagatattctgaatgagcaaagcactgaggttgtcatgttgggcatggaggataccaaaattaaggtacgtaacgaaagtcactaagtaatagatgccacataactttttcctttgcatccttctttagtggaatgctgatcataaccggctacacatcgtgtttccacctaaaaatcacatcgataaaagaggtcttgactatgcctggacttttaaaataactataacgtagtcatagccattttataattatttttttatatatattttaatattaaccagaaatagttactttcgcttcgttttatacgaaatacaacatgatcaactcatagcattagtttagttccttgagtctagatgtgtttcttagatattctagggtgtggtatccgcctcctgtttgggaaagcctgtccggtgtttgtgggctgccagttgtgctcgtgaaaggactccgccgtcgcaggtgacgcaatggtagtgggtgtgccgttgggcgtaggagcagccgggagaatcgcactgctcgtttccgcccaccttgcggaagccagcattccgcacatagtcctggcgaagatgcaatcttcgatgggccaccaccttgttcgaatccgtgcacacataatcacacttgcggcagtgaaagtgcgaagttttccgcgaggatgccgttaccgcctctgtgggatctgaaaaataggaggattttagccgcactcaaaatggaaggaattctctacttatgctgtaatgacttacctatcctgcttaggtgattcgtctccgtggctgcaccacttgcagtggcataaccgcagctggccactccgcattgcatgttggctcggaattggcgaaaatcatcacccatcaacgtgtccattcgctcatgacgcgccgtatgttgcacaaagcgggtcttgtcgcagaaactatagtggcaatctcgccggttgcagtggaagtgcgactggtgattccggtagccacatctctcgaatccacagtcctcgttgaagcggaattttagatagccactcggaatgtcgtgatcccggttacgtttcgccgcagtcctttgaccggagttgattgttgtggctgccactgcacttgccgttgcacttgcggctgcattgagcagcattagcttctgttgagcggcattctcaagcaaaatgcgcatgtccagaagaggccctgaaactccaggacctgctgctgaacccggtaatgccaacggttgactggctgccgccagaaagctgggcaacagcacctgtcgctggtacaaatcgatcagctgcttaaactgcaacagattca

SEQ ID NO: 13052 - DNA, 1597 bp, DROSOPHILA
gaagcgaggcggtcgcatcacagtcagccaaaaatcaaattgccggctaattgaggaaatggcaatctccgcttggatgccgcttctggtggcgctgatcgtcgtgtggatttcggcagcggaggtcgacgcacaggtgccgggaccacggactcgataccaacccaactgggccagtttggaccagagaccattgccccaatggtacgacgatgccaaggtgggcatctttctgcactacggcgtttactcggtgcccagttttggttccgagtggttctggaccaactggaaaaatcttcgcaatccagagtacgtccaattcatgcagcgtaattacaagcccgacttcacttatcaggaatttgccagtcaattcacagcggagctattcaatgccaccaagtgggcgttacttttcaaagatagcggagccagatatgttgtgctcaccagcaaacatcacgatggcttcacgctgtggccctcgaagaatagctacggatggaattccatggatgtgggacccaaacgagatatagtcaaggaactggctgccgcaattcgaaaggagtccgatcttcgttttggactctattattctctattcgaatggttcaacccactgtggaccgatgacaaattgcatctgttaatgcaacagcactttgtggagcgaaaggtgcggccggagcaaatggaactggtgcagcagtatctgccggagatcatctggtccgatggcgattgggaggctccagcgaaatactggcgctccgaggagttcatcgcctggctatataatgatagtcctgtaagggatacggtggtgaccaacgatcgctggggcttcggcactgcgtgtatgcatggtgacttctacaattgtgccgatcgcttcaatcccggtgttctgcaagctcacaagtgggaaaatgccttcaccctggatcgcaccagctggggtcagcgattcgatgtctctttgtccgattttatgacctccaaggaagtcattaaagagattatcaccactgtgagctgtaatggcaatgtgctgatcaatgttggaccaaccaagtttggtaccatactgcccattttcgaggagcgtctaagggacatgggtcgctggctgaagttcaatggcgagggtatttacggcagtgtaccctggatttatcagaatgataccatcaatggaaatgtttggtatacgcggcaaaaggaggcatccaatggaaaaatcaccatatacgcatttgtgctggagtatccgtacgacaccaatgaactggatatctatccgcttggcaaggatatcaatatattccgaaatgtaatgctgactggaatcgatatgggcaccggtggagatattctgaatgagcaaagcactgaggttgtcatgttgggcatggaggataccaaaattaagtggaatgctgatcataaccggctacacatcgtgtttccacctaaaaatcacatcgataaaagaggtcttgactatgcctggacttttaaaataactataacgtaaccagaaatagttactttcgcttcgttttatacgaaatacaacatgatcaactca

SEQ ID NO: 13053 - protein, 488 aa, DROSOPHILA
MPLLVALIVVWISAAEVDAQVPGPRTRYQPNWASLDQRPLPQWYDDAKVGIFLHYGVYSVPSFGSEWFWTNWKNLRNPEYVQFMQRNYKPDFTYQEFASQFTAELFNATKWALLFKDSGARYVVLTSKHHDGFTLWPSKNSYGWNSMDVGPKRDIVKELAAAIRKESDLRFGLYYSLFEWFNPLWTDDKLHLLMQQHFVERKVRPEQMELVQQYLPEIIWSDGDWEAPAKYWRSEEFIAWLYNDSPVRDTVVTNDRWGFGTACMHGDFYNCADRFNPGVLQAHKWENAFTLDRTSWGQRFDVSLSDFMTSKEVIKEIITTVSCNGNVLINVGPTKFGTILPIFEERLRDMGRWLKFNGEGIYGSVPWIYQNDTINGNVWYTRQKEASNGKITIYAFVLEYPYDTNELDIYPLGKDINIFRNVMLTGIDMGTGGDILNEQSTEVVMLGMEDTKIKWNADHNRLHIVFPPKNHIDKRGLDYAWTFKITIT

SEQ ID NO: 13054 - DNA, 6398 bp, DROSOPHILA
aagatttgctttttctgctccgcgggaatagtgtagaacttggccacctgcatcgccgaatgctcgccgggattggataccgccgtacggaactcactaatcgtcgctccctccgccggcgaggctgcggcgttcgtggacatttgctggacatggcgctgcagctgggcggagacacgcgacaggctgccaaagcgattccggatcattttcatagagaattcgctgaaagcttgttaaataagacctggaacctgcgacctggtgggtatcggcacttggtgactatcgataacgaaccggagatggcagctaatcgcccctcatccacaaataatcggcaggtataacgaatttataaagattttttattataaagaaatcattattgtttaaatataagcaaataatgaagattaaatataacaatttataaagatttcatattataaacatattattttacattaatatggtgacatattccaatgattattattttacatattcacattgcaatggctgatacatcagacacaataactcgcaccattttcatttactgtatattcaacgaaataataattcattcaaaagcgcttgtaaattgtcttgactctacaaacactaacatgaaaatgacgcgaaatgtttcttaaatcaacacagatattcctggatcaatatcttaaagagttttacttgatgccgacatattgtgcattataatttatttattaatttatatgaatatatcaatctcaaaattaagcttagctttatttagttgagtatattttaatatatatttaatatgtagagattctctagatttctctactagagtataataacggatcgtagaatcatgaataccccaactataagcatagtaaaaatccgcgacttaacaatcgatagatttcgatagattggttgaagttttactgcatccctctagcccggcaaattgcgcctttgatgaaattgtattaaataggaagaggctgcgagatgtcgtcaattgaatcgctgtccatccagggaatacggagtttcggcacctatgccgacgatcttcagagtataaagttttcctcgccggttaccctgattctgggcgagaacggatgcggaaagacgaccgtggtagagtgtctcaagtacgccttgaccggcgagtgtccgccgggcagtgatcggggcaagagtttcgtccatgaccctaagatctttgggctaaacgaggtgctagcgcagatcaagatgcaggtgcgggacaggcggggtgcccaagtgtccatctgccgcaccatgaaggtgtccaagaagcgcaacaaaatgtcctttgaaacaatggactccaccatcaacttcctgaccggcgctggacagtcgaagcgcgaaaagcaggactcgctaagcggccgctccgtggatatcgacgtggccatctcggacttcatgggtgtctccaaggctattatcaacaatgtcctgttttgccatcaagaggactccagttggccgctggacgaatcaaaaaagttaaaggaaaagttcgatgccatattcggcatcaccgagtacaataaggcgctggataaaatcataaagcttcgcaaggaggctatggaagagctaaaaataaagggtaagctattcacggctcaagtatacattatcagatcaatattggtcttccacagaggccaacataaagcatgtggcctacctcaagcaggaaatggaggttaaaactttgaacctacaaaaggcgcagaggaaatgcgacgcaattaaggcgcagtgcagtgagtgcgaggaggaaatgaagccgattgaggccaggctggtggaaatccgaaatgtagagttcgaaattgggaagtatcaagcgcagaaagtcgaaatggacaccaagtaagttacattagcttatatcacctacaaaaatatatgatctacctggttaataggcacaaaaactgcaaggatcagatatccactctaaccctgaagatcaagaaaccctttagaggtaccctggatgaattggatcaagagataagtaactttgatcagcgcatgctagagatgcgtcagaaacgcaccgaagtggagggggatttgtcgcagattaagaggtccagtgtcgctgagcaagaaaagttgggcacacaggaccggaagcattgcctggctaaacaacggcatcagagcgagctggcttgtcgggcacagcttctgaagcgggttaaggagttctgccgggaactccatatacccatcgattgtgatcttgtggagcagcctgagaaaatgggagaagtccttcgggatatcgaggcgatgattataaccaagcactgcgaaatcacagagatagtcgagcagaacgagaaggccgatcggagccggcaagtcaagatcgacgagcttcgcattgagctgaccaagtcggagcaaagtgtaaccgcgcaggagaagcagcgggagtccagcaagcgagagagtgaaactcttggagtggagataaagaaaatcgaaacatccatgcaagacctaaagaagcttgagaaagaaataaacgaggttaatgagttgtatgagagcgctacgaaaaacattgaccaacaggctataaaagatgccattgccagaaagaaagccagcattgccgagaatcagattcagtttaagaagctggacgaacaattgacattcctaggctccatggccaagctagttgccgagtgttccctgaagcaaaaggagctcgataaaaagaaccaagaggtacatcgcgtgcgcagccgacactctgatcatttcgggaagttgttcaaggaaccaattacctgcaattatcgccgatcgatgcaggtggtctacgaaaaacttcgtcgcgagatccaagaacttaacgagaaggcaaacactcagaaactaaaagaacagtcatacgaaatcaagcgcaaaaacctcattagtgatatttcgcgaatggaaaaggagttaaaggacagcgaggagttaatatatcaaaagtgccggtcaactccgtatgatgatctgctggagcgaagtaagacgactatttccaaattgcaattcgaccatggcgcccttaaatcgtccgaggccctttataagaagtaagtttgatgagcaatggctttaatcggcttaattaacatacgtttacctctaggtatatacagaaaatggatgaggagccaagttgcccattatgccaccacaacatgactagtgatgaggcgtgcgacttgactagcgagctaacggatgagatccaaaagttgcccgataatatcactagagctgagaaagccttaaaggcggagcagataaaatatgagaacttattgcaacttaaacccaccattcttaaggtcaaggagcttaaggattcgttgccacaaaagaaggaggaactgaaaaaggtggaggagctgctaggagacagcgtcagcgaatatgaaacattaattgctcttattggggagccaactcataatatggagttggcgaattcaatgatgggtgatatgtccctattagatgaggctttaaaagattcggcgcggctcacaaaagatctggatctgcaaaaggtatggagtatccctcttagctgacttaattaatcataataacattatatatacatttttagggacagttacccgcttcctatgattcaagtgtgtctatggatgatctgcaggcggagaagagtaaggtttcaaaagagttggagacggaacgtaaggagttggaatctgctcagaatgcagtccagcagcaaatggatgcccttaatcgtttgcgcgaaaagaagaataggtattgcaattatccttaagttttccataaaatttactcatattgtttattttcagtttaaaagacaggcaaatacatcttcgagagggtcttcaaagcttgccacagttaaaggaacgtttggagaagctcaatagtttccttacaacagtagcctctgaaatcagcgaattaaaggcgaaaatccagcctcttaagctgaatttacgagcagccatagaagaaaaagagcgcttgaagaaaagcgaaagtgaaaagttagcgcagctgaattccaagtacaattcctacaaaagcacagatcacgacatacaaaggtaggtaaaagtacgtcagccaaatctttcaacactactccgtcttaacatattgtttagattgaacaaagaagctgaggactacgccaaattggatcttcgaaatgaaatcaaaaagcttgatgaaatcataatggcctccaaagataagttaaggaaattggcaagtatttaaattaataccataaaaataaaagctatatcaattctcttcacttaggaagccgaaatatctttaaaaactgatgagctggaaacaattaaaacagagtgctccaatcagcagaccgttgaacgggatttgaaggataaccgtgagctaaaacagctcgaagataaagaagccaagctaagagaaagttgccaggtgctggacaagcagctgggtaaccttgactttcatagcgttagcaaggagaaagtgaatctaactaagcaaagggataaggccacagtgcgtaagggcgaactgctgggccagctgggcgagattcacagccaggtgaacaagttgcagcgtgaaatcgacgagcccagatttaaggagtctttgaaaaacttccggaaggccaattacgagatagaggtgacacgcctctgcattgaggacttgggccaatatcgtttagcgttggagtgggcccttatccagtttcactctgaaaaaatggagatgattaaccgtctgatccgcgagtactggcgtaagatatatcgcggaaatgacattgactatattcaggtgaagactgatgaggtaagctcggatgcttcggcggatcggcgaaagacatacaactacagagtggtccagtcgaagaactactcagagatcgagatgcggggacgctgtagtgctggccagcgcgtccttgcctcccttattatccgcttggcactggccgagaccttcagcagtaattgtggtgtcctagctctggatgagcccaccacgaacttggatcgcgccaatataaactcgctatgtgaagccctgaattgcatcgtggaggagcgccaaagccagtccaactttatgctcatcatcatcactcacgacgagaatttcgtttcgtctctgggcaagataacctcctaccatcgggtcttccgcaacgaggagtgcaagtcggttatacggagagtggaggcgggtccatcaaagaaagctttgatagatcaataaaaaatattatttttgttatcaatctatgtttgcttgtctagtcatcaaatcagttatagacggggacaattggccgcgcaggtgtggtaacaaagaatgatgggtttagtttttagaaatggccaatacgtgtggtctgttgctgctggcaatacttgcttatgcagaagttgcatgccactccgtacaatttggcatgctgcactttctagctgttcccatatatgagactgaaatattcaccactgaatttgtggatttcgtagacgtgaagtacacacaaaaggtattttaaatatattactttaaataaagtggaagatctcttaggtatttttgtacagggtagcatgtgctttcatataaacatgatattggtcatcgatgaaagtgaaatggaatggaaaggccaggcgtccgttctgtccggcggtattggttacaacttcactatcttaagactaacatttaaccagccagaggttgccaaagtcacagtagtcatttacgggatccccaggtaggaactgcacagcagatatttatcctagatcctaatcagtcttagtcttgtttgttcgtagggacattccagtggtatccgtcttccggcagatcgctgcgaatcagtggggacagccacgctaaatgcatgcggtttccaaaaacgctccttagattttgatacactcctctgtcgtacttttctttgctctccttagtgcgatcggcggaaacaccgccccttaaaacaatgggcacatggtaggccaggaggaggactccataagccagagctaaaatatttaagctgtagaagaccaggtacatgttggtccaaaaactgcccgttaccaggtgtaacatggggcaggcgagttttaacaccgtcacccagttgctgtagatgtggccgtggatgacccacatgtatatggagttgtacaccagtgcgtaaactgatcccacgaagagatagaatataaagcccatgaagaagcgatggtttctgagtccaatgcagc

SEQ ID NO: 13055 - DNA, 3951 bp, DROSOPHILA
gaagaggctgcgagatgtcgtcaattgaatcgctgtccatccagggaatacggagtttcggcacctatgccgacgatcttcagagtataaagttttcctcgccggttaccctgattctgggcgagaacggatgcggaaagacgaccgtggtagagtgtctcaagtacgccttgaccggcgagtgtccgccgggcagtgatcggggcaagagtttcgtccatgaccctaagatctttgggctaaacgaggtgctagcgcagatcaagatgcaggtgcgggacaggcggggtgcccaagtgtccatctgccgcaccatgaaggtgtccaagaagcgcaacaaaatgtcctttgaaacaatggactccaccatcaacttcctgaccggcgctggacagtcgaagcgcgaaaagcaggactcgctaagcggccgctccgtggatatcgacgtggccatctcggacttcatgggtgtctccaaggctattatcaacaatgtcctgttttgccatcaagaggactccagttggccgctggacgaatcaaaaaagttaaaggaaaagttcgatgccatattcggcatcaccgagtacaataaggcgctggataaaatcataaagcttcgcaaggaggctatggaagagctaaaaataaaggaggccaacataaagcatgtggcctacctcaagcaggaaatggaggttaaaactttgaacctacaaaaggcgcagaggaaatgcgacgcaattaaggcgcagtgcagtgagtgcgaggaggaaatgaagccgattgaggccaggctggtggaaatccgaaatgtagagttcgaaattgggaagtatcaagcgcagaaagtcgaaatggacaccaagcacaaaaactgcaaggatcagatatccactctaaccctgaagatcaagaaaccctttagaggtaccctggatgaattggatcaagagataagtaactttgatcagcgcatgctagagatgcgtcagaaacgcaccgaagtggagggggatttgtcgcagattaagaggtccagtgtcgctgagcaagaaaagttgggcacacaggaccggaagcattgcctggctaaacaacggcatcagagcgagctggcttgtcgggcacagcttctgaagcgggttaaggagttctgccgggaactccatatacccatcgattgtgatcttgtggagcagcctgagaaaatgggagaagtccttcgggatatcgaggcgatgattataaccaagcactgcgaaatcacagagatagtcgagcagaacgagaaggccgatcggagccggcaagtcaagatcgacgagcttcgcattgagctgaccaagtcggagcaaagtgtaaccgcgcaggagaagcagcgggagtccagcaagcgagagagtgaaactcttggagtggagataaagaaaatcgaaacatccatgcaagacctaaagaagcttgagaaagaaataaacgaggttaatgagttgtatgagagcgctacgaaaaacattgaccaacaggctataaaagatgccattgccagaaagaaagccagcattgccgagaatcagattcagtttaagaagctggacgaacaattgacattcctaggctccatggccaagctagttgccgagtgttccctgaagcaaaaggagctcgataaaaagaaccaagaggtacatcgcgtgcgcagccgacactctgatcatttcgggaagttgttcaaggaaccaattacctgcaattatcgccgatcgatgcaggtggtctacgaaaaacttcgtcgcgagatccaagaacttaacgagaaggcaaacactcagaaactaaaagaacagtcatacgaaatcaagcgcaaaaacctcattagtgatatttcgcgaatggaaaaggagttaaaggacagcgaggagttaatatatcaaaagtgccggtcaactccgtatgatgatctgctggagcgaagtaagacgactatttccaaattgcaattcgaccatggcgcccttaaatcgtccgaggccctttataagaagtatatacagaaaatggatgaggagccaagttgcccattatgccaccacaacatgactagtgatgaggcgtgcgacttgactagcgagctaacggatgagatccaaaagttgcccgataatatcactagagctgagaaagccttaaaggcggagcagataaaatatgagaacttattgcaacttaaacccaccattcttaaggtcaaggagcttaaggattcgttgccacaaaagaaggaggaactgaaaaaggtggaggagctgctaggagacagcgtcagcgaatatgaaacattaattgctcttattggggagccaactcataatatggagttggcgaattcaatgatgggtgatatgtccctattagatgaggctttaaaagattcggcgcggctcacaaaagatctggatctgcaaaagggacagttacccgcttcctatgattcaagtgtgtctatggatgatctgcaggcggagaagagtaaggtttcaaaagagttggagacggaacgtaaggagttggaatctgctcagaatgcagtccagcagcaaatggatgcccttaatcgtttgcgcgaaaagaagaatagtttaaaagacaggcaaatacatcttcgagagggtcttcaaagcttgccacagttaaaggaacgtttggagaagctcaatagtttccttacaacagtagcctctgaaatcagcgaattaaaggcgaaaatccagcctcttaagctgaatttacgagcagccatagaagaaaaagagcgcttgaagaaaagcgaaagtgaaaagttagcgcagctgaattccaagtacaattcctacaaaagcacagatcacgacatacaaagattgaacaaagaagctgaggactacgccaaattggatcttcgaaatgaaatcaaaaagcttgatgaaatcataatggcctccaaagataagttaaggaaattggcaaagtgctccaatcagcagaccgttgaacgggatttgaaggataaccgtgagctaaaacagctcgaagataaagaagccaagctaagagaaagttgccaggtgctggacaagcagctgggtaaccttgactttcatagcgttagcaaggagaaagtgaatctaactaagcaaagggataaggccacagtgcgtaagggcgaactgctgggccagctgggcgagattcacagccaggtgaacaagttgcagcgtgaaatcgacgagcccagatttaaggagtctttgaaaaacttccggaaggccaattacgagatagaggtgacacgcctctgcattgaggacttgggccaatatcgtttagcgttggagtgggcccttatccagtttcactctgaaaaaatggagatgattaaccgtctgatccgcgagtactggcgtaagatatatcgcggaaatgacattgactatattcaggtgaagactgatgaggtaagctcggatgcttcggcggatcggcgaaagacatacaactacagagtggtccagtcgaagaactactcagagatcgagatgcggggacgctgtagtgctggccagcgcgtccttgcctcccttattatccgcttggcactggccgagaccttcagcagtaattgtggtgtcctagctctggatgagcccaccacgaacttggatcgcgccaatataaactcgctatgtgaagccctgaattgcatcgtggaggagcgccaaagccagtccaactttatgctcatcatcatcactcacgacgagaatttcgtttcgtctctgggcaagataacctcctaccatcgggtcttccgcaacgaggagtgcaagtcggttatacggagagtggaggcgggtccatcaaagaaagctttgatagatcaataaaaaatattatttttgttatcaatct

SEQ ID NO: 13056 - protein, 1303 aa, DROSOPHILA
MSSIESLSIQGIRSFGTYADDLQSIKFSSPVTLILGENGCGKTTVVECLKYALTGECPPGSDRGKSFVHDPKIFGLNEVLAQIKMQVRDRRGAQVSICRTMKVSKKRNKMSFETMDSTINFLTGAGQSKREKQDSLSGRSVDIDVAISDFMGVSKAIINNVLFCHQEDSSWPLDESKKLKEKFDAIFGITEYNKALDKIIKLRKEAMEELKIKEANIKHVAYLKQEMEVKTLNLQKAQRKCDAIKAQCSECEEEMKPIEARLVEIRNVEFEIGKYQAQKVEMDTKHKNCKDQISTLTLKIKKPFRGTLDELDQEISNFDQRMLEMRQKRTEVEGDLSQIKRSSVAEQEKLGTQDRKHCLAKQRHQSELACRAQLLKRVKEFCRELHIPIDCDLVEQPEKMGEVLRDIEAMIITKHCEITEIVEQNEKADRSRQVKIDELRIELTKSEQSVTAQEKQRESSKRESETLGVEIKKIETSMQDLKKLEKEINEVNELYESATKNIDQQAIKDAIARKKASIAENQIQFKKLDEQLTFLGSMAKLVAECSLKQKELDKKNQEVHRVRSRHSDHFGKLFKEPITCNYRRSMQVVYEKLRREIQELNEKANTQKLKEQSYEIKRKNLISDISRMEKELKDSEELIYQKCRSTPYDDLLERSKTTISKLQFDHGALKSSEALYKKYIQKMDEEPSCPLCHHNMTSDEACDLTSELTDEIQKLPDNITRAEKALKAEQIKYENLLQLKPTILKVKELKDSLPQKKEELKKVEELLGDSVSEYETLIALIGEPTHNMELANSMMGDMSLLDEALKDSARLTKDLDLQKGQLPASYDSSVSMDDLQAEKSKVSKELETERKELESAQNAVQQQMDALNRLREKKNSLKDRQIHLREGLQSLPQLKERLEKLNSFLTTVASEISELKAKIQPLKLNLRAAIEEKERLKKSESEKLAQLNSKYNSYKSTDHDIQRLNKEAEDYAKLDLRNEIKKLDEIIMASKDKLRKLAKCSNQQTVERDLKDNRELKQLEDKEAKLRESCQVLDKQLGNLDFHSVSKEKVNLTKQRDKATVRKGELLGQLGEIHSQVNKLQREIDEPRFKESLKNFRKANYEIEVTRLCIEDLGQYRLALEWALIQFHSEKMEMINRLIREYWRKIYRGNDIDYIQVKTDEVSSDASADRRKTYNYRVVQSKNYSEIEMRGRCSAGQRVLASLIIRLALAETFSSNCGVLALDEPTTNLDRANINSLCEALNCIVEERQSQSNFMLIIITHDENFVSSLGKITSYHRVFRNEECKSVIRRVEAGPSKKALIDQ

SEQ ID NO: 13057 - DNA, 3994 bp, DROSOPHILA
atataagggaaaagtgggggattatatgtgtgatttttggaacagatcatctctagaatatagagctaagctgttccagaagacgctcatatactcccctaacttttctatattagaatagcgccaaaattagttgtatcattgctgtttttttgacttttaaatgttcttaactaagctaaatccgaaaattatattccaaactatagtttctatatgttcctcgcttcttgggattcctccattaaatcattgcaattgcgggcgtctgcttgttggatcggcaattaatccttccctgctgggagtagagtcttccaaagaaggactctcacaagctcattaagctcttcgtacagtcacatcatgctatatctgtacttaaaaaaaaaatacattttgagatagtttccaaaccttttggccactaaattgcctccaatatgtagtagggttcttaggatccttacttatttttatttctttctacccgtctcatcgaacttctggctcatcacagagccctgctttcactcaactttctctttctttatcttcacaaatttgtgtgctctactttaacatgtgcaaagtttttgggggaggttacttcttgatatggtataatactatagtgcaacttgggtaaaacattgaacaagaataacgatttggattggattttcatatgatattactgatattgttggttgtggttacggttactctctgatcttttcttttttttcttgattttattacccgttttttttttttttgatttttggttgcacttttggcaacattgcgttgtagttaaatcgtttgcttattcgtcttcctcgtagttttgataggttacataacgtacctgagcccgatcgcgtccatagatcaaagactgcaatcacagaaatgaaatggaaaagggtatgggttagtctaatgcatttcctagaatgattttgtatcgtgcaaaatgaaactcaggcagcgctttaaataaaaattaatagttttattacaaacaaattaagctgaacttagggctaaaaacaatgataatgactaagtatacgaaaaataataataaattaaaattaagcaatgtatcgagactcaaagcctctcgctctcgtacgcctcgttcgtcctgcccgcctcggcatccgaatcgggaacagatgcaccatgcatgatggccgggcaggatgcggtcatctggggtattccagagaattcccctgaagcggcagcagcggctgcagcagcctcagccgcctctctggccatacgtaccttcttctcgtcgctggtcggcggattcttgagcagcgtcagcaatggagcatacataaagcagagtatggcaattccaaacaacatccactcgaagccgatgctcttcaccagcgatccagataaggcgggacccacggcgaagccaacacagaaggccacatcacccagggcgtaaacgctgccgtagaccgccgagtgtcggatgtccaccagatagcccagttccggcatcatcgacgagtccaccattccaatggcaaagccaagtcctgcattcgggatgatcaggtgagtgatcgaagtggccatgggtatctgaagaagtcaacatcaaaattatattatatgacgcgaattcttgagcaattcttaaaccacttaaaattatgtacatttttttattgattttaaataaactaaagattgttatacttacaaatatcaagcatcccccgatgataatcaatcccaagcacgcggcaaaccatcgtccaattttgtgtcccagcggtccgaagagattggtgccaatcaggtagctaatggaggcgggcaggaaggccacgccctgctcccaacgagtggcgcccatgttgtccaccatccacagcggtagcgatggttccagcatggcaatgcccatattggcgaacgtgatggcaccagcagcaatcaggatgtagggatcactgatgaggctcttcagcgagggcggttccgtttcggccttctggatcgatggctgcagcatgaacaactgtagcaggccatcgcccaaggccagggcagccaggatcaggaatggagccgacttgcccacaaactcgtacatcacgccaccgaatggtggaccgatgagcacgcccaaagccaatcctcccagtgctatgcccatggcatttccacgctccttgtcgtccgtaaatcgatctgccagcatgcccattccggaaaccgaggagcaggatgatccaatgccctgcagtgccctcgccacgaacagtaccaggtaagatcgtccaaaagcgaaaactaagaaaaggttatgggttcaataccatttctagtgcagaggagccagtggagcttacttatcgttgagaggaacattatcacaaagccagcgaacatgggaatactatagccaatcctgcaggagtataaatatgtgatcaggaaagtaataaagataaatacttaaaagtcactttaacatgccagtttcatcttcttgcaagctatttatgtaaggcaaggataatcccattagttcatgaaacttacctgtgagtcaggggtccaacaattgggttaaccagcagctggacaaacgccttggaggcaaatagaagtcccacctcgacggtctcgcccaccagctcgttgtgccgctcctccagttcccggtaataggtctcgttctctgtgaatattcaaggactttcgttgcagactgttggccaattagcggctaccgagacacttaccctccggactaatcgtggagatctcgagcggagccgcctcgctgccatccttgttgcatggacacggcgtcggtggcggcggaacgttggacgttaaaggtgtgcgtggaaagctgtcgagcggcgcatccggatgtcgtatgtcgtacaggaactcgggtatgatgggcactaagcgttggggtttgggcaaaatggagaccattataatttgattgcaacaaaaagaatttgctcacaattaacctaaacgctcttgtgcgccctgggcgcagttttcaccaggccgccggttggtaattgcgttctccgggcaccagaaagttttgtaattgccttgccgctggcagagatttttcccccccccccaaacctcctataccaccctacctcgattctaattgagttgcaaccaaaaattgaggggaaagagtacaaaattgcgcatacgccacgtttacaacgatgcgtttaatggactctgcgatgtctagcataaagccgcatgcaactttcgtctccggcgggcaaattcaatttgtttattgcatgcttcgactctgtttatatttattatcaacacccggagaactcgggagctccactccaacgggctccactgtaattgcatttcctgccaaagtgctaggccgaggtcagaggttggctcccaacggagtggctctttcaattgagtgagtgccgagtttgaagtattgttggggtaatttgtttgcttgtgcagccagttattcgtggttatcgcactgacagcccataaccatatatgtaaggtctgccagccagcctgccagcttggaggttttgtttaatgagtgccattcatgctcgatgggattggggttgggggctacacagttgtatagatagatggttagttgaactccaaagtttggtattagctcgtgcccgttccttgtgcctcgtgccaaagttcagcgaaagtggaagtctcaactgacctggaatcccactcaactgtcacatatgtcggccatgtggacgagccaacatcatggcaaacatgccatttgtgccatgcaaccggaaatatatgcaaatttggcaacatctaactaattggggttaaccacttgccgattaagtagcgaatttagtgctgccgtgaaaaaaaaaaaaatgttgcatagtaattccccaagctggcagccccaacaactcat

SEQ ID NO: 13058 - DNA, 1616 bp, DROSOPHILA
atggtctccattttgcccaaaccccaacgcttagtgcccatcatacccgagttcctgtacgacatacgacatccggatgcgccgctcgacagctttccacgcacacctttaacgtccaacgttccgccgccaccgacgccgtgtccatgcaacaaggatggcagcgaggcggctccgctcgagatctccacgattagtccggaggagaacgagacctattaccgggaactggaggagcggcacaacgagctggtgggcgagaccgtcgaggtgggacttctatttgcctccaaggcgtttgtccagctgctggttaacccaattgttggacccctgactcacaggattggctatagtattcccatgttcgctggctttgtgataatgttcctctcaacgataattttcgcttttggacgatcttacctggtactgttcgtggcgagggcactgcagggcattggatcatcctgctcctcggtttccggaatgggcatgctggcagatcgatttacggacgacaaggagcgtggaaatgccatgggcatagcactgggaggattggctttgggcgtgctcatcggtccaccattcggtggcgtgatgtacgagtttgtgggcaagtcggctccattcctgatcctggctgccctggccttgggcgatggcctgctacagttgttcatgctgcagccatcgatccagaaggccgaaacggaaccgccctcgctgaagagcctcatcagtgatccctacatcctgattgctgctggtgccatcacgttcgccaatatgggcattgccatgctggaaccatcgctaccgctgtggatggtggacaacatgggcgccactcgttgggagcagggcgtggccttcctgcccgcctccattagctacctgattggcaccaatctcttcggaccgctgggacacaaaattggacgatggtttgccgcgtgcttgggattgattatcatcgggggatgcttgatatttatacccatggccacttcgatcactcacctgatcatcccgaatgcaggacttggctttgccattggaatggtggactcgtcgatgatgccggaactgggctatctggtggacatccgacactcggcggtctacggcagcgtttacgccctgggtgatgtggccttctgtgttggcttcgccgtgggtcccgccttatctggatcgctggtgaagagcatcggcttcgagtggatgttgtttggaattgccatactctgctttatgtatgctccattgctgacgctgctcaagaatccgccgaccagcgacgagaagaaggtacgtatggccagagaggcggctgaggctgctgcagccgctgctgccgcttcaggggaattctctggaataccccagatgaccgcatcctgcccggccatcatgcatggtgcatctgttcccgattcggatgccgaggcgggcaggacgaacgaggcgtacgagagcgagaggctttgagtctcgatacattgcttaattttaatttattattatttttcgtatacttagtcattatcattgtttttagccctaagttcagcttaatttgtttgtaataaaactattaatttttattt

SEQ ID NO: 13059 - protein, 498 aa, DROSOPHILA
MVSILPKPQRLVPIIPEFLYDIRHPDAPLDSFPRTPLTSNVPPPPTPCPCNKDGSEAAPLEISTISPEENETYYRELEERHNELVGETVEVGLLFASKAFVQLLVNPIVGPLTHRIGYSIPMFAGFVIMFLSTIIFAFGRSYLVLFVARALQGIGSSCSSVSGMGMLADRFTDDKERGNAMGIALGGLALGVLIGPPFGGVMYEFVGKSAPFLILAALALGDGLLQLFMLQPSIQKAETEPPSLKSLISDPYILIAAGAITFANMGIAMLEPSLPLWMVDNMGATRWEQGVAFLPASISYLIGTNLFGPLGHKIGRWFAACLGLIIIGGCLIFIPMATSITHLIIPNAGLGFAIGMVDSSMMPELGYLVDIRHSAVYGSVYALGDVAFCVGFAVGPALSGSLVKSIGFEWMLFGIAILCFMYAPLLTLLKNPPTSDEKKVRMAREAAEAAAAAAAASGEFSGIPQMTASCPAIMHGASVPDSDAEAGRTNEAYESERL

SEQ ID NO: 13060 - DNA, 5267 bp, DROSOPHILA
aatcaatgccacgtttgcccactggttgcggtgatctaataaaaatagaccattgatcacttccgctggccattccgtatccatgtggatacgccgccaaatattagttgctggattccatgcacgggacgagttcgctattactcctggcaaaagttgaggttgtggctttaactccatcgccattagcccgctgatgcacacccattgccgttgccatcgagcaaaatagaaactcctgtggcatctgagttatggcgaaatttcatttcaacttttgcataattttatgcttattatggccgggatgtcggattgtcggactgtctgactgtcgctgtccctaacaggaaaagaggagagcaaacagcaaacgggaatggagggggactcatctccagcgaagcgaaaagtccctggacagtggctttaattactttgatgcatgattttgctgccatttgcaatttgtagccggggataatgagcaggaagagcgaaacttgccccggctttatttaacctgccacacggacacaccgagcggttcgaggggcacacgtaaaggattcacacatgagctagctgtaccggctgtaatacccttcgggtttcggggtttcacgagtttcacgagtttcgccatttcagagggacacatgcggtgcacggatatcgaaatttgagtgcacaacgcgaaaaagtgctcacaattttattcacagaccgttggagatgaagcaattaagttggcgttcatagtccttcggattttggcatatcgcattgcttataacacaaaccgccagctttcaccttttgacctattcaaaatgctgtctagtggtggggtttttttccaaaactaaagtttatattttctgaacccattaattaagtgtctcactcatttttgtatttatttatttatatttgatgccgcggcatttgctagtattgtattgttgccttgtctctttatctggcctgctcttctttccagcaaggacactttaaaggatagagaacaccggtgaggaggagtcgggagcagattgtccagaccccgaagacagtcggtagcgaattccccgctggcgagcaattgagcaattgtgcaaaatgggtaagtgacagccagacgagccactaatgaaccactcgagcaaaccggacacctcgtgggctatcgcagaacagacatttcgcacctgatgttgcaccaattgccaggattcattggtggcaaccagatagccgcacaaagtgcaggccttagagtatatggacgcaccataaacatcgatacaatcgcttttgacctttttattgtatggtatataaaattcgggtaaaacgaaaccatagaaatttattccaacaaattgtttaagtaaactaacaatatgaaatgcgcaggaaatgttttgttttagaaaactatttttgcttgaaatttgtgagtcctcttcaatctttaataaaacgtatctaaattcatttcgaaacaattttagctggaacaaaaaggtttaactaaccactacgaatcctcaactatttaggcttatctagttaaaatatatgaacaatatagaaaccccagaaaagactctgttttagacaactatttatagtttgaaattgagagttttgttcaacctttaaaatgatataaaaacttatgcagattcatttcgaaaacaacaaacagttttaacaactactacgaatcccgaataatttatatttagtctcacttaacacacattacatcagttttatgtaatgtgattattcagatttaaacaaaataaggagctttgtttaatatttgttaaatactcctaaagaccccaactaaaccaagtacctatccagtgaacatcttttttctaaatgaatagagaacaatagttccaatattcataagtagatcagaacatcatcattttgcatttttaatccatgttcccttaataataaacttcctcattttactagcaatttaggcaataatactaactcctctgttccgtagatgcgctacgcttccgtggttcaccattcgcccgctttacgggccagtcgaccggaccgggccatccccgtccgccgccacacccacaacatccgcaacgcccacaggcggcgggaacacacggcatcagtgccccggagccgctgatcgttgtggaggagtccaatctgccggaggagcaggaggacagctctgagccgacggtctcgaatcgcggcagcctggacatcgactcgcccgtgaatccgtatctactctcgccatggcgggatccacgcgaggccagaaagcattcgctgccctcgcagcaggtgaccgacggcatcacggccagccaggtgcgccggctctcggagcgaggcggcgagggatcggggcccacaccgaaggaggccgcctttttggccactttgtcgcaggctccggcgccgaccggacgtcgccactcggtggtgaccatctcgaaggtgcccaccacactatttggacgctcgcgtcgcgaatccgtggccgcgtatcccaacagcaatgggtaagtgacactagtcggtagttgaatcgcaatatatatcttatattgaattgtaaccaagttttcataactctaagagaactggggtcaaactagtttcgtttggttgcacacaaatccttcggcttttgaaaccacacaaatgtccaaaagtatgccataaaaaaacagacagctttaatccactcaaaatatatacaatagttgcacacttgttgacactctaataattgagttgcattgaagcgctttgaagtattttcgaaattcaatttgcatttgcatactcgtttcgttagccgacggtaatttgagttatgcacttccggactcatccgagagtactaagcaatcgaccatctgttgttcgttattatcaccacaggagcagtcgggtgctgaattcccgccgggagagcaacacaggtcccccatcgacagaccccatcggcagcattcacaatctgcagctggacatcatggacgacatctacttgcagtcgcgcaaggcccgcttgaagctttggacatcctccaacgagaaggtgtgcgaggtgcagaccgtcgacgaggccggctccggccagccgggccgacgattcaccaaccgtcgctactcggaatgcccccagccaggattggccagctcctttcgccgcgcctccgagctgccgccgtcgcagcagcagcagcagcaggctcagtcgcagagctcgactcgggcctcaacgcgtcgcaagaaatcgggcagtggaactggactattgggcagtcgtacggacatcgccggcatatttagctcgttgaccagctcggccatggatatgcaccggccggaaccggaaggccgggatggcagctcaagtgctagttcttcggcaacggccacggccagtagcccgtttctcagccagacctttcaggcggccgctcgtgggcgtgctaccagcgccacgcccacaccaacaacccacagcggttcactggcggtgggcggtggaggtggcgtaggcggtggaggatctggaaccactggcggcctactcgatcccaatgccggtaggtcgacacgatccaatagcttcgatgtgtccctgctgaacaacgccaagcagctggtgagcgatgtccaggacaatggatcggccacgctgtccggttggtttgccaagcggcacacgccgttggcgcgcaagaagagcgtgcggagcaagagttcggcggtggcgctgtccaaggatgtgctggagcggctgcagaagaaggatccgctaggtggtgactctggcaagccgaaattgaagccaaggagcaaacagaagacctgggcggagtccaccaaggcgacggtggatgccaccattctgggcacggccatcgagggtttcctgcgaaagagctccaacgccagcatgggcggatccggagctgggtcgtccggcggcggtgcctccacatcggcagcgtctcgcggtgccacgcccaaggcgggcaaggattcgggcagcgccagcggcagtcccgcccatggcgcccggcggagtcgaccatccgccagcagctctgctcaatcgcaggccggccgggcagtccgctccacgctcaattggttcggcaaggccgacgaggacgactccaaggacacgtgcgacgcctcgctctgcgccacgctcaaggacctcttcgtcaaataggtcggggggcgcagaggcaagtaaagcaatgggccgagttcccggctagagcagcacaccggtaagttgcaaaaccttcgaaatattttatccactcaaaaaagacacaaaaaaaaaactactccccatgcctcctgctgccttagagctttcaatataccaccacaatatattttgtactgaagttttggtgatgcaattcgattccaagaaacaaaactactggcaaattagagcttttcaagagaacaaacttaaatatagagttaaatagaaccatgtcttggtgctaggctgttattaaaccaattaatgaatttcttggaatggtatattgattattctaagaatgcagagctcaagttacccacctaaccatctcggttgccatgaataaatgcctcaaatgcctagaatgcgcagcaaatccaaatagcctaatcctaacattgttatatcacgttctgtgtgcacttttagccagctacttgcacctctgagatccgaaaatccttatcgaaaaccaaaaacgaaataaatcgaacgacgttgaagttgaagtagaaggcttacacaaacaagtgaacaataagcgcagcagcagtaatcaccattgaatccatcacataacacagcaacagcagaggcttaatgacaaattaaaagcatagcaacgtctgtctttcgggcgaaaggagatgcacataattcaccgaaatcaataatataatcacagcacttacataactcacaaacaatataataataattgacagcacaggcttcacacaaaacacgtccattgaatcaaacactgagaacattgcatgcaaagggcgacgacagtaagattaatctgtcgtcaccgggacatgttaactgaatgagatatcgatacctgacggttaatccggttggtgtacaacaaacagtacacgagcacaaaatgaaggatcaaatggaggaaatagaacttatcagcaatacgcagtgacataca

SEQ ID NO: 13061 - DNA, 2035 bp, DROSOPHILA
cagcaaggacactttaaaggatagagaacaccggtgaggaggagtcgggagcagattgtccagaccccgaagacagtcggtagcgaattccccgctggcgagcaattgagcaattgtgcaaaatggatgcgctacgcttccgtggttcaccattcgcccgctttacgggccagtcgaccggaccgggccatccccgtccgccgccacacccacaacatccgcaacgcccacaggcggcgggaacacacggcatcagtgccccggagccgctgatcgttgtggaggagtccaatctgccggaggagcaggaggacagctctgagccgacggtctcgaatcgcggcagcctggacatcgactcgcccgtgaatccgtatctactctcgccatggcgggatccacgcgaggccagaaagcattcgctgccctcgcagcaggtgaccgacggcatcacggccagccaggtgcgccggctctcggagcgaggcggcgagggatcggggcccacaccgaaggaggccgcctttttggccactttgtcgcaggctccggcgccgaccggacgtcgccactcggtggtgaccatctcgaaggtgcccaccacactatttggacgctcgcgtcgcgaatccgtggccgcgtatcccaacagcaatggatgcacttccggactcatccgagagtactaagcaatcgaccatctgttgttcgttattatcaccacaggagcagtcgggtgctgaattcccgccgggagagcaacacaggtcccccatcgacagaccccatcggcagcattcacaatctgcagctggacatcatggacgacatctacttgcagtcgcgcaaggcccgcttgaagctttggacatcctccaacgagaaggtgtgcgaggtgcagaccgtcgacgaggccggctccggccagccgggccgacgattcaccaaccgtcgctactcggaatgcccccagccaggattggccagctcctttcgccgcgcctccgagctgccgccgtcgcagcagcagcagcagcaggctcagtcgcagagctcgactcgggcctcaacgcgtcgcaagaaatcgggcagtggaactggactattgggcagtcgtacggacatcgccggcatatttagctcgttgaccagctcggccatggatatgcaccggccggaaccggaaggccgggatggcagctcaagtgctagttcttcggcaacggccacggccagtagcccgtttctcagccagacctttcaggcggccgctcgtgggcgtgctaccagcgccacgcccacaccaacaacccacagcggttcactggcggtgggcggtggaggtggcgtaggcggtggaggatctggaaccactggcggcctactcgatcccaatgccggtaggtcgacacgatccaatagcttcgatgtgtccctgctgaacaacgccaagcagctggtgagcgatgtccaggacaatggatcggccacgctgtccggttggtttgccaagcggcacacgccgttggcgcgcaagaagagcgtgcggagcaagagttcggcggtggcgctgtccaaggatgtgctggagcggctgcagaagaaggatccgctaggtggtgactctggcaagccgaaattgaagccaaggagcaaacagaagacctgggcggagtccaccaaggcgacggtggatgccaccattctgggcacggccatcgagggtttcctgcgaaagagctccaacgccagcatgggcggatccggagctgggtcgtccggcggcggtgcctccacatcggcagcgtctcgcggtgccacgcccaaggcgggcaaggattcgggcagcgccagcggcagtcccgcccatggcgcccggcggagtcgaccatccgccagcagctctgctcaatcgcaggccggccgggcagtccgctccacgctcaattggttcggcaaggccgacgaggacgactccaaggacacgtgcgacgcctcgctctgcgccacgctcaaggacctcttcgtcaaatag

SEQ ID NO: 13062 - protein, 548 aa, DROSOPHILA
MAGSTRGQKAFAALAAGDRRHHGQPGAPALGARRRGIGAHTEGGRLFGHFVAGSGADRTSPLGGDHLEGAHHTIWTLASRIRGRVSQQQWMHFRTHPRVLSNRPSVVRYYHHRSSRVLNSRRESNTGPPSTDPIGSIHNLQLDIMDDIYLQSRKARLKLWTSSNEKVCEVQTVDEAGSGQPGRRFTNRRYSECPQPGLASSFRRASELPPSQQQQQQAQSQSSTRASTRRKKSGSGTGLLGSRTDIAGIFSSLTSSAMDMHRPEPEGRDGSSSASSSATATASSPFLSQTFQAAARGRATSATPTPTTHSGSLAVGGGGGVGGGGSGTTGGLLDPNAGRSTRSNSFDVSLLNNAKQLVSDVQDNGSATLSGWFAKRHTPLARKKSVRSKSSAVALSKDVLERLQKKDPLGGDSGKPKLKPRSKQKTWAESTKATVDATILGTAIEGFLRKSSNASMGGSGAGSSGGGASTSAASRGATPKAGKDSGSASGSPAHGARRSRPSASSSAQSQAGRAVRSTLNWFGKADEDDSKDTCDASLCATLKDLFVK

SEQ ID NO: 13063 - DNA, 4694 bp, DROSOPHILA
gaccagatcgtaaaaaatatttaacttgccaatctgtcgaccgcaaatattaacattagctgagaaaacatttcggattaaacatgtaattatgttcacattacataaatataaatatatatagaaccagatcataatagagtattaatttgcaaatggaaaaagtattatcaactcaatttatttgggcacaacttgtagtatttacttcgtatatagcaaacctattattaacattggtacgacaaaaccttcaatacttaatcgattttcgcaggtgtactaagtacacaatagtaagtacactgtactttaaactaattcatgtgaaacgtaacacccatgatcaatggtttgcactatccatttagatccatagacagagagatgactaatctgggtggactaatcaatttgctttctatctgaatggcacccaatgtgctaattaaccgtttacttctagtgaatttgcataaaaaaaatcacccatttaatattgtctctattcaggtttcgctttgtttacctttataaaaataaatgggtaacaaatgatttttaatgcgattaacataaagagcgatggaggaagacacatataacaggttttaagactcgcatgtatgtacatatgtatatatatccgaacaattaggtgttatatgaacgtactggctctccaatagagttcctcaatatgagacaagaatctcagttatttaaacaaattgccgggaacacagtccgggttgagaatactcaaacatatgtgcttaattacgatttcacacaattaattttttgccatttttgcttggctgtcggctcggctcggcagcgaacaagctggactgtgaagttcgttcgttcgttgtttttttgttattattattaaaacgctaaaaattcccctgacaaaatcaaacaatttcggctggcagagcgattgtacctggccattggcgaaacggaaacagagtcagaaaatcagtacacaatgcgttggccgcgaaagcacacgttcggcttgtggcccaaacgaaatggtcggaatcgcagtagtggagaagccactggggggcaaccccaggccactgtggccaccatttacgatcgtaggaacaacggattagctgttctcaacacgacatcgtactaagtagtgtctgtctgctttcctgttttcagctggctgcgaggagaaggagaagtacacggcccagaatggcgatgattactatggccaggcgcacaccgtcgacctggacgtggccagcaagtactccaagcccaaggaggcccactggctggtgcggcgcatattcttcctcagctggattaccagttacgatcgagagcaggcgttcgccgatttgattgccggcatcaccttgggcctgaccatcataccacaaagtattgcttatgccgcgctggcaggactctcctcggagtacggcctgtactccgccttcattggctccatcatctatgttttctttgggacgataccacaggtgtccattggacccaccagtctgatggccattctcaccctgcaattctgcgccgacaaaccggtgcaggtggtcatcgtgctggccttcctcgccggtttggtggaactggccatgggtgtgttccagctgggattcatcgtgagcttcataccagctccggttaccaaggcttttacatccggcactgcgctgatcgtggtctttgcccagatcaagaatctcttaggtgttcgcataaagggattcccctcgatcggtgactttttcaccaatatccggcccacggatgccgccatgggaatctcgtgcatggttgtgctactttcgctgcgggtaagttaaatatagcgtatataaataactttatggagagataaatgatccataaccatattgaatgtaaggcttccaaataacccaaaataaattgtttattagcttatcaaataattggacagggtctaactgctgaaacctgactttaaactggtgcctcctcaagtcacgttttcaaaaaatctaactaagtggtttagatatttgataatcaatcatgcatacttcacatgtgaaaaatgctaataattgtttcaatttctcaatcttttttcttgctagctactgtcgcaagtgaatttcaagcaggacacgcctgttacgcgtcgccttaagaagatcctgtggtacatcagtatttcccgcaatgctctggttgtcttcttcactggccttttggttttcatctgggtgaagaagagctccattgaggcggtcccctttgcgctttcctcaaaggtttcctcggccatgcccacaatcaagctgccgcccttcgccttcgagtatcagaatcgcacctatgtgttcacggatatcctccatgagctgggcagcggaattgttgtggtgccaattgtggcggttttggccaatgtggccattgccaaagccttcggtgcgtatacgtaatattgggcgtaaatgcagtttgtctataatggtgcgcatttttctctctcttctcagtcaaggatggcaatctggatgcctcgcaggagatgcttactttgggtttgtgcaacatagccggctccttcttcagtgccatgcccacctgcggagccttcacccgctcggcggtgagtcaggcatctggagtacgaacgccaatggctggcatctacacgggattgatagtgctctccgcattgagcatcctgaccccctacttccagtacattccaaaggcttccctatcggcagttttaatagcagcagtcatctttatggtgcgtttatactttcttatcaactaaatgtagttaatcatatacttttcctttcaaacagattgatcttgctccagttaaggagctatggcagaccaacaaaaaggacttctttagctgggtgggaagttttatcatctgtttggtggctggcgtcgagttgggtcttctctttggcattgttctcagcatggtgtttatattgctgcgcttgggtaaccccaaatttgaggtcacccttaaacaggtaagtttgaaagttaactagataactttagtttaatatttgacattgctccctagcatgaatccacgtactatgtgcacatcgttccccaatcggatgtctattacacaggcgtcgatgcactacgatctgagttgcgaggagcatgcagattgtatcacaatgatttcccagtggttctcgattgcgcacgctttatgcagttcgatgccaccttcagtgagatgctgatatcggtggccaaggagatggccagccacgatgtcctgctaatcctgcagaacatgagcctcaaagtgcagcagatgctgcccgtgatgggtaatgtgcggttctgccaggaggatagccagctttcgagtcatctgcaggtggaaaaggaggcacctgttgtggaggccaagctatagccaacttcctatctgatgtcggttcgttccagtctgtttgatccggttatgagcgaacgtcacagcatttttatcttcggacttgttaccgcttgacgttcgcacgcaaattgcgtaattaggcagcgccagcagttagttagttaagtgcttagatataggtgtttagttagcgactttgtaaatacttatgtgcattataaaaatacagtactccccaacaaatctgtcaagataaaatgaagctcgaaagtgctcttcgagattgaataaacagctgctgctgtaagagcccataaagaacgcctcgtgccgcggaactcaaataggtaatctgcatggcggcatacgtgtcgtatgagtaataccgctcagctgcgcgcaaaactgaattcacaactcattagggcaattgaaatgcacgttggcgattttttttttttttgaaattgttgtttaattattattttttttcgctttttgtcgttcaataaggaaattataatttatagaaaaagtataataatacagtataacaatttagttggttttcatttgttttgtttatccatttcatattgcatagtactcattgccattatcatttctttttttttctgttttgccagtgtgtgtttaatgggaatttaatttcatttattctatattgttcgcttggtttccgaggaaataaactgttgtatagttgtataggtgtttctagtaaatgattatagagtgtgtatgtctgcatttgtcagtgtccgtatccgtaactgtatctgtatctgtgtttgtgtctgtgtgtatttccggtcagtccccgtatttcggatgtgatatattttccggtttttcgggaacttaacggcttcggtggatgccgaagttaggcttgtagattgtaattgtagttccgatgtggctgaataataatacagtgacttgattgtaagatttaaatcagttacgtgggaaaagttaacgcttgtttcgatttcggtaagtccgtctccattcaaaacatctggctaattccgatatctaattttttctgcccgcacactactgcacatttgcttggttacaatttacagtgtttggtttaattgcagtgtatctatgtatctatgtatgtgtcgttctgtagtaagtgtgtgtttttgtgtgtgtgtgtctaaagtaatcgtttgctcacaattatttttgccggccaagcacatgt

SEQ ID NO: 13064 - DNA, 2148 bp, DROSOPHILA
atgcgttggccgcgaaagcacacgttcggcttgtggcccaaacgaaatggtcggaatcgcagtagtggagaagccactggggggcaaccccaggccactgtggccaccatttacgatcctggctgcgaggagaaggagaagtacacggcccagaatggcgatgattactatggccaggcgcacaccgtcgacctggacgtggccagcaagtactccaagcccaaggaggcccactggctggtgcggcgcatattcttcctcagctggattaccagttacgatcgagagcaggcgttcgccgatttgattgccggcatcaccttgggcctgaccatcataccacaaagtattgcttatgccgcgctggcaggactctcctcggagtacggcctgtactccgccttcattggctccatcatctatgttttctttgggacgataccacaggtgtccattggacccaccagtctgatggccattctcaccctgcaattctgcgccgacaaaccggtgcaggtggtcatcgtgctggccttcctcgccggtttggtggaactggccatgggtgtgttccagctgggattcatcgtgagcttcataccagctccggttaccaaggcttttacatccggcactgcgctgatcgtggtctttgcccagatcaagaatctcttaggtgttcgcataaagggattcccctcgatcggtgactttttcaccaatatccggcccacggatgccgccatgggaatctcgtgcatggttgtgctactttcgctgcggctactgtcgcaagtgaatttcaagcaggacacgcctgttacgcgtcgccttaagaagatcctgtggtacatcagtatttcccgcaatgctctggttgtcttcttcactggccttttggttttcatctgggtgaagaagagctccattgaggcggtcccctttgcgctttcctcaaaggtttcctcggccatgcccacaatcaagctgccgcccttcgccttcgagtatcagaatcgcacctatgtgttcacggatatcctccatgagctgggcagcggaattgttgtggtgccaattgtggcggttttggccaatgtggccattgccaaagccttcgtcaaggatggcaatctggatgcctcgcaggagatgcttactttgggtttgtgcaacatagccggctccttcttcagtgccatgcccacctgcggagccttcacccgctcggcggtgagtcaggcatctggagtacgaacgccaatggctggcatctacacgggattgatagtgctctccgcattgagcatcctgaccccctacttccagtacattccaaaggcttccctatcggcagttttaatagcagcagtcatctttatgattgatcttgctccagttaaggagctatggcagaccaacaaaaaggacttctttagctgggtgggaagttttatcatctgtttggtggctggcgtcgagttgggtcttctctttggcattgttctcagcatggtgtttatattgctgcgcttgggtaaccccaaatttgaggtcacccttaaacagcatgaatccacgtactatgtgcacatcgttccccaatcggatgtctattacacaggcgtcgatgcactacgatctgagttgcgaggagcatgcagattgtatcacaatgatttcccagtggttctcgattgcgcacgctttatgcagttcgatgccaccttcagtgagatgctgatatcggtggccaaggagatggccagccacgatgtcctgctaatcctgcagaacatgagcctcaaagtgcagcagatgctgcccgtgatgggtaatgtgcggttctgccaggaggatagccagctttcgagtcatctgcaggtggaaaaggaggcacctgttgtggaggccaagctatagccaacttcctatctgatgtcggttcgttccagtctgtttgatccggttatgagcgaacgtcacagcatttttatcttcggacttgttaccgcttgacgttcgcacgcaaattgcgtaattaggcagcgccagcagttagttagttaagtgcttagatataggtgtttagttagcgactttgtaaatacttatgtgcattataaaaatacagtactccccaacaaa

SEQ ID NO: 13065 - protein, 640 aa, DROSOPHILA
MRWPRKHTFGLWPKRNGRNRSSGEATGGQPQATVATIYDPGCEEKEKYTAQNGDDYYGQAHTVDLDVASKYSKPKEAHWLVRRIFFLSWITSYDREQAFADLIAGITLGLTIIPQSIAYAALAGLSSEYGLYSAFIGSIIYVFFGTIPQVSIGPTSLMAILTLQFCADKPVQVVIVLAFLAGLVELAMGVFQLGFIVSFIPAPVTKAFTSGTALIVVFAQIKNLLGVRIKGFPSIGDFFTNIRPTDAAMGISCMVVLLSLRLLSQVNFKQDTPVTRRLKKILWYISISRNALVVFFTGLLVFIWVKKSSIEAVPFALSSKVSSAMPTIKLPPFAFEYQNRTYVFTDILHELGSGIVVVPIVAVLANVAIAKAFVKDGNLDASQEMLTLGLCNIAGSFFSAMPTCGAFTRSAVSQASGVRTPMAGIYTGLIVLSALSILTPYFQYIPKASLSAVLIAAVIFMIDLAPVKELWQTNKKDFFSWVGSFIICLVAGVELGLLFGIVLSMVFILLRLGNPKFEVTLKQHESTYYVHIVPQSDVYYTGVDALRSELRGACRLYHNDFPVVLDCARFMQFDATFSEMLISVAKEMASHDVLLILQNMSLKVQQMLPVMGNVRFCQEDSQLSSHLQVEKEAPVVEAKL

SEQ ID NO: 13066 - DNA, 6569 bp, DROSOPHILA
gaacattggaataccagaggtgctcgagcggttcggtccctttgatcccatgagagttagggatatagttttcaagcaggataacaacgaggtggccaccatcagagccaatctgactgacctggtggtcaagggttttgccaacacaaaggtcaaggagagtcggtgagtacaaagaatatgaaagtcctacagataaattatgtatatttatactgctgcttttggagtcaataaatctctgcaactttgcggaacaaatatataaatatcttttttcgaccaccagtgtgagcaagaaagactttagctggcagaccaaaatatatcttccgaaaatgagactggatggaaggtatgaaatggctggacgaatactccttataccactgagtggctctggcaaaatatttattgagattggtaattagatttctatcgatatttaaatgcgggtgcaaatgggcagctaacacttttaaattcccgcagatgatcttgacattttgctactaacaaaaatacgtctgtatgaaaagggtggcttcaccttcgacaacgtgaccgctgtgcaggttcaactgaatctgtccaaagtgcgcacttatctggacaatctattcaatggacgtagcaaggaggtggagcgcagtacgaatgagtttttcaatgaaaactggcgggatttctacgaggccctgaaaccactcatcgttgagacggtggaaaatatcctttatgatgtaatgtctacggtttttcatttaataccagccaactttttcgttgaggacataccaacgccccagcaactttatggtccaaaggagatacttggcaaaaaagaatagttgagtgatatctattattgttaacttgtagtacgccatccccaaattctttcaatatttgtaataaaaatcattaacgaatatccatttttcattttatcagtaacttttattgtataatgagaatattgctgacttcccgctaaagctcaggctcgaatgatatcaaccttattgggagagaaatatacaccgaactccctctctgaaaacgagaaaaatcattaagttattcaaaaactgtttgaaacatggcttaccattcttgtccacgtgatatgagcgtttcctaaatatataaataatcagcatggtggttattattgccaagatgaaggccatagaaacaatcgttataaatacccacttcaagtgtctttcactcttttcatggcctgtaagggacccaagtgaatccatagattggcatgagtatccatctatcggactctcaccatcccagcagacacaagaacccggaaattcgcagagcccattgaggcactcgggttcgcaaatcggaagacagatcaaattgttgtcgtcctcattcctatgcagcttatattgtttactacaagtacaaattccttcgacgcaggttccatttcggcagttcttatcacaatctgaataatccccaagtagctccttgtcaagctggcaacttttactttcttcaacgaaaatgtaaccgtcatcgcacttgcaaaaatctggagaaacgcaaagcccgttgacacacccgtccttacaaaaaggtgcacaactgatttccgtttccttgctgtatccttcatcacaggaacactttcctggtgcaacacagaatccgttcttgcatccacctgagcaaactggagaacatctgttttcaccgtccatttcatatccatcattgcaggaacacttttctggtgcttcacaaaatccgttctcacatccttttgagcaaattggtttgcaactgtttcctgtttccttgctgtatccttcatcacaggaacactttcctggggcaacgcagaatccgttcttgcatccacctgagcaaactggagaacatctgttttcactgtccatttcatatccatcattgcaggaacacttttctggtgcatcacagaatccgttctcacatccttttgagcaaattggtttgcaactgtttcctgtttccttgctgtatccttcatcacaggaacactttcctggtgcaatacagaatccgttcttgcatccacctgagcaaactggagaacatctgttttcactgtccatttcatatccatcattgcaggaacactttatctggtgcatcacaaaatccgttctcacatccttttgagcaaattgggtttgcaactgtttcctgtttccttgctgtatccttcatcacaggaacactttcctggggcaacgcagaatccgttcttgcatccacctgagcaaactggagaacatctgttttcactgtccatttcatatccatcattgcaggaacacttttctggtgcatcacaaaatccgttctcacatccttttgagcaaattggtttgcaactgtttcctgtttccttgctgtatccttcatcacaggaacactttcctggggcaacgcagaatccgttcttgcatccacctgagcaaactggagaacatctgttttcaccgtccatttcatatccatcattgcaggaacacttttctggtgcatcacaaaatccgttctcacatccttttgagcaaattggtttacaactgtttcctgttcccttgatgtatccttcatcacaggaacactttcctggggcaacacagaatccgttcttgcacccacctgagcaaactggagaacatctgttttcactgtccatttcatatccatcattgcaggaacacttttctggagaagcacagaatccgttcacgcatccatccttgcaaacaggagtgcagacaccttccagcttcgtgtacccggcgttgcaggagcactcgttgggcgccacgcagactccgttctggcaaccctcgggacaaacggccaagcagacattgtgccctattttcgtatatcccgtcaggcattgacagacgtccggggcagtgcagtttccattcacgcatccgttttcgcagattggaacgcagtttccatcgatgtccttttcgtagaatttgttgcactcacatttgtcgggagcccggcaaactccgttgctacagccatttttgcatttcggctgacactcaaacgatttggactttggcttgggaatgaaacctggattgcactcgcagcgattcggagccgcgcagaagccattgactgccgcgcagttatccttgcacgttggcagacacacctgggtggttggattcagcttgtatcctttgttgcaactacaattgttgggcgttatgcaagtcccattgggacaaccactagcacattggggtatgcagttgtttgtcgttttgtccagcagatggcgcgcggaacagatacagcggccaggagattggcaggttcctcgactacatcccttgcagtagggcacacatctgtacgaaatagagaaaagcaaatgtcataaatcaatggacataaatcgatgcatttaaggcaatcttttaagttttcattttggcaaactttttatctcgtatgtgaattttgcaatttaaaatgaccgtttatgacctcctaatcaacattcatttccttctttttaatgggacgatatttgtattttaccgagttattatcatgcattttatttgaacacacaaatgaattaaaatgaatgaagctggcgttggaaatactatcctacgacttgacgattatatattcagagaacctatttatacactgatacattaagtaatacaaactgtcccgattaaatattgattatatatacaaattgagtcttattcttttagatcgtattacctaccggttagatggatcgttatttaagttgacatatcctttcttgcaggtacatacatttggtttcgtgcagaagccacttccacaattaactttgcattgtgcaagacatctgagtgcggagctccttacttttttgtaacccttgcagcaatccctcgtttgaacgttctaagcccgtaaattaattaaataatgaattgaattattatttttgatggaccgcctaccacagcagttcctttaatattcctagtaacattaacagtgcagatctgagccgatacgagtccgaggagcagggaatatatggttatcctacaaatccacatggtgtctttaagtatacaactgatcccggtgcctttcaaaatattactaaagacgcttgagctaaatatatttttgcaaatgcttttgcttgaaacaaaacttgcggaggggacttatcagagaactcaattcaagcaaatcccatggagatttttaccaagcggttagtggagctaaattgcttatcgcaattctattctcctttataagaagaatgagagaggatctcgcccagtctgccaaagagcaataaacaaaggaaaatttgaaggtctttcatttgttgttacaaaagtcattactccaaatatttatcatatttaatttcaatttgtaaaacaagacgccactttttgtgataaatcaatttttaccattattaatatcaacatctgttcgcactacatgcgttttaaaactatttagcagaatatagggtatgtatcagtcggactaaccgactatagggtatacatatctgtattttactatgttaatcaaactaggcttgtgtataagaacgaaatatgagagcataagaaaatgtaatgaattgtaattgtaatacgagaataaaagtatacaacgatcagcagaggttaatatactcttgcatatgatctataaatactgatggatatctattataacattcgaacacatctaatgcatttttttaagctcagagaatcgttaaaaacagtcggtgattctgataaaaaaaatatacatttaagttacgaacttcttatcaaagtaatgatacccttctttagggtgtaaagggtgattggctctttatagaggttatgctcgcaaatgttaaatataatatatataaaatactagaccatgacataattcaactatgtaggactaaaatttatagttagatgagagtcatgaaaatctttgtaaataaataccggaacaatccctctctcacattttttgtgactttataactatctaacacccactcaatggatactcagatacacacagcaatctcaaaaatatatgacatcattcgagcgatttttgaagtttgatccatgtatttatacttattgcagttattagataaataacacattgtgttcaatttgaaagatgctccatttaatgtttttattatggcatctaaactttttattgcacctcagttcaagcaattaagttctcccagatcaaaacagagccgaatacagagatacaaacagtgtttcgttcgtgccatagttgtcagcgtattttccagatagatattaaattagcttaccggttcggttgcaaggtaaagtcgctacagtttcagagtcgcataacaacagcaatgatagtagctacacagcgagaaatgctgctcataaagaatatttatgtatttatttcttcgatccggcaaaacatttttatacgcactctatttactactaagttaaattaccctaaatatgaattggaaataaaatttttatatactttttatatactttcttaaaaaaaaacctattgataatttttcattatgtgatttttctgtactctcgtgcaataaatgtggaataaatttaattttgcattgcgagcgaatgaaaatggattgattctggtattacccagagactccagattcaattcatcaattgcagtcgccgagtcatcagcagcggctatatatattgtccagataaaaactagcgccactacgagttgtatctcattcgcagctcgtgcgtagttaactcgattaaggatctccgcttgttgtgtctgcgattcccgccgtgacagtgacgcaagctttccaccatgctcctaattggattactaatgctactccatgccggcctccaaggagcccagtgtgttgccttctacacggaaaaacgtaagtccacaaaaggactttaaaattatgaggaaatggaaaatgctgaacaatttgaaagagctatcaaaagtgaacaaaatactgtatataataatcgatatgatttcattgtagcctcctatattgagtcctgcaagatttatgaaccggagttcaccaagtgctcaactcgttcaatacaggcatttatgaaccagctcgtcaaaggtgagatatcaccatgataaccacgacttgtgcgactgacttcctttgttatcctttaggtgtgcccgaaatagaggaatcctttggacccatcgatcccatgaggcaggaacagctggtgttcaagcaggataacagcgacgtggccaccctttccgccaatcttacggatatgctgatcaggggctttggcaaaatgctgatcaaggagagcaagtgagtagctatcgattccacatagccgtcaagagcaatcaaaagttgctccattgaggtcgttgagctcctctataggcaaacatctctgatgggaaacacc

SEQ ID NO: 13067 - DNA, 2413 bp, DROSOPHILA
gcgtataaaaatgttttgccggatcgaagaaataaatacaatgtggatttgtaggataaccatatattccctgctcctcggactcgtatcggctcagatctgcactgttaatgttactaggaatattaaaggaactgctgtgaacgttcaaacgagggattgctgcaagggttacaaaaaagtaaggagctccgcactcagatgtcttgcacaatgcaaagttaattgtggaagtggcttctgcacgaaaccaaatgtatgtacctgcaagaaaggatatgtcaacttaaataacgatccatctaaccgatgtgtgccctactgcaagggatgtagtcgaggaacctgccaatctcctggccgctgtatctgttccgcgcgccatctgctggacaaaacgacaaacaactgcataccccaatgtgctagtggttgtcccaatgggacttgcataacgcccaacaattgtagttgcaacaaaggatacaagctgaatccaaccacccaggtgtgtctgccaacgtgcaaggataactgcgcggcagtcaatggcttctgcgcggctccgaatcgctgcgagtgcaatccaggtttcattcccaagccaaagtccaaatcgtttgagtgtcagccgaaatgcaaaaatggctgtagcaacggagtttgccgggctcccgacaaatgtgagtgcaacaaattctacgaaaaggacatcgatggaaactgcgttccaatctgcgaaaacggatgcgtgaatggaaactgcactgccccggacgtctgtcaatgcctgacgggatatacgaaaatagggcacaatgtctgcttggccgtttgtcccgagggttgccagaacggagtctgcgtggcgcccaacgagtgctcctgcaacgccgggtacacgaagctggaaggtgtctgcactcctgtttgcaaggatggatgcgtgaacggattctgtgcttctccagaaaagtgttcctgcaatgatggatatgaaatggacagtgaaaacagatgttctccagtttgctcaggtgggtgcaagaacggattctgtgttgccccaggaaagtgttcctgtgatgaaggatacatcaagggaacaggaaacagttgtaaaccaatttgctcaaaaggatgtgagaacggattttgtgatgcaccagaaaagtgttcctgcaatgatggatatgaaatggacggtgaaaacagatgttctccagtttgctcaggtggatgcaagaacggattctgcgttgccccaggaaagtgttcctgtgatgaaggatacagcaaggaaacaggaaacagttgcaaaccaatttgctcaaaaggatgtgagaacggattttgtgatgcaccagaaaagtgttcctgcaatgatggatatgaaatggacagtgaaaacagatgttctccagtttgctcagtgaaaacagatgttctccagtttgctcaggtggatgcaagaacggattctgtattgcaccaggaaagtgttcctgtgatgaaggatacagcaaggaaacaggaaacagttgcaaaccaatttgctcaaaaggatgtgagaacggattctgtgatgcaccagaaaagtgttcctgcaatgatggatatgaaatggacagtgaaaacagatgttctccagtttgctcaggtggatgcaagaacggattctgcgttgccccaggaaagtgttcctgtgatgaaggatacagcaaggaaacaggaaacagttgcaaaccaatttgctcaaaaggatgtgagaacggattttgtgaagcaccagaaaagtgttcctgcaatgatggatatgaaatggacggtgaaaacagatgttctccagtttgctcaggtggatgcaagaacggattctgtgttgcaccaggaaagtgttcctgtgatgaaggatacagcaaggaaacggaaatcagttgtgcacctttttgtaaggacggatttttgcaagtgcgatgacggttacattttcgttgaagaaagtaaaagttgccagcttgacaaggagctacttggggattattcagattgtgataagaactgccgaaatggaacctgcgtcgaaggaatttgtacttgtagtaaacaatataagctgcataggaatgaggacgacaacaatttgatctgtcttccgatttgcgaacccgagtgcctcaatgggctctgcgaatttccgggttcttgtgtctgctgggatggccatgaaaagagtgaaagacacttgaagtgggtatttataacgattgtttctatggccttcatcttggcaataataaccaccatgctgattatttatatatttaggaaacgctcatatcacgtggacaagaatgagagggagttcggtgtatatttctctcccaataaggttgatatcattcgagcctga

SEQ ID NO: 13068 - protein, 800 aa, DROSOPHILA
MFCRIEEINTMWICRITIYSLLLGLVSAQICTVNVTRNIKGTAVNVQTRDCCKGYKKVRSSALRCLAQCKVNCGSGFCTKPNVCTCKKGYVNLNNDPSNRCVPYCKGCSRGTCQSPGRCICSARHLLDKTTNNCIPQCASGCPNGTCITPNNCSCNKGYKLNPTTQVCLPTCKDNCAAVNGFCAAPNRCECNPGFIPKPKSKSFECQPKCKNGCSNGVCRAPDKCECNKFYEKDIDGNCVPICENGCVNGNCTAPDVCQCLTGYTKIGHNVCLAVCPEGCQNGVCVAPNECSCNAGYTKLEGVCTPVCKDGCVNGFCASPEKCSCNDGYEMDSENRCSPVCSGGCKNGFCVAPGKCSCDEGYIKGTGNSCKPICSKGCENGFCDAPEKCSCNDGYEMDGENRCSPVCSGGCKNGFCVAPGKCSCDEGYSKETGNSCKPICSKGCENGFCDAPEKCSCNDGYEMDSENRCSPVCSVKTDVLQFAQVDARTDSVLHQESVPVMKDTARKQETVANQFAQKDVRTDSVMHQKSVPAMMDMKWTVKTDVLQFAQVDARTDSALPQESVPVMKDTARKQETVANQFAQKDVRTDFVKHQKSVPAMMDMKWTVKTDVLQFAQVDARTDSVLHQESVPVMKDTARKRKSVVHLFVRTDFCKCDDGYIFVEESKSCQLDKELLGDYSDCDKNCRNGTCVEGICTCSKQYKLHRNEDDNNLICLPICEPECLNGLCEFPGSCVCWDGHEKSERHLKWVFITIVSMAFILAIITTMLIIYIFRKRSYHVDKNEREFGVYFSPNKVDIIRA

SEQ ID NO: 13069 - DNA, 3655 bp, DROSOPHILA
ttcaatggttcaccttgatcatttaatgctgatgtgagctcatcacccagctgcgcatttccagtcaacggccgccctggaatatattcttcatccaaaagtgtgtttctactttccttgccccttgatcgcctgctggcctggcacagaaagtcatctgcctcgcattcgaagtcatccttaggtttcttgcactttttgttctttggcttcggagatttggtagtttcgcttataagatcgtcgtccataaagccaccggattttggcttgcaactatcgtaggcgcttttagttgagcacattcgagtggttttcggcacacaagtgcttttccttgagcaacgcttggtagtcgggcaagtgggtctctttgtgcacaaattaggcttcgtttcatcggaatcctcctcatcccggcagttatcatcgagacctacttccatggactgaaagtcctgcttgcgtatattggccatcgcttgtctaccatgtgttgttagactcgctttctttgaaaagtttcagccggtgacaatgagagatcatctacagtgataacttaccgtcagagtcgacatcttcatctcggccaaggcgctcatcaagtagcttgttcaaggagttaagatcatctaaggttagatccttgaggctctcctgtacctccgcatcggtaagaccatttgtgaggtcgggatagtcggcaggatcggtcaagggagcattcaggacactcaaatccttggaatcggcctgggattcctagagcaccgattgcacaatctctcaaaaaaagacatttaacaataaacttaccacaggaaatgcatttagcactaaagggttaagactgcaaataaagcagatcccaagcagaaacattttattttagatgtagtctttgactgagaattatttcaaagccttgttgacagctgcttttgtcaaaaccccctctatttaattaacttattttaatacacaatacacattgtttaaaattttgcattttatttttaagttgttctctgagtaatctttcaacgattacttggtcaacataatcaatctagtgtccgctacggaaactgatccggtggttaacttcgtaacagaaagtcaaacgaatctcattgaattgagtttcaacttatttcaaaccttatgcctagtctaaatgtatattaactcttttgcttgggtgctatttttttggcaagagccgtttgttggtcattgcttttctttttaggcttcttagccttcttgatgccgtcgactttgacgccccggtactctgacttcttcttttgaccagtaggtgctccttcttttttcaaactaccgttctccttgcccttcttcttgtctagccttttttttgcgcccgcagaattctggttcttagctttggtctttgaggacgttttcgaagcagctgaggcggcggcagcatcgcgcacttgcttggcacccagttttttgacttgatagcgctccacgttgataggcctatcatctagaagcgtctgattaagttcaagagctagtcccacagcatcgggcttttggaaacagacgtatgctactcctttgcagcccttgtcgccatcctgcaggcagcgaatgtagtctatttcgccgcaactggagaagatctctcgcagctgctcctcggtggccgctggaatgtgtagcacatgatgttagcatttagttaaaactacttactgctttacttacagtactttaggctgccaacgaaaatggttcgcttggcatccttgtcactgggctgcttatcctttgcctggccgaatttctccgccatagacgcgggagtcacccgcaggtgattttccttgaactcggagccattaagagccagcgcttgctgggcaatctcgggtttctcgagcaccacgtaggcgttcagggagccggctaccttgcgctgtttgtgcttgaaaagctgcttaccaccggcggtgcgcagccggatggattgaaccaacccatatggctggaacaatttcaccagctgtacacgtttggtgttgattggcaaattccccacgaaaacggtggacgcctcttctgcaggattgcggatccgcttaactccttctgtgggatgaaaatgatggaaattgatgaatctatgggaatatggttttttgttaaccttaccttcgtccttgttattggcattggctttggcttttttagacacttttccttttggtttttcatttggagcagtcgttggttccttctccactttttcctttttggtggccttactttcgactttaacctgcgcttctggttccgttttgatctccttgggcgccagtttgttttgctgcttcttcagcttctgtgcctgcttcttggccttctttttttcgatcttggccaggtctttggcggacaattttttgggactttcctggacagcggcctttacttcatcttttggcactttaaccgtcttctttttgggcttcgtctttgatttctttgtcactttaccatcctccacgacgcctggctcttttttaatcggctttaattcagccttttctgattctttcgcttttggtgttttcattcttgcacaaattagcactttatcaataatatgttttttctacacgtgtggtggcccaaaagtgtgcccgcccttgaccgttaaaaataccatgcgttcaaaataaaaatactgaaatgttcaagataaaatatataccgaatataccgtttttattatttaaatcacaaacatttgaaaaaatgtaatgcaaattaaaattaaatttaagaatttttgaattatttcttaaaaaacctatttttggatatttatgttgtctgcatatttagacaacaaaaatatttaataaagttataaaaaatgatataaactaaaattattgaataataattataagttatttcgctttatttaatcattattggtcttgtagaatggtggaggccgccgtcccgacaattcaatcaatgcacctgctctcggtggtaaacttcatccacacgtcctgcatcgccaaggtgaacaacgacaatatcctgaaacgggatcagagcttgagctactggtcgcaggttcactcgaactcgaagcgatccacgacggagaggcatctgcagggacccggggactcgtttctcagcgatgtctatgaggagagtatttccaccaaaacacagggattgattgtcctgcccaaagtcagcatcaccatgctgcagtcctccattgtggaggagattatctcagtagctgccttggataatgtacaagtgagtaaattagccaacaaagctttgattgatgaaattatcacaatctttaccatcttctttataggatctaagctgcgtgtcgctgctcaccttctacatggagggcatctccacgaagttccacatgggcaagacgacgcgtgcctccatgcacaacgtctatatccagcaaacggtccaatcgggcagcagtaacaaaaagggtggcatcatgaagggcacacgtgctctcttggcacatctttcctcacagacgcggccggacaatgtgcaaggagagcccattcttatcgagacatcggagaagcagttggaggaggtg

SEQ ID NO: 13070 - DNA, 1533 bp, DROSOPHILA
aaaaacatattattgataaagtgctaatttgtgcaagaatgaaaacaccaaaagcgaaagaatcagaaaaggctgaattaaagccgattaaaaaagagccaggcgtcgtggaggatggtaaagtgacaaagaaatcaaagacgaagcccaaaaagaagacggttaaagtgccaaaagatgaagtaaaggccgctgtccaggaaagtcccaaaaaattgtccgccaaagacctggccaagatcgaaaaaaagaaggccaagaagcaggcacagaagctgaagaagcagcaaaacaaactggcgcccaaggagatcaaaacggaaccagaagcgcaggttaaagtcgaaagtaaggccaccaaaaaggaaaaagtggagaaggaaccaacgactgctccaaatgaaaaaccaaaaggaaaagtgtctaaaaaagccaaagccaatgccaataacaaggacgaagaaggagttaagcggatccgcaatcctgcagaagaggcgtccaccgttttcgtggggaatttgccaatcaacaccaaacgtgtacagctggtgaaattgttccagccatatgggttggttcaatccatccggctgcgcaccgccggtggtaagcagcttttcaagcacaaacagcgcaaggtagccggctccctgaacgcctacgtggtgctcgagaaacccgagattgcccagcaagcgctggctcttaatggctccgagttcaaggaaaatcacctgcgggtgactcccgcgtctatggcggagaaattcggccaggcaaaggataagcagcccagtgacaaggatgccaagcgaaccattttcgttggcagcctaaagtactcggccaccgaggagcagctgcgagagatcttctccagttgcggcgaaatagactacattcgctgcctgcaggatggcgacaagggctgcaaaggagtagcatacgtctgtttccaaaagcccgatgctgtgggactagctcttgaacttaatcagacgcttctagatgataggcctatcaacgtggagcgctatcaagtcaaaaaactgggtgccaagcaagtgcgcgatgctgccgccgcctcagctgcttcgaaaacgtcctcaaagaccaaagctaagaaccagaattctgcgggcgcaaaaaaaaggctagacaagaagaagggcaaggagaacggtagtttgaaaaaagaaggagcacctactggtcaaaagaagaagtcagagtaccggggcgtcaaagtcgacggcatcaagaaggctaagaagcctaaaaagaaaagcaatgaccaacaaacggctcttgccaaaaaaatagcacccaagcaaaagagttaatatacatttagactaggcataaggtttgaaataagttgaaactcaattcaatgagattcgtttgactttctgttacgaagttaaccaccggatcagtttccgtagcggacactagattgattatgttgaccaagtaatcgttgaaagattactcagagaacaacttaaaaataaaatgcaaaatttt

SEQ ID NO: 13071 - protein, 435 aa, DROSOPHILA
MKTPKAKESEKAELKPIKKEPGVVEDGKVTKKSKTKPKKKTVKVPKDEVKAAVQESPKKLSAKDLAKIEKKKAKKQAQKLKKQQNKLAPKEIKTEPEAQVKVESKATKKEKVEKEPTTAPNEKPKGKVSKKAKANANNKDEEGVKRIRNPAEEASTVFVGNLPINTKRVQLVKLFQPYGLVQSIRLRTAGGKQLFKHKQRKVAGSLNAYVVLEKPEIAQQALALNGSEFKENHLRVTPASMAEKFGQAKDKQPSDKDAKRTIFVGSLKYSATEEQLREIFSSCGEIDYIRCLQDGDKGCKGVAYVCFQKPDAVGLALELNQTLLDDRPINVERYQVKKLGAKQVRDAAAASAASKTSSKTKAKNQNSAGAKKRLDKKKGKENGSLKKEGAPTGQKKKSEYRGVKVDGIKKAKKPKKKSNDQQTALAKKIAPKQKS

SEQ ID NO: 13072 - DNA, 9285 bp, DROSOPHILA
cggaacctaaaatagaaagtagaagcgacatggagcagattgcatgccaaatcatagtcgcactatcaaggatatacctattatatttttatggtttgcataaactcaaatggcaacgggatgggggcatcattgggtgcactgggtggcatggggcagtggagcataaggagctcaaaattagaagacgcattcgtgtcaaaggaagtttcaacaatggcggaaatgttgtttattaaaataaatacgaggacaaggaaattattatgagttctggagggagtggagttggcagttgtcccacggattggagcagcacggggttggtgggcacaaacacttgctgtcctggtgacagactgtgcaatgcgtgtcgtccgggtctcaaaaaaaaaaaaaaaaacaatttcctcaagtgggcccccaaaaatatcattcgaaagtatggacgttcgtcctggctggggatccttggatgataatgaacacggtgggatgggtgcaggtggagatggggcgccaagcttgtttatttgcgaggaaacagcacctcggtggagctgtcatgacgactgactccaggcccggaacaagttaataaatcaatttggactaacttatcgagtccgtctgtagcgtaggcgaggcgccaaacttttggccagaaagtttccgcttcataaaggcaatacccctttttgaatcaacgaaagggttgatgggactagtggaatcttagctgagggtaattagtataagcacaaatatcacatatttgggagtgatatcagggactctgatctctttttatctgctttttttgaatgtactttcctttttcaattgtacaaaaatattaacaattgattaaagggtacaaccttgttctaaaacaaaaatacacaagtgatttttgctcttgcacgcaatgccaaccgcaacacagaaatttcattggaaccgaactcactctctccatcttaaccaactccttccacagatgcaggcgtatcgcgataacttcaagcaaacgccctgcccatcggccgtcgaccttcaggcggcgggaccagcccaccaatcggccaccgcctctcggctgcccttctcgcgcagccagcgtgggcgtgacccctcggcaagtggcgcctcagtttccgcctccgttgctggtggtctaacgcccaggatgatgagtccgggtccgccgggcgccggaggaggaggaggaggaggagtgagcggcggcggcagtggagatccctcggccctgttgcgccagaatcaggagctgcgccaacggctggccgacgagtcgcatagctatcgacgccgcctggacacctacaagcaggcgcagcacaaccaggccaacttggtcagccggctgcagtcgaagatccagcagtatcgacagcggtgtagcgacctggaggagcgcatgcacgagaccattaagccgacggcgggagtaggacccaagctgaccacgggtcccaccaaccaagtgctggtgagtattcaaaagctgggtaagaatgtactttattgctaagggcaacgttgcgtatgagtaatacatttttgtgcgatttaatcaatttgatttataattcggggatcaggggctaatccgattgcagttatcattaaaatgccaacttgttccattgccatgtacttacaaataaatcaatttaaatccaaggatactctgtagcttatgcccattttgtttttcagtgttcaacttctttaactctgggacagagcagcttgccctgcagctcctcactggactcgccgccgcccagttgcagtcgtgactatgttgacgatgtcttggtcaccggaggcggcgccggtgcggcggaactgtgccgcaaactggaggaggagcaccagcgctgcgagcagattgtcgcccagaacagcgcactgcgtcagcagctggaggagtcgaatcgcaccaacgaggcgctcaccaacgacctacagaagctgaccaacgactgggcgagtctgcgggatgagctgctgatcaaggaggatgagttcaaggaggaggagcaggccttcaaggactactacaacagcgagcacaatcgcctgctgaagatgtggcgcgaagttgtggccgtcaagagatccttcaaggagatgcagacggccatgaaggcggaggtagccaagatgggtcaggagatcaattgtgtgggcaaggacatcaatggctccaacgcaacggtcgcctttgccgtccagcaagccaagcgggctgcggatgatgaactgaagcaatcgcagcgcagcaacgatgaactccagaatcaattggccaccctgaaggtgcagtacgagagtgcccggcacgagatcatggagcgggatcagcgactactggagctaatgaatcagttgaagaagctggaggatcgctgcgcccaagccgaatcccaagcagctctggccagtcgctatagcgacgagatcgagcgactgaacaattccatgcgagaaatcgcgcaggccgtcgttcaagatgctgagaacgcagatcgcgaagcagacgccgaggtcaccggcggtgtcatgcagcacatgcacctcacgcgtgacgccgcctctgttgtgggcggagcaggtggagcgggcagcaccgccggcggcggagggaaatcaccgcgtcgcaactcgacacgcgcctctcaagccttcgccgagggcaccatctcagccgtccaggcggcgctccacaaataccagctggccctgcacgacatgcaggtgaaattccagaacaccagcgagaccctgcgcaccaccaaggcccagctggagaccagcgagggtaccaaacagctgctgaccaccaagatgcagcagctcaccgagaaactggacagcagcaactccaagctatcggaattgctgcaggaaagggagagtctgcagcgcggactggacgatatccgtgtccagaagcagcagtctgagatgggacgagccgatatcaatagtgcggtaagtggataagtaccatatagtaccccatactaaaaaaatttccgatcgaggaatccaaagttctttggaattttttttaattaataagaaatatctggttttttccgagtgtggatgtcaaggcggattgggggcggatcgttgataactcgattagtctgcgtctgcctctgattacgccgtagattgtatataataatgatgtttccaactcaaatccggggtgatgccatgtctgcgatgagttacaaattatggctgcgaagattgcatttgcagccggcgtgagtggaaattgcaaggggataggttcatcagcaccaagatctggtatctctaatggggttgactgggatcggttataaagtgggcatagtatagagctagactatatcaaaatggcgttaaatgcaataattatatatttctaagtaagcagatgttacatagttatgtaattatttctaaaagctgtcagtgggcttaaaaaataaaaacgacatgtatttatttttgaattcaacacattttacaaattttcttgtagttcgagaatctgagcagtgattatgagaagatgcagctgaactgtggtaaactccaaaaacgtatcgattccatggaggaggacaaaaaggcagtggagctggagatccaacgtatactgaaggacaagaacataaccgagttgaatttgaggtattaatgatagtgccatttaagttaaacccactaaagatctgtaatcccaataggtctgaggaagatcgcagtagtcgtttgcgggaggaaaccatatccttgcgcgaggagcttaaccgagtgagcctgaatcgtgatcttctcgagcagcagcgcatcgagtccgataatttgatcaatctgctcgagaaacagaagtccgacctggagtacgatctggacaagctgttgctggagaagtgcgatctgcaggagaagcacgagaagctatccaacaatagctgctccaccagtgatgagctgaagagcgttcaaaattgccttcaggaggcgcaggaggagcgcaagaagctccgtattcagtccgtcgatcagtgcaatgaaatcggagagcttaagaaggagctggcgatactggacaaggcacgactcgaactggagacggacaatctgtcggctggggaaaagctcaagtgtctgcagctggagaaggagaaaattctgcaagacttggcctgcgtcacccgggatcgtggtgacatccacaatcagctaacggcgatgtgtcgcaaaaaggaggctctgaatgaggaacttatgcggactcggcagcgtctggagcaaaccaccgagaccaatagccggctgaatagaaatctggaggagatggtgaaggatgtggaggagaagcaagtggtcatcgatctgcacgagaaggacacacatcgcttgaacgaactcctggccgccctgcgttcggagaaggaatccctggaatcggtgctcttcgatacaaacacctcactggaggccaccgaggagcgacgcagtcagctggagcgggatctgcaggaggctctggtgcgtgaggagagcctaaagaatcatgtggctcgcttgcaaaaggagctggagcagtgtcagcgcaaggcccaagagaccaagacgcagctgcttaacgccgcccgtgcggctgagagtgacttcaaccagaaaatcgccaatctgcaggcttgtgcagaggaggcggccaaacgacatggcgaggagattctacagttgcgaaatgccttggagaagcgaatgcaacaggctctgcaagcgttgcagacggccaaggatgatgagatcgagaagttgcaggagcgtctggccaccttgcaggcgcatctcgagagccttgtccagcagcatgaggaggcactgattcgggcggagagcgagaagcagcaagcccttttgattgcccaccgggataagcaagcggtggccgagcgtttggaggccgtatcccgggatctcaagaccgaacaggagtccctcgaccggagcagacgggaggccaatgcgcgcgatgagaagcagagggctgccattgcccagctgaaggacgagatggtgcagatgcgcaccaaggaggaggagcacaagtgagtgatagtatatttaattaaatttccaaataattcatatatacatacttgataatttacttgataatttaggattaagttggaggaatgcatccggaagcaggagctgcagttgagcagcttgcgcgaagaacgcgaatccttgtgccgtgtgagtgaggaactaaagatggagattcgtctgaaggaggacagaatggagagcaccaacaatgagttgcaagatgcgctgcgcaagtccaaggagggtgagttctggggcacctaatcttaaaaagaaatccatcaaattataatccaaaatcccgatttcaggtgagggcttcatcgatagcctgcgcaaagagttgaccgactgtcgccgccaactggcggacagcaacatcgagcgggacaagtattccggcagcaacaaggagctgcgcgaccacgtcaagcgtgtggagagcgccaagcgggagcaggcgcgcgccatcgaggaggctctgcagaagatcagcaatctggaggataccaagaactcgttggagaacgaacgcactcgattgagcaccatactgaaggagacggagaatcactttacaaagaccacccaggatctgaatgctaccaaggcgcagctgcagaaggctcaagtggagttcgcccagaaggacgagggcggcaaggagttgcagtgcaagctggtcgccgaggtggaattgaaggagcgggcacagcaggagctctgccagattaagaagcaattatcggatctggaagccaatctgtgtgccactcgccaggaattgggcagggctcggtgtcagaacaaccaggaggagcatcgcttccatgccagggagcaggagttggcccagcgcttggaggagggtcgtggtagggagaagcgcctggaggatcagaagcacaacctggaggtctgcctagccgatgccactcagcagatccaggagttgaaggcccgtttgggcggcgccgaaggtcgcatccgtgctttggatgagcagttgtcctgcgtggaactacacaagcgggataccgaacagaagctatcctcggtggttcacactctgcgccggattgctggcatccaagtggacggcagtgtaaatttgtctcatcgcttgctgagtccctcgcgaagattcagtccgtctcgcagctgcggagactatgacaacaggagcacatcacaatgcccagatggaccaattgatgtggacccggatctggttaggaagggtgtccgcaacctgatgcatcaggtggctcagttggagcgcgagaaggatgactacaaatcccaattgggagcagctaagaagcaactccaagatgctgctgaccagcagctacgatgcgatgccaagctgggcaaactgcaggccatgctaagaaatctccaagaggagaagagcaatctggaaacggaccgcaagatgaaaatctccgccatccaggcgctagaggagaagctcaagcatcgcaacgatgagtgtcagatgctaagagaacgtttggcccaaacagagatgcaactggctgccacatccgaggagaatggccagaacgaggaacgactggagaagagccgacagcagtgctccaaactggacaatgagaagcgccagctgcaggaggaattggccaaggttgagggccgggccagcaaactcgaactgcagcgtgttgccatggagggcgatcttaccaggctacaaatggccctacaagagaaggactgcagcattcgtcaaatggctgagcggctggagaaccaaaaccgtgccttgacccaattggaggatcgctgcaccgcccttaagtccaccgtcgatcagctgaaggagcgcctccagaagtccgctgtgagtgaaacccaactgcggggcgagataaagacgctccaaaaggagctttccgagcagggtcactgctcccaggccaacgaggataagctgaagttggtgcaaaagtctctgcagaccgctgagaacgagaagcgcatcctcaccgagcgcctagatagcgctcagaccaatctcaacgagctgcgacgtagccaacaggcccagctggatggtaaccagcgcctgcaggaacaggtgaccgatctggaggttcagcgttcggcactggagtcccaacttcggattgccaagtggaaccaggagagtggcggcgacaaggatctgacaaacggcaacggaggcggaaatggcgaggaggagctcagcaggcagctgaagtcctcgcagcgggaaaagtcggagctacgcagcaaactgcaaaccctacaggtaaactaattgtaaaattaattattggaatactgtccactgtgcgtatacgtgataaattaagtatacgcagcgttgttggttctatttcaacctagtttatatatacttgaatttattttcatatttcattatttacttctcctctaatttttcacaggacaaagtcaaacagttggagtgcgaccggaaaagcaagttttcgggtggaaacgcctatgatcgggctgagaagtccaactccttttacggtggcgcagctgaatccggcgagttcgactccaatcgctacgatgtgggtggaggaaatgctggcggaggctctttcaactgcggattggatcacagtgtaatcgagcaggagacgcgcgatctgcgactcaaggtgcgccgcctggagacattgttggcggagaaggagtccgagttggcgcgctgcaaggcgcgaatgaacgacagcgccaagtgccatgatggcttagatggagatcgttatcgcagtgctcagatgcacgcagagaagcttcttgacgccagggagcagtcgcatcggcaacaagtgctgcgcctggagaaccaggttggttatcctatgcaaatttgaaggtataagatctatttcaactccctcactttacagatctcaatgctgcgcgagcagttggcccaggaggccaaacggcgacagcagtacattctacgcagctcgaaggccaatagagaaatgcagcatctgaggagcaccctaggagattccctgcgcaatgtctcccagcacccggtggatccccatctcttggaaagcgagagccggcggtgagttgcatgcccttatttgttcttccaaaactaaattacattatacatttcagtctcgactcggccgtttcaatgagcctgccaccgtcgagctgccgggactatgatcgcgattagagtgatgtgaagttaagatttggttaaatttgatcccgccaagaagacgtaacgctcactgccatttgcatttatttagaaaaaggcttcctggagtcctccagacgcatctgagttaatcatcacgtgcatttcaactcgtttgccttagtacaattctagctgttcattgtctgccctgttagacaatcgaatatagtgcgttccatccagtcgcagcgatgatgccatccttacatctccacataaatatctatgcattaatgggtcacgagttccgattctccctgaacgtgggagaacaccgaactatatatcacacgacaattaacatcatttgcatttacacattggccagaacaccgaactagtcagcacgaaacaaagcaactatatttaatacttagcatatttaatcctatatacagtgcggtttgtcgactgcatttttataaaatatatacaagcgaaacacactcctaatgaacacaactatcgaccagatctcttacttattggtgggttttagcagcttttccagacgctgcactaccagcttcatgttggccttttgggacgacagtttggcaacttcgcctgcgatcgcgaacaaagcttttgccttgcctttctggtactgttcgactgccttggcctggttggcgatagccagctggcacaggttctcgatctcgtccggactgcagatttgctgcaggctgtgcagttcgattagctgtgatgggaagataatgtgtgtaatctcataaatttggaatattaggcgaagcttacctcactgactttcgctttggggttattatgaagcagatcaaccagctgacgtgctgcctggagatttatcagctcggcatgcaagctca

SEQ ID NO: 13073 - DNA, 5928 bp, DROSOPHILA
atgcaggcgtatcgcgataacttcaagcaaacgccctgcccatcggccgtcgaccttcaggcggcgggaccagcccaccaatcggccaccgcctctcggctgcccttctcgcgcagccagcgtgggcgtgacccctcggcaagtggcgcctcagtttccgcctccgttgctggtggtctaacgcccaggatgatgagtccgggtccgccgggcgccggaggaggaggaggaggaggagtgagcggcggcggcagtggagatccctcggccctgttgcgccagaatcaggagctgcgccaacggctggccgacgagtcgcatagctatcgacgccgcctggacacctacaagcaggcgcagcacaaccaggccaacttggtcagccggctgcagtcgaagatccagcagtatcgacagcggtgtagcgacctggaggagcgcatgcacgagaccattaagccgacggcgggagtaggacccaagctgaccacgggtcccaccaaccaagtgctgtgttcaacttctttaactctgggacagagcagcttgccctgcagctcctcactggactcgccgccgcccagttgcagtcgtgactatgttgacgatgtcttggtcaccggaggcggcgccggtgcggcggaactgtgccgcaaactggaggaggagcaccagcgctgcgagcagattgtcgcccagaacagcgcactgcgtcagcagctggaggagtcgaatcgcaccaacgaggcgctcaccaacgacctacagaagctgaccaacgactgggcgagtctgcgggatgagctgctgatcaaggaggatgagttcaaggaggaggagcaggccttcaaggactactacaacagcgagcacaatcgcctgctgaagatgtggcgcgaagttgtggccgtcaagagatccttcaaggagatgcagacggccatgaaggcggaggtagccaagatgggtcaggagatcaattgtgtgggcaaggacatcaatggctccaacgcaacggtcgcctttgccgtccagcaagccaagcgggctgcggatgatgaactgaagcaatcgcagcgcagcaacgatgaactccagaatcaattggccaccctgaaggtgcagtacgagagtgcccggcacgagatcatggagcgggatcagcgactactggagctaatgaatcagttgaagaagctggaggatcgctgcgcccaagccgaatcccaagcagctctggccagtcgctatagcgacgagatcgagcgactgaacaattccatgcgagaaatcgcgcaggccgtcgttcaagatgctgagaacgcagatcgcgaagcagacgccgaggtcaccggcggtgtcatgcagcacatgcacctcacgcgtgacgccgcctctgttgtgggcggagcaggtggagcgggcagcaccgccggcggcggagggaaatcaccgcgtcgcaactcgacacgcgcctctcaagccttcgccgagggcaccatctcagccgtccaggcggcgctccacaaataccagctggccctgcacgacatgcaggtgaaattccagaacaccagcgagaccctgcgcaccaccaaggcccagctggagaccagcgagggtaccaaacagctgctgaccaccaagatgcagcagctcaccgagaaactggacagcagcaactccaagctatcggaattgctgcaggaaagggagagtctgcagcgcggactggacgatatccgtgtccagaagcagcagtctgagatgggacgagccgatatcaatagtgcgttcgagaatctgagcagtgattatgagaagatgcagctgaactgtggtaaactccaaaaacgtatcgattccatggaggaggacaaaaaggcagtggagctggagatccaacgtatactgaaggacaagaacataaccgagttgaatttgaggtctgaggaagatcgcagtagtcgtttgcgggaggaaaccatatccttgcgcgaggagcttaaccgagtgagcctgaatcgtgatcttctcgagcagcagcgcatcgagtccgataatttgatcaatctgctcgagaaacagaagtccgacctggagtacgatctggacaagctgttgctggagaagtgcgatctgcaggagaagcacgagaagctatccaacaatagctgctccaccagtgatgagctgaagagcgttcaaaattgccttcaggaggcgcaggaggagcgcaagaagctccgtattcagtccgtcgatcagtgcaatgaaatcggagagcttaagaaggagctggcgatactggacaaggcacgactcgaactggagacggacaatctgtcggctggggaaaagctcaagtgtctgcagctggagaaggagaaaattctgcaagacttggcctgcgtcacccgggatcgtggtgacatccacaatcagctaacggcgatgtgtcgcaaaaaggaggctctgaatgaggaacttatgcggactcggcagcgtctggagcaaaccaccgagaccaatagccggctgaatagaaatctggaggagatggtgaaggatgtggaggagaagcaagtggtcatcgatctgcacgagaaggacacacatcgcttgaacgaactcctggccgccctgcgttcggagaaggaatccctggaatcggtgctcttcgatacaaacacctcactggaggccaccgaggagcgacgcagtcagctggagcgggatctgcaggaggctctggtgcgtgaggagagcctaaagaatcatgtggctcgcttgcaaaaggagctggagcagtgtcagcgcaaggcccaagagaccaagacgcagctgcttaacgccgcccgtgcggctgagagtgacttcaaccagaaaatcgccaatctgcaggcttgtgcagaggaggcggccaaacgacatggcgaggagattctacagttgcgaaatgccttggagaagcgaatgcaacaggctctgcaagcgttgcagacggccaaggatgatgagatcgagaagttgcaggagcgtctggccaccttgcaggcgcatctcgagagccttgtccagcagcatgaggaggcactgattcgggcggagagcgagaagcagcaagcccttttgattgcccaccgggataagcaagcggtggccgagcgtttggaggccgtatcccgggatctcaagaccgaacaggagtccctcgaccggagcagacgggaggccaatgcgcgcgatgagaagcagagggctgccattgcccagctgaaggacgagatggtgcagatgcgcaccaaggaggaggagcacaagattaagttggaggaatgcatccggaagcaggagctgcagttgagcagcttgcgcgaagaacgcgaatccttgtgccgtgtgagtgaggaactaaagatggagattcgtctgaaggaggacagaatggagagcaccaacaatgagttgcaagatgcgctgcgcaagtccaaggagggtgagggcttcatcgatagcctgcgcaaagagttgaccgactgtcgccgccaactggcggacagcaacatcgagcgggacaagtattccggcagcaacaaggagctgcgcgaccacgtcaagcgtgtggagagcgccaagcgggagcaggcgcgcgccatcgaggaggctctgcagaagatcagcaatctggaggataccaagaactcgttggagaacgaacgcactcgattgagcaccatactgaaggagacggagaatcactttacaaagaccacccaggatctgaatgctaccaaggcgcagctgcagaaggctcaagtggagttcgcccagaaggacgagggcggcaaggagttgcagtgcaagctggtcgccgaggtggaattgaaggagcgggcacagcaggagctctgccagattaagaagcaattatcggatctggaagccaatctgtgtgccactcgccaggaattgggcagggctcggtgtcagaacaaccaggaggagcatcgcttccatgccagggagcaggagttggcccagcgcttggaggagggtcgtggtagggagaagcgcctggaggatcagaagcacaacctggaggtctgcctagccgatgccactcagcagatccaggagttgaaggcccgtttgggcggcgccgaaggtcgcatccgtgctttggatgagcagttgtcctgcgtggaactacacaagcgggataccgaacagaagctatcctcggtggttcacactctgcgccggattgctggcatccaagtggacggcagtgtggctcagttggagcgcgagaaggatgactacaaatcccaattgggagcagctaagaagcaactccaagatgctgctgaccagcagctacgatgcgatgccaagctgggcaaactgcaggccatgctaagaaatctccaagaggagaagagcaatctggaaacggaccgcaagatgaaaatctccgccatccaggcgctagaggagaagctcaagcatcgcaacgatgagtgtcagatgctaagagaacgtttggcccaaacagagatgcaactggctgccacatccgaggagaatggccagaacgaggaacgactggagaagagccgacagcagtgctccaaactggacaatgagaagcgccagctgcaggaggaattggccaaggttgagggccgggccagcaaactcgaactgcagcgtgttgccatggagggcgatcttaccaggctacaaatggccctacaagagaaggactgcagcattcgtcaaatggctgagcggctggagaaccaaaaccgtgccttgacccaattggaggatcgctgcaccgcccttaagtccaccgtcgatcagctgaaggagcgcctccagaagtccgctgtgagtgaaacccaactgcggggcgagataaagacgctccaaaaggagctttccgagcagggtcactgctcccaggccaacgaggataagctgaagttggtgcaaaagtctctgcagaccgctgagaacgagaagcgcatcctcaccgagcgcctagatagcgctcagaccaatctcaacgagctgcgacgtagccaacaggcccagctggatggtaaccagcgcctgcaggaacaggtgaccgatctggaggttcagcgttcggcactggagtcccaacttcggattgccaagtggaaccaggagagtggcggcgacaaggatctgacaaacggcaacggaggcggaaatggcgaggaggagctcagcaggcagctgaagtcctcgcagcgggaaaagtcggagctacgcagcaaactgcaaaccctacaggacaaagtcaaacagttggagtgcgaccggaaaagcaagttttcgggtggaaacgcctatgatcgggctgagaagtccaactccttttacggtggcgcagctgaatccggcgagttcgactccaatcgctacgatgtgggtggaggaaatgctggcggaggctctttcaactgcggattggatcacagtgtaatcgagcaggagacgcgcgatctgcgactcaaggtgcgccgcctggagacattgttggcggagaaggagtccgagttggcgcgctgcaaggcgcgaatgaacgacagcgccaagtgccatgatggcttagatggagatcgttatcgcagtgctcagatgcacgcagagaagcttcttgacgccagggagcagtcgcatcggcaacaagtgctgcgcctggagaaccagatctcaatgctgcgcgagcagttggcccaggaggccaaacggcgacagcagtacattctacgcagctcgaaggccaatagagaaatgcagcatctgaggagcaccctaggagattccctgcgcaatgtctcccagcacccggtggatccccatctcttggaaagcgagagccggcggtga

SEQ ID NO: 13074 - protein, 1975 aa, DROSOPHILA
MQAYRDNFKQTPCPSAVDLQAAGPAHQSATASRLPFSRSQRGRDPSASGASVSASVAGGLTPRMMSPGPPGAGGGGGGGVSGGGSGDPSALLRQNQELRQRLADESHSYRRRLDTYKQAQHNQANLVSRLQSKIQQYRQRCSDLEERMHETIKPTAGVGPKLTTGPTNQVLCSTSLTLGQSSLPCSSSLDSPPPSCSRDYVDDVLVTGGGAGAAELCRKLEEEHQRCEQIVAQNSALRQQLEESNRTNEALTNDLQKLTNDWASLRDELLIKEDEFKEEEQAFKDYYNSEHNRLLKMWREVVAVKRSFKEMQTAMKAEVAKMGQEINCVGKDINGSNATVAFAVQQAKRAADDELKQSQRSNDELQNQLATLKVQYESARHEIMERDQRLLELMNQLKKLEDRCAQAESQAALASRYSDEIERLNNSMREIAQAVVQDAENADREADAEVTGGVMQHMHLTRDAASVVGGAGGAGSTAGGGGKSPRRNSTRASQAFAEGTISAVQAALHKYQLALHDMQVKFQNTSETLRTTKAQLETSEGTKQLLTTKMQQLTEKLDSSNSKLSELLQERESLQRGLDDIRVQKQQSEMGRADINSAFENLSSDYEKMQLNCGKLQKRIDSMEEDKKAVELEIQRILKDKNITELNLRSEEDRSSRLREETISLREELNRVSLNRDLLEQQRIESDNLINLLEKQKSDLEYDLDKLLLEKCDLQEKHEKLSNNSCSTSDELKSVQNCLQEAQEERKKLRIQSVDQCNEIGELKKELAILDKARLELETDNLSAGEKLKCLQLEKEKILQDLACVTRDRGDIHNQLTAMCRKKEALNEELMRTRQRLEQTTETNSRLNRNLEEMVKDVEEKQVVIDLHEKDTHRLNELLAALRSEKESLESVLFDTNTSLEATEERRSQLERDLQEALVREESLKNHVARLQKELEQCQRKAQETKTQLLNAARAAESDFNQKIANLQACAEEAAKRHGEEILQLRNALEKRMQQALQALQTAKDDEIEKLQERLATLQAHLESLVQQHEEALIRAESEKQQALLIAHRDKQAVAERLEAVSRDLKTEQESLDRSRREANARDEKQRAAIAQLKDEMVQMRTKEEEHKIKLEECIRKQELQLSSLREERESLCRVSEELKMEIRLKEDRMESTNNELQDALRKSKEGEGFIDSLRKELTDCRRQLADSNIERDKYSGSNKELRDHVKRVESAKREQARAIEEALQKISNLEDTKNSLENERTRLSTILKETENHFTKTTQDLNATKAQLQKAQVEFAQKDEGGKELQCKLVAEVELKERAQQELCQIKKQLSDLEANLCATRQELGRARCQNNQEEHRFHAREQELAQRLEEGRGREKRLEDQKHNLEVCLADATQQIQELKARLGGAEGRIRALDEQLSCVELHKRDTEQKLSSVVHTLRRIAGIQVDGSVAQLEREKDDYKSQLGAAKKQLQDAADQQLRCDAKLGKLQAMLRNLQEEKSNLETDRKMKISAIQALEEKLKHRNDECQMLRERLAQTEMQLAATSEENGQNEERLEKSRQQCSKLDNEKRQLQEELAKVEGRASKLELQRVAMEGDLTRLQMALQEKDCSIRQMAERLENQNRALTQLEDRCTALKSTVDQLKERLQKSAVSETQLRGEIKTLQKELSEQGHCSQANEDKLKLVQKSLQTAENEKRILTERLDSAQTNLNELRRSQQAQLDGNQRLQEQVTDLEVQRSALESQLRIAKWNQESGGDKDLTNGNGGGNGEEELSRQLKSSQREKSELRSKLQTLQDKVKQLECDRKSKFSGGNAYDRAEKSNSFYGGAAESGEFDSNRYDVGGGNAGGGSFNCGLDHSVIEQETRDLRLKVRRLETLLAEKESELARCKARMNDSAKCHDGLDGDRYRSAQMHAEKLLDAREQSHRQQVLRLENQISMLREQLAQEAKRRQQYILRSSKANREMQHLRSTLGDSLRNVSQHPVDPHLLESESRR

SEQ ID NO: 13075 - DNA, 7600 bp, DROSOPHILA
cattcccggatcaaagtaagacccatttaagctactattattcaatcttcttcaataaaacgagagcttattgcatattcaatttgttatcgagtcaaacggatagcaccatggtccatataaatctccacaggctcactgctaaatctaatttacgacaatattatgcgagaaaagaaaatgctgcgggggggtgtggaaaagcgggggaattgcgtagggcagagatcaaatgtaataatcaaatgtatttgcagcaattttcacttcagcaccttgagcgcgaatcgggaaagcacttaagtggaaatgccgccagtcaaacgctaaaagcccagccgcttttccccttttcctttttcccatccgtttatcctgtcaactggggggtgggaaacttctcctatggagctaatagtttttccacttttcctttgactttcacttccgtgccatctcaacaagttgctcgagtggttcggctatttcctcttggtttttcgcccaacttgttgatttaaattcatgaacgtttggcacaaagaaaaatctcgccccacttttttttcgggttatttgtttttttttttgattccttcgccctgctgtatttgtcaggctggaggaccggaggattcccactcaatgtccatgtgtttggccagacacttgacacaagcacttggtgctggacacatccaccactgactggcccccatccacttccgctgagttttcccctggtggggttttagtgtcaactgcaggagggtcttcgcctccagtgcgtgtccatttaattgactgtcgacggctcggcacttggagctgcccaactcagcctgctccattggccatcgtattggcatctgataatgactaagcaggggcacttcagcattgattagttgctggctggtatttgatttaattgcacatcttcccacataaattaagggtgcactaagctctttctgaaatatcagagcaactactgcagataatacttatcctatgtcagaatgaatgccttacgctttgctaattaattaagcttgtgggaagtattatacttaattcgatataagatatatataatataaagtttaagtattgctctctaaacgatatattgcttgtactcaagggatatgctttctttcaaatacggaatactattttcaatgaagttctagcatagaatctaagaatcctgataaaatctcagcactcagtatccctgggattgatgaactgacaaccaccattcgcattgacaggaaggcgttcattagcttaagtgccgctcagtggtaattttatgccaccacttgcgccattccccaaggaaatggacaatttccaggcgattgactggcaaggataaccagctcccggtagataaatgctcatgaaatgctaatggccagcagggaataagatttatgcgtcgtaatatatgtatggtatctatcttaaggtatccccatcaggtataagtgtagttaaactcacccactgtggtcagcagcatgttgtcgaggagcagggctatggccacgatgacgagcaccaggcgattggatccccgccagctgaccatccaggatttggcggcggcccaggacccggcagcgcgtggatcctcctcgcggtactgatccgctggcggcggagcctgtcgtcctgcgtaggtctgcgactggtaggtgggcggcggcggtaccggtggctccttgccgacgcccatgatgccgcaatccggctccatattgccattctgttgattgctgtccaactgctgcttgaagggatttttgctgggcgtattgctggcgggtccgccgggaatctgttgctgctggctgttggtggtggtgtttgcgtttacggtgaaggaggtggtctcgctaatctccgactgcttctggggggctgtgctctgcgtgtgttttcttggtccaccattgcccgcatcggtcgatgattgcattgcgtcgctagccgctggttgctacgaatggcaaggcagtaagccgattgtctttttaaaatgtaatcaaatcaagagtaagcagctttcccataccaattcccattcccaatcgcatttccatgcccattccccttccaaatcaaatccaaaagtcgcacgctcgctttatgccccaatgattttcgctaattaaaagtaaattacaagtcttggggctggcaattaagaagcgtatctttcacacggcaacacgactctaattgaatcatacgcaatttaaatatttatttaattgcctgccaccccggagcactaccagcaaacacacggggcgtatgcgcaacatttgtaattttgacattttctgttgcctatcgccaggcgcaaattcaatttgccagcataattcgctcgcaaagtctcacaaaagggagtcgaaaaagagaggcagagttctttaagttttcggttgtaaaattgaattaacccactgcttttagcaaaaaaaagaaaaggtctcgtaattgaaggcgtagatgaatcaagtcttccgccaatagtctttgcataatgccttctcaatttactttgcaattgatcaagtttacaattgatgcctgtcccgtcgtacaattgattgtttatgacgtcttcgtattgataaagtgttgacattgaatgacaaatgaaaattatctgacaaatagacgaggaagctgctgaaagttcatacaactgcaacacgtttgggggcgtgacaaacaaacggcagcaaattttgtcatttcaattgattaaatcaactagaattggctgcctaaatacaaagctgttgcgttagttatagtattgtacaagggaaatctggcatcgttttaattagcccgtatatttgtccattaatctctgttttaattgcgctactgttgtttatgggaagattttttaatggctaacaaatgggataactttttataacaagggataagttgtattcatataaataaacaaatatcggctctgttttctaggatatatagtattctattctttctcatccctttgccaaaatgcactttcaatttaatgtgcattctttagaagaaattatatgatgttagatatgaagttcaatcatttacctggcagcttttcctgatttaatagatctggagattaatgctccacaaactgaactctcgcccctagaatatcacgtgcactaatgaacctgaatctgctttaacgaccgatatttatatggcttttggctaatcactgaaagccgccagaaatgcgcactgaaatcccaattagccgatgactctgttgatcaaaatcaaaatcacaagttaaggctgtgtgttttgcatttgggaagtgctgatgtttgtctggattgcactttctttttcacaattggttcactttggaatctttttcggggtggatcgttcattccgcggattccaattctaccgacaagtcggcgctctgaactcaaactaaaaactttagcgtgccgccggcggtttattaaacgaattaattttgagcaagcgaaaaagattcgcttagtttttttttctatacaaaaagtgctggaagcgtagtaaatgcatgggtctttgcatttcaaatgaatgcacaatgaaaagtgtgtaaaatacattttaataattattaattaacaattggcatgcgattttggtttatgggcgtgggaaaattcgattcaaacaaaagatactgtttttttttttttagatttcaaattatgctaattcattggattttcaagtttgactttcagagcctgaaagttgaactttttcatttcgatttgattcaaatcgaacttgattcaattgctaaaacaattcttgagtacatatcgcgtgtatgtttttattccataccagaataatgcatgtaaaccaggagaatttattgcaatttttttaattcaaagttttaatactctttcaaaagctgaagtaccagtataccattcaaattttcaataattcaagttttagaaatacaatttttttgaaatttgtgtgaagttccatatatattatctttagaatagagaatataacatagaattcctgcattgaattaaattgagctgcatgtgcgatgcgatgtgacgaatgcgattgtttaattctttatttatgttccctcagatatttattttgattactgtttgtcgttgcttttttgtttaattgttgttgctgctgcagcttgtgctaattgcccaagatttttcaaatggcgacgttggtttaaaatgtagtggcttgctgcctcttctgagcatcggcacgcaactttatttaaattgtgcccatttttcagttgtgtattaattaaaacgtagctcatgcctgcgcttagtcagtggatttgagcttgacattgaggcagatggaagagacctcggtttatggaaggccataaactggttttcccgtataatcaaccaggaattggcagcccttcaagtcggctttttatccaacatttaattgctgtacaaatttgcaccgacgcccgaaggtgcagctgattatactttttttttccaccaactagctataaattgcaattttaattggaaaacggtagcgagatacataaatatatagctggggcgtgtaaatgaggccccttttaagctaattagcacaaatctattgaagcaaaaaagatcgaaacgtgccaatagtaggcttcaattgaaaactttacaaaagtaccatttaaaaacaattctttgtaatttgagcttaaattgcaagattttttaagctctggaatatgtacatattttgtttataaaattaaaatcaatatcttgatatgcgagttggaacttctgcatcttaaaaaattgaatgcatccctctttcattcacaatttaggaaactgttacaatattttagaaatataatgttctttaggttcttcatgcgtttttcaaaatcttttctatataaacaccactttcccacttttgcattttaacttacctgagtaatttcttataagcgactcgtttagctttctttgggggaaattctgcggaaaaatggtttcgttgggcgaatgggttgggtttttgtgtctgtggtctgctaaatgccaatgagtctattgcaaattgccagttgatgaagtcaggtagttgttgtagccggatttttttcgggtgaggttgtgcgttgttggagtattcctgtgggagaatcgacaaaggaaaaaaagaaacgaagtcatttaaataaagacgcttaaagcggatttgcaatgtctccggtggcccagagacttctgctggcggtggccacttgtggattcagtgttttgtgatgccactcaagaggttttcctttgaggggagtgtttgttcttcgctgggctggcggcaaggtcgttggccaacaaaagacaagcaaaagtgggcattataagagatcttaaataataatacattaaaatgttgagaaccttatgcaacgatatatactataactgtacattaaacaaaataatgttaggagtaaccaccgagtgctgaaagcaaatacgattgaatatatttgcggatttattattcaatacccaaatatgccacagtcaaatgagattgcggctatttgcggagagggcacataaagtaaggtaaatactatttacatctatatttgttaatacttttatttgtcttctttttttctgtgcaccaacacgctgtcggttgtcgaaccgagcgaaaaattttgtttgcctggcaggcccgattcaaatcgattaataaataaacacaagtaggtctaaataaacaggcagttgtagccgctttaaaatgcaaatttcgattgatttttgattgattttcattaatcgctagcggggcgaggggagatttaaaggaattaactctttaacaactttataatatcgttgtcatcccatcttgttatataaacattacagatgataataataattgcaataatacttttaagtacgttttaattgctttttcccattgcaatgtaattataatgggactataattttaatagaagaaattagcatttccattttgtagcttgtaagcaaagttagcaaatgaatataatttttgcattttaatcacttaaaaatgaacttaaaattacttaaatttaaagtaagctttatatgtaaatctgttaaaatataatataaaaattaaatatcacttgaaattaaatttcgcttttaaacttacacccttaaatctttgaagttttcacatatttttaaaagatgcttgcttgcgtggtgcttgcgatttaaacacggattttgacgcacatttgttggaattgccgcgtgtgattttgttgctggaaactaaaactaaactagtgctagaacggcagctgactgcgagtgagtgccacaagtgtcttttctggtgctgaggctgcactgcgagcgtgggaaacgggcacgtccatcagccacgagatctcatctcgcactgaacgcagttgcgctgaatgccgctggccagcggcgcacgaggcgcctgcgacgtcgacggcgaacgactgcgtccaggatgtggccgggtgtcctggtggcacaagtggtcgtggcgcgggggtaggtggtaggtagaacgaagctggcagcgctgccacttgttgtctgctgcctgttgcagcaccagcaccagccgactccccctatccttatccgttcctgcccacttccacacccacacttgggtgtgctccttcccatcctggcatattgatggaaactgccaacggcaatgattctgctcaattgccttcattgtgttcgctctctctacgtacatacatatttatctttttgtatgtgtgcgttggggtttcctctgtttgaatttattttcgctacgcctgtaagtatgcaacgcatttcggggttgcctgccacatatatgtacataaaatggagggaggcggtggcacacgcatattatgcctaattgattttcgcctcctaagtggcaactcaatttttggggaccagaaaggacatcttcaatgggtttcgaatttcgctaaagtcaaatactgaatgtctttaaggaaagcaaaatggggtgtaagcttattttgaaaatattcggctggcagaagaagtggattttagtctgtgtctgtttagtaaaaaacaaatttagatgttttaatttttaattctcatgtggaattaaaaaaaatcgcttcctacaaatttttttgtaatcttaatatctctttatatcacaaaaatcagcactcttaaagaatttaccatattatatctatcttagtcactaaatatttcaaggaccgacggcagtatttcattacattttgcatttacagttttgcatttcccgcatttttcacaacattatcaacactcgacaaaaagaaaaccctctttaagtcgcacacgacccttattttcgcataacgaggtcacaatttgcgttttcttgtcgggcgaacaggtgtaacaggtgtattgcatataccccaggacattggccttatggt

SEQ ID NO: 13076 - DNA, 1532 bp, DROSOPHILA
acgtcgcaggcgcctcgtgcgccgctggccagcggcattcagcgcaactgcgttcagtgcgagatgagatctcgtggctgatggacgtgcccgtttcccacgctcgcagtgcagcctcagcaccagaaaagacacttgtggcactcactcgcagtcagctgccgttctagcactagtttagttttagtttccagcaacaaaatcacacgcggcaattccaacaaatgtgcgtcaaaatccgtgtttaaatcgcaagcaccacgcaagcaagcatcttttaaaaatatgtgaaaacttcaaagatttaagggtgaatactccaacaacgcacaacctcacccgaaaaaaatccggctacaacaactacctgacttcatcaactggcaatttgcaatagactcattggcatttagcagaccacagacacaaaaacccaacccattcgcccaacgaaaccatttttccgcagaatttcccccaaagaaagctaaacgagtcgcttataagaaattactcagcaaccagcggctagcgacgcaatgcaatcatcgaccgatgcgggcaatggtggaccaagaaaacacacgcagagcacagccccccagaagcagtcggagattagcgagaccacctccttcaccgtaaacgcaaacaccaccaccaacagccagcagcaacagattcccggcggacccgccagcaatacgcccagcaaaaatcccttcaagcagcagttggacagcaatcaacagaatggcaatatggagccggattgcggcatcatgggcgtcggcaaggagccaccggtaccgccgccgcccacctaccagtcgcagacctacgcaggacgacaggctccgccgccagcggatcagtaccgcgaggaggatccacgcgctgccgggtcctgggccgccgccaaatcctggatggtcagctggcggggatccaatcgcctggtgctcgtcatcgtggccatagccctgctcctcgacaacatgctgctgaccacagtgggtgagtttaactacacttatacctgatggggataccttaagatagataccatacatatattacgacgcataaatcttattccctgctggccattagcatttcatgagcatttatctaccgggagctggttatccttgccagtcaatcgcctggaaattgtccatttccttggggaatggcgcaagtggtggcataaaattaccactgagcggcacttaagctaatgaacgccttcctgtcaatgcgaatggtggttgtcagttcatcaatcccagggatactgagtgctgagattttatcaggattcttagattctatgctagaacttcattgaaaatagtattccgtatttgaaagaaagcatatcccttgagtacaagcaatatatcgtttagagagcaatacttaaactttatattatatatatcttatatcgaattaagtataatacttcccacaagcttaattaattagcaaagcgtaaggcattcattctgacataggataagtattat

SEQ ID NO: 13077 - protein, 167 aa, DROSOPHILA
MQSSTDAGNGGPRKHTQSTAPQKQSEISETTSFTVNANTTTNSQQQQIPGGPASNTPSKNPFKQQLDSNQQNGNMEPDCGIMGVGKEPPVPPPPTYQSQTYAGRQAPPPADQYREEDPRAAGSWAAAKSWMVSWRGSNRLVLVIVAIALLLDNMLLTTVGEFNYTYT

SEQ ID NO: 13078 - DNA, 6772 bp, DROSOPHILA
atctcgaaatttataatgccgaaaatgtgcacacttgcaaaaatctcgttactagcagctggttaaatatatatttaataggaaaggcggaaaacaatatttgcttgagaagtagcatggaatccaaactgctgaggtctacaattcgttttgaaatttccagttaattactcagaacgaaacgaattgcggcaattgtttgttatggccactgcaattgttgacgattgcatttcaattcagtgggtagacaggatgagatacctcagctgaatcgcagttcgattgataagcgagcatctaaaaatggcgaaaatacaataaaaacgcatctaggcgtatttaacgagcgtgacacatatcgggattatggcggagccccaaggcttcggcggtaagagcgctgactttgaagtgcagcatgagtcatacaggtgagctaattctgctggcccttttgttttgtctgttgctgtagcagactggtcgttgaactttcccttaagcatttttggcaactttttcttatgagatcatgacatgaaatcgtctggccaacgaatgtgtgtgttatattgacaaaacttcgaagcgcgctcctattcgcacacgtctagcgcaagcagccaaatagaatggtcgtaaagaaagaaaaaatgctgttaaaaaaccagttcgctcgtgggcaaacaaataagaggagcagcacatcgctagtgctgatctaagcagctgaagcgtagacaacttgcaagagcttatttaattaacatccgagtgctaacgaaagcgacgagaagacctgttgagtgagcaataaacgtgtcataaagaaacccgcccggcaaacaactcatttgaaattggcgcccaaagtacgcgcgttgccagattcgagtagcaaactctaatggcagcgctggcgaacgacaatcatatatagctgtcactttcccccttattgatttatatagaatcgcaaaaacagggttgttaaacgcgcagacgacgcagttttcatacggaattttcactttatcatttgttttgtgcataagaattttgcataacgcacttttattactcggagtgctctgttaatagcgtgtgccatgagccgcgcctgtgataatgtgaaaagggccgaagcaaaatatcgaattgaagtgccagctgcaactgctgagaacaaaagctgcacaagactacataaataatttcgggaaaatcaaataagtgcgaatctcggccagcaaacatggatgatgctacctcccaaaactcggctgcaacgcccatgacacgggagaacattccgttgctgaatcgtcagcgaaatcgctggtatctctttaggtgtgaatcataggctcaattaagtgtgccatttgcttatcagctttttgttgctgtatacttatacttagaagcagactgcagtataaatatgcaacatgcactatactacagctaatctctttctaacacaaagccaggctttccacctcccactcgcacactctctctctcactcactaacacccacacacaaatgcatatacaccattaacatttattgttgttgtctgaattttcacttttgtttttttattcgagttcttattatcgattttccacccaaggtcgtctgccacatttgtatgtctgtagctcacagaatttgtgattgaaattttaattcgctgggcagagcacttgctaccaaatagggatttcccatcagaatatgaatattatagattcaataactgttggaagtgccttaaaaggcttactattcgtgggaattaaattaaatatggaagtcaatggttacaaatggcatattcatgcgtcattaatgtttatgcatcaatctaaattgtttttaaactattttttgtattgtgtgttacatgacacatcatcacttaggatttaattgttaaaattatctattgatttcaatatttaaggtttcataagcatgtcattgtttctttacacccccttcttttcgttatgtttcgaactaaatacaaaattctatgtaaaccagtaaagatagattcactaaagcttgaatctcgtaggccgtgctcgtcgtataatttttgatcgtaaaactaagagggttgtataatgactggaaatattggccggaaggatgtttctggctcacattcttaccgaaggtgccgtggtactgatcctcgtctgtctttacagctgctggcgaaaatggttccggccacgggagctgagagcccgcaccgtaaatctcggacgggtcaatacggagaagttcccaccgaacgagatccggaatcagaagtacaacttcatcaccttcctgccgctggtgctgttcgagcagtttcgcttcttcctcaacttgtacttcctgctgatggcgctgtcgcagttcattccggacatccggatcggttacccgtacacctactggggtccgctcggcttcgtgctaatggtcaccatttgccgagaggcggtcgacgatctgcgtcggcatcagcgggatcacgaggtaaactcgcagaagtacaagagactgtcgtccaccaacatcagcggctacgaaatggttcccagctccaagctgaaggtcggtgacgtcataatcgtggaaaagaacgagcgcgtgccagcggatctgatcctgctgcgcaccagcgatcggagcggatcggtctttgttcgtacggaccaacttgatggcgagacggactggaaaccacgtctcgccgttccgtatactcaaaaactcagtcgagattcggagctacatagcatcgatgccagtttttacgtggagaagccacagaacgacattcacagcttcatcgccaccttctgcatggcagacggcagcgaagacaccggtctcagtgtggagaataccctgtgggccaacaccgtcgtagccgcaggaacagccacaggaattgtcatatatactggctgcgaaactcgcagcgtgatgaataactcacagccaaggtccaaagttggactgctagacatggagattaacggattgactaaggtaagagcgtaaattagcattggtattacaaagattctgttttggtactattttaaatcagagatcatattctaaactcaatcggacttttctctctttcaggttctgttctgcgccgtgcttggactgtcgctagtcatgatgatgcttaagggtttcggcggtccttggtatagatacatgttccgcttcgttcttctcttctcctacatcattccaatcagtctgcgtgtcaatttggacatgggaaaggcgttctactcatggcaaatgcaaaacgattcgaacatccagggaactgtagtgaggtcgaccaccatacccgaggaattgggacgaatctcttatgtattgaccgacaagacgggcacactcacacaaaacgagatggtgttcaagaagatccacttgggcattgtatcgcacgatgcagacactttccatcacattgggcagatgatacagaagctatcgggaaacattctgcaacagcagcagggtagtttatcgagctcgagcagcggcggagactcgaccaagccaatgatgtttggcaacaggatgcgtcgaccggagggatggcgggaatgggaggcggtgcgagcactggccctgtgccacaatgttacaccggtaagcgatgacgaggacaaccgatccgtgtccacggcatcgaccgttaccggcggtaacaactcgccaaccaaatctgtgataaacatcgaggcacctggcagtacggacacagagcatcagtatcaggctgcgtctccagacgagattgcactagtaaagtggactgagcaggtgggactgaccctgattgccagggatctcaacacgatgacgttgcaggtgaagacccccagcgaagacagtaagtatttgtataaatcaatcatattcaggggcttattttgtttttcctttttttctagatgacatacttctgcactatcaaatcttgcagcttttcccattcactagcgagagcaagcgcatgggaattatagtgcgtgagagcaaaactggtcagataacgttttatttgaagggtgccgacgtggttatgtccagtattgtgcagtacaacgactggctaagcgaggagtcaggaaacatggctagagagggtcttcgcactcttgttgtggctaagaaggttctcaccgaggaacagtactctgactttgagacgcgctacaatgctgctcgactgagcatcaccgatcgtgtcgccaaagtggcggcagtcactgaatccctcgagcgtgaactggaactgctctgtttgacaggagtggaggatcgtctgcaggagaacgtgcgtccaacgctggagctactgcgcaatgctggagttcgcgtttggatgctaacgggcgacaagctggagactgcttgctgtattgccaagtcctcacagctgattggtcggaaccagggactccatgttttgcgttccgtaaagacgcgtaccgatgctcaccaggagctgaacagcttccggcgtaagcagggtcatgcactggtcatctcaggcgaatccctcgaggtttgcctgcagtattatagaccagagttcctggagctggccacggcctcgccggccgtcgtttgctgtcgctgctcgcccacacagaaagcacaggtggtggcgctcatacaaaagcacacaggcaaacgaacctgtgccgtgggtgacggtggcaacgatgtcagcatgattcagcaggcggacgctggagttggaattgaaggacgagagggaagacaagcctctctggccggcgattttagcattccgcagttttcgcacatcgccaagctcctgcttatccacggtcgcaggagctacaagcgatcggcggcactatcccagttcgttatccaccgcggcttgatcataaccacattgcaggcggtcttttcagcggtattctacctcagctcggttgctttgtatcagggctttctcatggtcggttactcgacgctgtacactatgttcccggtgttctcattagtgctagatcaggatatcacatcggagacggccgtcacatacccagagctttacaaggatttgtcaaaaggacgcagtctaagctacaagaccttctttatatgggtactaatcagcatataccaaggcggcgtcatcatgtacggagcattaatactctttgtggatgagtttatccacattgtggcgatcagtttctcggcattaatcatgactgagctcatcatggtggctctcaccgtgcgtacttggcataggtgagttttgtaaactgcatttaatctttattgtttattaacgttgctgctttgttcacaggttaatggtgctagcggaactattcagtttagcgctttatctcatctcattggccgtgttacatgagtatttcggtacgtaaatcgttaattttgccaataacaatataataatatttctgtttttttcagactgggagtttatttggtcgtatgattttctgtggaaggtttctctcatcactctggtctcctgcttaccattgtacataatcaagttcttgcgaaagaaatgttcgccgccctcttacttgaagctctcttagatggcggcctggcaaatgaaatacaaattacacattatcctgactataatttccatttagttctgttcacaattttaacattctttgttatttaccacttgatgagttgttctttgaacttggcaaccatcccacaactattctttgttttgccaatacccgcaccaatcccaaatatacgtgatatcaggttaaactccccatcttcgacactacacttttcactatggtatttttgtttaatttttaaagttacccaaaatacaaaagaagaagtgattcgataattgtaatttgaatcaaaccgattcttatttttaagcgtgaggcgtaaaagttttaaaatatccttcagttttgtatacctgtgtgtatttgattaatatttaagtcgcaaaaaccaaattatgttactaattatttaaagataaaataaattaatgataattgtaactatgactaataatgaaatcaattaccatggtataagaattaaaatgtaaaacaaaaaatatagattttgtataaggatttagaaattgcattgcattgtgtaataataataataaataaaaatatgcatatattaattattaaaaagagaaatttggtctgtattactgggggattaacctttaaggatctcgattttgagatataaaaagcaacgcggatatttttgtattgtacattttttatttaccattttgcttgacattttgtttctgtttattactaattcacaattctttgcttgaaatacataataattttaataatatattttattatgcatgtaagcacatacaaacatacttacgtacgtaagttaatgaattttgtgttgtctcttgtcggtaatataatagtttagcttttgctatgctcttaaaatgcatgacatccattagcgtttacactttcatggtttttctaacaattaattattttcttgtttcgttacttggtttgttaattgcttagcaaaacttcgactcattataggttgaaatgatgaagcattgttttacgattttgcttaaatgcgcagaaatacttttgaagtaaacaatttgtttgtattattatttatttc

SEQ ID NO: 13079 - DNA, 3531 bp, DROSOPHILA
cgcagacgacgcagttttcatacggaattttcactttatcatttgttttgtgcataagaattttgcataacgcacttttattactcggagtgctctgttaatagcgtgtgccatgagccgcgcctgtgataatgtgaaaagggccgaagcaaaatatcgaattgaagtgccagctgcaactgctgagaacaaaagctgcacaagactacataaataatttcgggaaaatcaaataagtgcgaatctcggccagcaaacatggatgatgctacctcccaaaactcggctgcaacgcccatgacacgggagaacattccgttgctgaatcgtcagcgaaatcgctggtatctctttagctgctggcgaaaatggttccggccacgggagctgagagcccgcaccgtaaatctcggacgggtcaatacggagaagttcccaccgaacgagatccggaatcagaagtacaacttcatcaccttcctgccgctggtgctgttcgagcagtttcgcttcttcctcaacttgtacttcctgctgatggcgctgtcgcagttcattccggacatccggatcggttacccgtacacctactggggtccgctcggcttcgtgctaatggtcaccatttgccgagaggcggtcgacgatctgcgtcggcatcagcgggatcacgaggtaaactcgcagaagtacaagagactgtcgtccaccaacatcagcggctacgaaatggttcccagctccaagctgaaggtcggtgacgtcataatcgtggaaaagaacgagcgcgtgccagcggatctgatcctgctgcgcaccagcgatcggagcggatcggtctttgttcgtacggaccaacttgatggcgagacggactggaaaccacgtctcgccgttccgtatactcaaaaactcagtcgagattcggagctacatagcatcgatgccagtttttacgtggagaagccacagaacgacattcacagcttcatcgccaccttctgcatggcagacggcagcgaagacaccggtctcagtgtggagaataccctgtgggccaacaccgtcgtagccgcaggaacagccacaggaattgtcatatatactggctgcgaaactcgcagcgtgatgaataactcacagccaaggtccaaagttggactgctagacatggagattaacggattgactaaggttctgttctgcgccgtgcttggactgtcgctagtcatgatgatgcttaagggtttcggcggtccttggtatagatacatgttccgcttcgttcttctcttctcctacatcattccaatcagtctgcgtgtcaatttggacatgggaaaggcgttctactcatggcaaatgcaaaacgattcgaacatccagggaactgtagtgaggtcgaccaccatacccgaggaattgggacgaatctcttatgtattgaccgacaagacgggcacactcacacaaaacgagatggtgttcaagaagatccacttgggcattgtatcgcacgatgcagacactttccatcacattgggcagatgatacagaagctatcgggaaacattctgcaacagcagcagggtagtttatcgagctcgagcagcggcggagactcgaccaagccaatgatgtttggcaacaggatgcgtcgaccggagggatggcgggaatgggaggcggtgcgagcactggccctgtgccacaatgttacaccggtaagcgatgacgaggacaaccgatccgtgtccacggcatcgaccgttaccggcggtaacaactcgccaaccaaatctgtgataaacatcgaggcacctggcagtacggacacagagcatcagtatcaggctgcgtctccagacgagattgcactagtaaagtggactgagcaggtgggactgaccctgattgccagggatctcaacacgatgacgttgcaggtgaagacccccagcgaagacaatgacatacttctgcactatcaaatcttgcagcttttcccattcactagcgagagcaagcgcatgggaattatagtgcgtgagagcaaaactggtcagataacgttttatttgaagggtgccgacgtggttatgtccagtattgtgcagtacaacgactggctaagcgaggagtcaggaaacatggctagagagggtcttcgcactcttgttgtggctaagaaggttctcaccgaggaacagtactctgactttgagacgcgctacaatgctgctcgactgagcatcaccgatcgtgtcgccaaagtggcggcagtcactgaatccctcgagcgtgaactggaactgctctgtttgacaggagtggaggatcgtctgcaggagaacgtgcgtccaacgctggagctactgcgcaatgctggagttcgcgtttggatgctaacgggcgacaagctggagactgcttgctgtattgccaagtcctcacagctgattggtcggaaccagggactccatgttttgcgttccgtaaagacgcgtaccgatgctcaccaggagctgaacagcttccggcgtaagcagggtcatgcactggtcatctcaggcgaatccctcgagaaagcacaggtggtggcgctcatacaaaagcacacaggcaaacgaacctgtgccgtgggtgacggtggcaacgatgtcagcatgattcagcaggcggacgctggagttggaattgaaggacgagagggaagacaagcctctctggccggcgattttagcattccgcagttttcgcacatcgccaagctcctgcttatccacggtcgcaggagctacaagcgatcggcggcactatcccagttcgttatccaccgcggcttgatcataaccacattgcaggcggtcttttcagcggtattctacctcagctcggttgctttgtatcagggctttctcatggtcggttactcgacgctgtacactatgttcccggtgttctcattagtgctagatcaggatatcacatcggagacggccgtcacatacccagagctttacaaggatttgtcaaaaggacgcagtctaagctacaagaccttctttatatgggtactaatcagcatataccaaggcggcgtcatcatgtacggagcattaatactctttgtggatgagtttatccacattgtggcgatcagtttctcggcattaatcatgactgagctcatcatggtggctctcaccgtgcgtacttggcataggttaatggtgctagcggaactattcagtttagcgctttatctcatctcattggccgtgttacatgagtatttcgactgggagtttatttggtcgtatgattttctgtggaaggtttctctcatcactctggtctcctgcttaccattgtacataatcaagttcttgcgaaagaaatgttcgccgccctcttacttgaagctctcttagatggcggcctggcaaatgaaatacaaattacacattatcctgactataatttccatttagttctgttcacaattttaacattctttgttatttacc

SEQ ID NO: 13080 - protein, 1058 aa, DROSOPHILA
MDDATSQNSAATPMTRENIPLLNRQRNRWYLFSCWRKWFRPRELRARTVNLGRVNTEKFPPNEIRNQKYNFITFLPLVLFEQFRFFLNLYFLLMALSQFIPDIRIGYPYTYWGPLGFVLMVTICREAVDDLRRHQRDHEVNSQKYKRLSSTNISGYEMVPSSKLKVGDVIIVEKNERVPADLILLRTSDRSGSVFVRTDQLDGETDWKPRLAVPYTQKLSRDSELHSIDASFYVEKPQNDIHSFIATFCMADGSEDTGLSVENTLWANTVVAAGTATGIVIYTGCETRSVMNNSQPRSKVGLLDMEINGLTKVLFCAVLGLSLVMMMLKGFGGPWYRYMFRFVLLFSYIIPISLRVNLDMGKAFYSWQMQNDSNIQGTVVRSTTIPEELGRISYVLTDKTGTLTQNEMVFKKIHLGIVSHDADTFHHIGQMIQKLSGNILQQQQGSLSSSSSGGDSTKPMMFGNRMRRPEGWREWEAVRALALCHNVTPVSDDEDNRSVSTASTVTGGNNSPTKSVINIEAPGSTDTEHQYQAASPDEIALVKWTEQVGLTLIARDLNTMTLQVKTPSEDNDILLHYQILQLFPFTSESKRMGIIVRESKTGQITFYLKGADVVMSSIVQYNDWLSEESGNMAREGLRTLVVAKKVLTEEQYSDFETRYNAARLSITDRVAKVAAVTESLERELELLCLTGVEDRLQENVRPTLELLRNAGVRVWMLTGDKLETACCIAKSSQLIGRNQGLHVLRSVKTRTDAHQELNSFRRKQGHALVISGESLEKAQVVALIQKHTGKRTCAVGDGGNDVSMIQQADAGVGIEGREGRQASLAGDFSIPQFSHIAKLLLIHGRRSYKRSAALSQFVIHRGLIITTLQAVFSAVFYLSSVALYQGFLMVGYSTLYTMFPVFSLVLDQDITSETAVTYPELYKDLSKGRSLSYKTFFIWVLISIYQGGVIMYGALILFVDEFIHIVAISFSALIMTELIMVALTVRTWHRLMVLAELFSLALYLISLAVLHEYFDWEFIWSYDFLWKVSLITLVSCLPLYIIKFLRKKCSPPSYLKLS

SEQ ID NO: 13081 - DNA, 3385 bp, DROSOPHILA
gaatcctcgcctgcagctgcccactggcggtcaggtcgaagcccagcgagataagcttcatattgaccaccatctggatgccgcgcagctgtggccagtcactgcgccgccgccaaatgagcagttcgtacaggaactggctgcccacggttagaacggccagaacttgagctcctcttcgtcccagtcgcaatagctggagcagcaggtagcccacggcggccagcaggagaagtaggagcagtcggtagcccaccgtgatctgcagtataatcaagccgcaggcgaagtggaacaaatgcagcggtgccaggctggtgaggcgtctgcgctgcgagtagaggaggcacagcaggcggcacaggaggcagaggagcagcatgggcgccacatactgcatgacctgcagcacagatggctgcacgcagctctgcaggctctcgagtaggcgcccggccagctccaggacaccgtgtccatctaccaccagctcctcctccacatcgtccccgccgaaataatagtcctcctcgccgtttggctgcccaaatctgtggtccaagctgccggctgtcaccacgtcgtcatcctcctcctcctcgtccagatcaatgtagtccgattcctcctcgaagtactggtagtccatcgccggccgcccaaagccaatacaatccgggggaatcaaggaaaaacccggaaatccgaggacttggaattatttgcaaagaatataccgcgcaatataccgaaaataccacatcggtggcttcgaactcatagctagtttatagctaagctgaaaataccagtagcttaaacagttttaaaaatcaaaataaaaaaaaatgtattaaacttgtaaaactgtttgttttgtacaccaagtgatgaaaaggttttgtatcagcttatagctcgttgtttttatcggctattgagttggcagatttcagcggatttccattgcgtctcagcttatttagtgatcaagatacggtcacaccgtatctagcagtaaataaactattttaagcagtttattcaaatttttcgctgccaaatccaggaaactctattgaaatgactcgccacgcacgtaactgcacggccggagccgtgtacacctacaacgagaagaagcgtgacgcggcggagtccggctacggcacgaatgcccagcgcctgggcaaggattcggtgaaatccttcgactgctgctccttgacgctgcaaccatgtcgcaggccagtgatcaccaaggatggctatctattcgacaaggaggccatcctgcagtacatcgtgaccaagaagaacgagtacagccgccgactgaaggagtacgagcgtctgcggcgcgcggaggaggataaactgagccaggaggccaacagcaagcagcaggcgcgcatggagcgctttgttaatgccgagaagccagcgatgacacccgcccactcctcggccgctgccagcgagaagccgtcgacctcttccgccgctgctgccgcttcatctgaatcctcgtccgcatcctcgatatccaacatgaccaacgggcacgagaagaagctgcccagcttctggctgccctccgagtgccccaatgccgggttagccaaggcccagaagcccgacgccaccatctactgcccggtgtcgcagaaaccgctgcgagtcaaggatctgattgatgtgaagttcacgctgctcaaggacggcgacacgaagcgctcgctgattgccaaggaggcgcgctacatgtgccccattacccacgacgtgctcagcaacgcggtgccctgcgctgtgctgcgtcccacgtgagtgctcgctgggatttcgcgttgaaaacccttttaatagtaacctcttcactacagtggcgatgtggtgaccatggagtgcgtggaacggctgatcagaaaggacatgatccatccgctcacggatcgcaagctcaaggagaaggacatcattcccctgcagcgagtaagtacatcgcgaactgtgcaactattctgcattgctaaggtttctcgactatttcacagggcggcactggctacgcaacgacgaacgaccacctccaggccaaggaaaaacggcccatgctccaggcctaagacgaatttatatagccgccagctacttgggagcacttcaatagaaatgtaatcgttttagcactagctagtttaaacaatcaattatttctccagattttaaaacaattgtgtatcataacttatacaaaacttgggtattttatctgttccaattctaccttttcgtttattgcaagacgaagtgcatacatacttattgttaaataggaaaaaacaaaataaatacactgatactcgtaccacacaaccaattaaccagtagtccgaatttctatggaaacagccccgtcaaatgaaaccactgccaatcttggggttaaggtataatattatattctttatgtataattgtaacgtgtaatgtaaattgaagaagctgcagctggcggaatgcgggcaggtggccgagtacgtcgtctagatacgtcgctcctgctggtggctggtcgtccacgtccagttccacgtccactaggccgcctgcaccgactgcttctgcgaggagctgatcttgtcgcccagactcaaggccatgccctgtgtgaaaggcgcgaaatacggaatacggattagaaagttgcgcatgaccatgtgcagatgtgcggctggtttgtgctcgactctcacctgactcttggcgcgaatgcgtatgtgtcccgtcaccttcgaatcgggatcatcgacgggcttctcgatactcagattggccaaggcattctctccgaaaatggacctgcaaagtgagcggatgagttgtgatgagaatatgatggctactccatagtggacagctggacactcacttggcgtacatgttggcggccatgaagccgcactggccggacagcgccttctccggcgtgaggcacttcatgttggtgctcttcagcaggtgcttgagatattcgtgcaggtcggtgaagctggtgttgacggtgaccttgttctcccactcgaagtcctgccacatttgacggaactcggtgtccgtgcagctggccggaattatgtagtccatgatgtcgatgtgaatggtattgaggaccaccacattcgtgttcagggcggtttcgtaaactgttggttaagcgccataagtgagcgtgagtgcactttaacagcgaattccgcaattagcaactcaccaatattgccgaagatgatgccgttctctgtggaggagacctttacgttggccttgatattgcagaagtcgtgcggagccaggaccactggatgcgggcgctccacca

SEQ ID NO: 13082 - DNA, 1263 bp, DROSOPHILA
tcacaccgtatctagcagtaaataaactattttaagcagtttattcaaatttttcgctgccaaatccaggaaactctattgaaatgactcgccacgcacgtaactgcacggccggagccgtgtacacctacaacgagaagaagcgtgacgcggcggagtccggctacggcacgaatgcccagcgcctgggcaaggattcggtgaaatccttcgactgctgctccttgacgctgcaaccatgtcgcaggccagtgatcaccaaggatggctatctattcgacaaggaggccatcctgcagtacatcgtgaccaagaagaacgagtacagccgccgactgaaggagtacgagcgtctgcggcgcgcggaggaggataaactgagccaggaggccaacagcaagcagcaggcgcgcatggagcgctttgttaatgccgagaagccagcgatgacacccgcccactcctcggccgctgccagcgagaagccgtcgacctcttccgccgctgctgccgcttcatctgaatcctcgtccgcatcctcgatatccaacatgaccaacgggcacgagaagaagctgcccagcttctggctgccctccgagtgccccaatgccgggttagccaaggcccagaagcccgacgccaccatctactgcccggtgtcgcagaaaccgctgcgagtcaaggatctgattgatgtgaagttcacgctgctcaaggacggcgacacgaagcgctcgctgattgccaaggaggcgcgctacatgtgccccattacccacgacgtgctcagcaacgcggtgccctgcgctgtgctgcgtcccactggcgatgtggtgaccatggagtgcgtggaacggctgatcagaaaggacatgatccatccgctcacggatcgcaagctcaaggagaaggacatcattcccctgcagcgaggcggcactggctacgcaacgacgaacgaccacctccaggccaaggaaaaacggcccatgctccaggcctaagacgaatttatatagccgccagctacttgggagcacttcaatagaaatgtaatcgttttagcactagctagtttaaacaatcaattatttctccagattttaaaacaattgtgtatcataacttatacaaaacttgggtattttatctgttccaattctaccttttcgtttattgcaagacgaagtgcatacatacttattgttaaataggaaaaaacaaaataaatacactgatactcgtaccacacaaccaatt

SEQ ID NO: 13083 - protein, 307 aa, DROSOPHILA
MTRHARNCTAGAVYTYNEKKRDAAESGYGTNAQRLGKDSVKSFDCCSLTLQPCRRPVITKDGYLFDKEAILQYIVTKKNEYSRRLKEYERLRRAEEDKLSQEANSKQQARMERFVNAEKPAMTPAHSSAAASEKPSTSSAAAAASSESSSASSISNMTNGHEKKLPSFWLPSECPNAGLAKAQKPDATIYCPVSQKPLRVKDLIDVKFTLLKDGDTKRSLIAKEARYMCPITHDVLSNAVPCAVLRPTGDVVTMECVERLIRKDMIHPLTDRKLKEKDIIPLQRGGTGYATTNDHLQAKEKRPMLQA

SEQ ID NO: 13084 - DNA, 4413 bp, DROSOPHILA
ggatggggtggtggctggctcctcgtcgctcccaccgtggtgactcaaccggttgctgcaactacaagcgactagagaagattttgcccgtttatttggcagggtagtgagttcttagaaattgaaggcaccagtgcatttatataactcaataggcacaaataaccaagtgccagtcggtgcggtggcatcaaattattcaggtatatagtatatggctcgatcgattaggggatcaagtgccaagacaattaagtgaagagcagccaggccgtttctatctcgattttagctgtatgtcagcaactacgctttttgacaatcgcaatcaaatagttaaataggctatttttaaaacctattcactgcaatttttccagcttaaatgttcgtaaagaatgtgcttaagaaattagtgtgtgtgcctaaataaattctgtcaagagaaagcgctggctcaatgaatcaatggctcaatggctcattgtttgattattgccaagatccaaaactaattaccaaacacacaaatgctgcaggctaaattctgattttgatcgattatattgtcgattatatatactatatattgtctcgaagacaagcaaaaagtcgaacttaaggtagatcatggattgagtagcatactaattgatttgcgaaaatcgcatttaatggcatagccatatatcagtgtcgcaaactcgtttgccggagtatataggcctggattgccgcccactcacgcctttcctcggggaaaaaccggtcgcctggactgtctttctttctttattgttatgattgctattattattattattactattattattggtattggtattggtattattgtgcctccttgtcgccgggcaaatagaagcgaaagagaacaaatacgagtgcaaaaaaaaagagcacgaaagccggggaaagaagcagcacatctgggtggctataaaagccaccagccggctccggattctccacagtcgagcttcaactgtttctcagatgatgtcgccgcataagacccacacctggctgccactggcggtggccgccctcctgctgatccttggaccgcagtcctccctggcggaggaacccatttgtatgtgcatcccggagtcactagttgaatgcatctaaccagttgaatccatttcatacgaacccaaaacggcagatcgcctgtgtgtgccgcaaatctatttggccgagtgccagcagctgctggccgatccctcggaggcgggcatccgcatggagtgcgtggctggacgggatcgagtggactgcctggagctgatcgagcagcgcaaggccgatgtgctggccaccgagccggaggacatgtacatcgcctatcatcgcaagaacgaggactatcgcgtgatctctgagatccgaacgcagcaggacaaggatggtaagtggtgcaaatgctcgtgggagcaaaatgcgaaatgctttcgaatgaaattaaagggtatttaaaatgtatagtactgactaatgactaatggccctttgttgttaatttgcgattcgaagcaaaaggctcgaaggaccaaaatagttactagttccctttttttttactcataaatctcctactggtttcatttctcgacagccgccttccgttacgagggcattatcctggtgaagaaggactcccccattcgcaccctgcagcagctgcgtggcgccaagtcctgccacactggcttcggccgcaacgtcggctacaagatccccatcaccaagctgaagaacacgcacgtcctgaaggtgtccgccgatccgcagatctccgctacggagcgcgaactgaagtcgctgtccgagttcttcacgcagtcgtgcctggtgggcacctactccacgcatccggaaacggatcgcctgctgaagaagaagtacgccaatctgtgcgctctgtgcgagaagccggagcagtgcaactatccggacaagttcagtggctatgatggcgccatacgctgcctggacaagggtcagggcgaggtggccttctccaaggtgcagtacatcaaaaagtactttggtctgccgggtgccggcccagatgcgccgccagcggagggcaatccggagaatttcgaatatctgtgcgaggatggcacccggcgcccggtcaccggacccgcctgctcctgggcccagcgcccctggagcggctacatctccaacgagcaggccgttcacaactcggagcagctgcaccaattgcagtcgcgtctggagcgcttcttcgccaatggactgcaggcgcagaacaaggacgccgccgcccatctgctcatccagccgaatgccgtgtaccacagcaaggatgctgccatcgatcccaaggtctatttggagcgtgccggctacaaggatgtgatcgagcgtgatggcagtgccatcaggaagatccgcttgtgcgcccagaacgacgacgagttcgccaaatgccaggcgctgcaccaggctgcctacgcccgcgacgctcgtccggaactcgagtgcgttcagtccaccgattgtgtggtggctctgaccaagaaggaggcggatttgaccattgttcgcgcaactggctacgcggatgcccgtagcaaccagctgcagccaatcgtctacgagcagagggctcaggatgatgtccttgtggcggtcgcagcacccggcgttacacgggaggctctccagaaggccagcatgtaagtggaatccctcgatcatccgtagcacattagctacatatactatcaatattccgcagcaaattcaatgagaattgcgaacgatcccgtgctgctgccgccttgttgaacaagcgacgtggcctggacgcttgtcgtgtctcatccagcgacgatggagaggtgcagatcgtgcccgcctccgagctggagaagcacaaggacgcgcagctggtgtgccccagtctggagcggcgaccggtcaccgacttccgtgactgcaacgtggacgtacagctgccccgtgccatcttcatccgatcggacaccaccagcgtggagcaggagacagtgaagcatctgttctcgctgatctcggacaagtttggtgcccgcggcaagctggtggatgttttcgctctgttcggcgaattccagaagggcaagaagaatgtgtatttcaacgtaagttatcctctttccttatttaagcttcggcgtttaaaaagaaaacaactttctctgcaggacaaagccgttcagctcaccacggagctcaaaaacgaaatccagaacgagcagatctacacagatctccagtgcaatgctaacaagattgccaagcagtgatcacattttatactactagatcccactatctgcatcaataaaatttaattcgaatataaacagatatcacgtcttaatgcctacttaagggaaaatcgaaaaaaaaagtttagacctattaaatatggctaactagttaccaaatacaatgctacaaagtttcccagccaattggcttttcacaccactcatgaattattcaaaacgaattgttctcattcaattacagcaatttatggttttcatttttaaaaaaaaaagacacattatatgtatggaaccagctaatttataatgtataatgtatatatatatatatcggttatggtatatagtttcacatatctgtgcttgggtaaaatcgccagggaaaatcgtacgtttcataattgcttcgaccacggtgtggatttcgggtaagggtttgcaaggctaatgggggcattggggaagtttgagaataaaattcgttgatccaaacattccattccagaagggcggctgtggcatcatctagtcttcggaggcatcgcgcacagcctctgtggaagactcggcaccactgggtgtctcctcctcctcggaatagtcctcgtcatgggtgtgggtcaccacggtgggcgtcgacggacgagtgtgcacaatggagctctggaacaagaacaagattcgattaacaatggtctagattataatcatagttggcaagtacttactgcgcgatgcaagtccttggggtccttaacgtgctcggcggtgcccgccaaaatgcgagccggctcatccggcgaggcagccaccgatgcggctcccgtagccggaacaggaacagggcccagtggcggaggcggctgatgggcctgatcatgggccaccgtcgactcatggggcagaagcatggccggagctcggaacatatacgagaatgggtagtaaatgaggttgagcagggtggccgcatagacgtcggcatatcgcaccacctggctggagaagaaggtctggcgcgagccggagcggaagagtgagcccatcataccgtaggacatgtccatcttgtgtg

SEQ ID NO: 13085 - DNA, 2006 bp, DROSOPHILA
cttcaactgtttctcagatgatgtcgccgcataagacccacacctggctgccactggcggtggccgccctcctgctgatccttggaccgcagtcctccctggcggaggaacccatttatcgcctgtgtgtgccgcaaatctatttggccgagtgccagcagctgctggccgatccctcggaggcgggcatccgcatggagtgcgtggctggacgggatcgagtggactgcctggagctgatcgagcagcgcaaggccgatgtgctggccaccgagccggaggacatgtacatcgcctatcatcgcaagaacgaggactatcgcgtgatctctgagatccgaacgcagcaggacaaggatgccgccttccgttacgagggcattatcctggtgaagaaggactcccccattcgcaccctgcagcagctgcgtggcgccaagtcctgccacactggcttcggccgcaacgtcggctacaagatccccatcaccaagctgaagaacacgcacgtcctgaaggtgtccgccgatccgcagatctccgctacggagcgcgaactgaagtcgctgtccgagttcttcacgcagtcgtgcctggtgggcacctactccacgcatccggaaacggatcgcctgctgaagaagaagtacgccaatctgtgcgctctgtgcgagaagccggagcagtgcaactatccggacaagttcagtggctatgatggcgccatacgctgcctggacaagggtcagggcgaggtggccttctccaaggtgcagtacatcaaaaagtactttggtctgccgggtgccggcccagatgcgccgccagcggagggcaatccggagaatttcgaatatctgtgcgaggatggcacccggcgcccggtcaccggacccgcctgctcctgggcccagcgcccctggagcggctacatctccaacgagcaggccgttcacaactcggagcagctgcaccaattgcagtcgcgtctggagcgcttcttcgccaatggactgcaggcgcagaacaaggacgccgccgcccatctgctcatccagccgaatgccgtgtaccacagcaaggatgctgccatcgatcccaaggtctatttggagcgtgccggctacaaggatgtgatcgagcgtgatggcagtgccatcaggaagatccgcttgtgcgcccagaacgacgacgagttcgccaaatgccaggcgctgcaccaggctgcctacgcccgcgacgctcgtccggaactcgagtgcgttcagtccaccgattgtgtggtggctctgaccaagaaggaggcggatttgaccattgttcgcgcaactggctacgcggatgcccgtagcaaccagctgcagccaatcgtctacgagcagagggctcaggatgatgtccttgtggcggtcgcagcacccggcgttacacgggaggctctccagaaggccagcatcaaattcaatgagaattgcgaacgatcccgtgctgctgccgccttgttgaacaagcgacgtggcctggacgcttgtcgtgtctcatccagcgacgatggagaggtgcagatcgtgcccgcctccgagctggagaagcacaaggacgcgcagctggtgtgccccagtctggagcggcgaccggtcaccgacttccgtgactgcaacgtggacgtacagctgccccgtgccatcttcatccgatcggacaccaccagcgtggagcaggagacagtgaagcatctgttctcgctgatctcggacaagtttggtgcccgcggcaagctggtggatgttttcgctctgttcggcgaattccagaagggcaagaagaatgtgtatttcaacgacaaagccgttcagctcaccacggagctcaaaaacgaaatccagaacgagcagatctacacagatctccagtgcaatgctaacaagattgccaagcagtgatcacattttatactactagatcccactatctgcatcaataaaatttaattcgaatataaacag

SEQ ID NO: 13086 - protein, 641 aa, DROSOPHILA
MMSPHKTHTWLPLAVAALLLILGPQSSLAEEPIYRLCVPQIYLAECQQLLADPSEAGIRMECVAGRDRVDCLELIEQRKADVLATEPEDMYIAYHRKNEDYRVISEIRTQQDKDAAFRYEGIILVKKDSPIRTLQQLRGAKSCHTGFGRNVGYKIPITKLKNTHVLKVSADPQISATERELKSLSEFFTQSCLVGTYSTHPETDRLLKKKYANLCALCEKPEQCNYPDKFSGYDGAIRCLDKGQGEVAFSKVQYIKKYFGLPGAGPDAPPAEGNPENFEYLCEDGTRRPVTGPACSWAQRPWSGYISNEQAVHNSEQLHQLQSRLERFFANGLQAQNKDAAAHLLIQPNAVYHSKDAAIDPKVYLERAGYKDVIERDGSAIRKIRLCAQNDDEFAKCQALHQAAYARDARPELECVQSTDCVVALTKKEADLTIVRATGYADARSNQLQPIVYEQRAQDDVLVAVAAPGVTREALQKASIKFNENCERSRAAAALLNKRRGLDACRVSSSDDGEVQIVPASELEKHKDAQLVCPSLERRPVTDFRDCNVDVQLPRAIFIRSDTTSVEQETVKHLFSLISDKFGARGKLVDVFALFGEFQKGKKNVYFNDKAVQLTTELKNEIQNEQIYTDLQCNANKIAKQ

SEQ ID NO: 13087 - DNA, 4495 bp, DROSOPHILA
gagaccaatgagaagaacgtgctgcccaccaaggaggtgatcgaggccgagaagcaggcttaaaatgggggctccaatgtggtccactccgatccgagatccgagatctgagatccgatccgatccgatcctcagtcaccccatctctctttttcgactcgccgcatctcactctttatacgtataaagctattccctctcatttttcaactgctaccaagttattcgaaccgctgcgcatgcgcgtgatagcaaaagtattttactattatcgtatttcggttgtccgttttttttttttttgcaatatttttacacatatatatatatattttttgtattaacaagcaagagagccagtctcattcctacagcgtaattaacataaaataaacattcgtctatcccatatatatttgtgcataaatgtttccaaaacacacgacaaacacacacatcatcatcggaggaagaataaaacgcagatacaaagcaatacgacagccaactcactcagaacatttacacaagaaaagacagcaaatatatgagaaatactttttaaaagacacgcaaaacgtatgaagcgtataaaacagaaaaacaaaaagaaatacggtagaaaagcatctatataaagagtatgtgtaattttttaatgaacttttttttatatactttacatacgatatatttatactgggaaaaataaaaaaaaaacataaatgtaacattttataacaaaaacgtactaaaactgcaccgacttttgctttcttcgggggcggaaaactctcaaacaataaaagaaacacaaatggttgtaatacgggaagtatgaactcttgattcgtggtaaatatacaaatatttgcttaaatcaaagacactagaataacaagatgcgtaacgccatacgatatttttgcacacgatttttttttatttattctatcgtctttgcttaaatgctagatttcatagctactcccgacaaacactaactggtggccaccacttcggtgtccattggtgtgcctgttgtctcggcggccactgtgacatcaatagcgccactgccagagaatgtggactccgtggcgtcaccatcgccggaggaatcggcttcggcctcggcactcttgccgacttcagcgtccgctgcagcagcagccgccactctcgcgtcctcgtacttattggtctcaaacttgctgagatcagcgcccagcagtcggagaatgtggatggtctcgtccttttggacataggcgcgcagactggaggtgccgcgccagcccaccgtgtacaacgtaaaccgctggtccacgtacttaagtatgcagctgcccacccctgaaatggaacatcattattagccaaccgtcagagcataggaaccggttgaacttacccaattccttgcagcgctcctgggtttccttcttcagttcgtgagtcgacggcggctgcgtgggatcagtgcaattgagcatcattaccaggtcctcccgctccacctggattctcctgctggcgcccatgaaggcattggaggtctggaggccctcctgggccaatcggaagggatgcaccgtatgccggttctcgcagcgcacgaatgtcttaacgcccgtgttgatgatcttaatgttgttttcgttgttaagcaccaaatcgcggatgggttcagagcagtaatagatgttcttctttttctccgtgacacagcgagttaagagacatcgttgactaagggattcgtccagctggtagaactccttgatcgcctggtagtcaggatcattctcgccgaagaagacataaggatcttccttgtagccatgcagacgtcgcttctttcgctgcggtccccacggaacggacttctcctcgatgggcttgccatccgcgtccacttgcggctcagctgcaggctgcttggccgtctcgttcagctttaccagctccaccacatcgttcttttcgaagcttagctgacgacgcttctccaacacggctacaaagaagccgccgctgtcctggagatgcggcaatacgcggaggcacttctccaacccgatcttggccatctcgtcggccggcagagggaacataccgggccgtattatagtgtgcaggctttcaggcacttcctcaaagcgggtaaagatctggtccacctccttggtggccagcttccagtcggtcatgccgggcttgtacttaagacctggcaccaagtgccccgcatccaccagctccaatgcaccgtcggcatcctttatgatccgctgcagcaccgcctcgttctcgatgggattcagtgagcaggtggagtacaccagccttccgccaacctccagcatctcagcgccacgacgtacgatgcggtattgaatgccgtggaggttgtaggcctgtgccaggttccacttcagccaaatgtctggattcttgcgcagtgtgccgtcgccggagcaaggtacatcgcacaagatcttatcgaacttaaggatcgcctttgagccgtccggcttcgtggtcacgagattgggaaagacactgctgtcgtggttggtcaccaacaggcagggcgagtttagacgcttggcttggtgaaccagcatgtagcaccgattgttgtctacatcgttggccagcacaaagccgggcggaatcttgtgctcctcgggagcagcgtgcagagcctcaatgagctgggctgtcttcgaacctggcgcagcacacatgtccaaaactttgtccgtgggtcggacatccaggacaattggcgggatcatggatacggcctcctgcctgctgatgccgcccgccgtggtctccacaattaggaagttgtgcagccggtagagcggctccgagcgtcgaatgtccttgcgggtaaggtgcagctggtaggccagtccgtttggataccacggcaggcacagcggacgttccacatcctcgggcgccttctggtgcagctcggccaccgccctcacatactcggtgaatagctgcgtctcaataatggatagcagggctttggcctcgtccttgaatcctgtcacacggaaagtagtgggcagattgtccctgatggaagcaaggaactgcgtccactcctcatcggtggcgcagatcttctgcagttggtagtacttgatgaagaaggcattatcccttttgatctcctcatacggctgggcctgacgatcggtgcgcttgggaccctttaagataaaaaatatatttaagaataaaatccaaaaacgtggaatgtttctcctttcaaattgaggtgactcacattctcccgcttttgacgtttgcgagccgcgaaaaaattttgcttctggtttcgacccatttgtcaatatcaataccaagttatcagtccactgaatatgtttaaaaaaaattaggcaagcgttgtgtgttttctaaacgaaacgaatagttaaaacgtgttcgtcgcctaactggcaacgctgtcgcgcgagagtcgccggacatttggtgcttggaagggaaggtgaaatatgctgctaaagaagtgaaattgaattgaaagggaattactttttacagtacttggtttccgtgctgcaaggaattgacttgtttttaaacgttaacttcatttgcatggcttacatttttagccccaaaatcaataagagctggtttcccaactatcggtaagcaaaatcaaacaacttatttcagttttctagaaactttaaaaacctgttagtttatgtaaggaaacctacatatcttgttgttatttacattttcgaattattttcattttttttttatatagttattaatagccaaatttgactcgaacatagctacgcgcctatcgttacaaaaatctccgttagccgacttcaaatgctaccgatagcagctgcgaaagcgatagcgtcggcaatcgaatccgaatttcccactttaaaaactaagaagtttttgtaagccactatggaaactccacccactcccaccacgaccacaccgccatcattgacaactgagggcaccatggacgacatccaatacctgctgcacctggaggcgatgcgccgttttcaggaagacagccgcaatgtaaagcgccaggtggaggagcaagtacgcatttggctggacgccaagtgtgagtatcagcgggactttgggcggctggcgaggctcctgaagtgcggagccctgcaggcggccgtggatgcccatcgtgtatctgatgtgaatcaagtcgaccaggcggccaaggatatcgctagtttgcgatccaaactgggcagtgatctgcgtcccgccattctggactccaacgatgtgaagcagtgcctggaacatctgaacaccacccacaaaccgcgcctaaatctatgccggcaacaacgggagttcgcccagaaccaagaagctctaagaagtttgcgtaccgccgtcgatggattggagaatggtatgg

SEQ ID NO: 13088 - DNA, 2360 bp, DROSOPHILA
ttgccagttaggcgacgaacacgttttaactattcgtttcgtttagaaaacacacaacgcttgcctaattttttttaaacatattcagtggactgataacttggtattgatattgacaaatgggtcgaaaccagaagcaaaattttttcgcggctcgcaaacgtcaaaagcgggagaatggtcccaagcgcaccgatcgtcaggcccagccgtatgaggagatcaaaagggataatgccttcttcatcaagtactaccaactgcagaagatctgcgccaccgatgaggagtggacgcagttccttgcttccatcagggacaatctgcccactactttccgtgtgacaggattcaaggacgaggccaaagccctgctatccattattgagacgcagctattcaccgagtatgtgagggcggtggccgagctgcaccagaaggcgcccgaggatgtggaacgtccgctgtgcctgccgtggtatccaaacggactggcctaccagctgcaccttacccgcaaggacattcgacgctcggagccgctctaccggctgcacaacttcctaattgtggagaccacggcgggcggcatcagcaggcaggaggccgtatccatgatcccgccaattgtcctggatgtccgacccacggacaaagttttggacatgtgtgctgcgccaggttcgaagacagcccagctcattgaggctctgcacgctgctcccgaggagcacaagattccgcccggctttgtgctggccaacgatgtagacaacaatcggtgctacatgctggttcaccaagccaagcgtctaaactcgccctgcctgttggtgaccaaccacgacagcagtgtctttcccaatctcgtgaccacgaagccggacggctcaaaggcgatccttaagttcgataagatcttgtgcgatgtaccttgctccggcgacggcacactgcgcaagaatccagacatttggctgaagtggaacctggcacaggcctacaacctccacggcattcaataccgcatcgtacgtcgtggcgctgagatgctggaggttggcggaaggctggtgtactccacctgctcactgaatcccatcgagaacgaggcggtgctgcagcggatcataaaggatgccgacggtgcattggagctggtggatgcggggcacttggtgccaggtcttaagtacaagcccggcatgaccgactggaagctggccaccaaggaggtggaccagatctttacccgctttgaggaagtgcctgaaagcctgcacactataatacggcccggtatgttccctctgccggccgacgagatggccaagatcgggttggagaagtgcctccgcgtattgccgcatctccaggacagcggcggcttctttgtagccgtgttggagaagcgtcgtcagctaagcttcgaaaagaacgatgtggtggagctggtaaagctgaacgagacggccaagcagcctgcagctgagccgcaagtggacgcggatggcaagcccatcgaggagaagtccgttccgtggggaccgcagcgaaagaagcgacgtctgcatggctacaaggaagatccttatgtcttcttcggcgagaatgatcctgactaccaggcgatcaaggagttctaccagctggacgaatcccttagtcaacgatgtctcttaactcgctgtgtcacggagaaaaagaagaacatctattactgctctgaacccatccgcgatttggtgcttaacaacgaaaacaacattaagatcatcaacacgggcgttaagacattcgtgcgctgcgagaaccggcatacggtgcatcccttccgattggcccaggagggcctccagacctccaatgccttcatgggcgccagcaggagaatccaggtggagcgggaggacctggtaatgatgctcaattgcactgatcccacgcagccgccgtcgactcacgaactgaagaaggaaacccaggagcgctgcaaggaattgggggtgggcagctgcatacttaagtacgtggaccagcggtttacgttgtacacggtgggctggcgcggcacctccagtctgcgcgcctatgtccaaaaggacgagaccatccacattctccgactgctgggcgctgatctcagcaagtttgagaccaataagtacgaggacgcgagagtggcggctgctgctgcagcggacgctgaagtcggcaagagtgccgaggccgaagccgattcctccggcgatggtgacgccacggagtccacattctctggcagtggcgctattgatgtcacagtggccgccgagacaacaggcacaccaatggacaccgaagtggtggccaccagttag

SEQ ID NO: 13089 - protein, 746 aa, DROSOPHILA
MGRNQKQNFFAARKRQKRENGPKRTDRQAQPYEEIKRDNAFFIKYYQLQKICATDEEWTQFLASIRDNLPTTFRVTGFKDEAKALLSIIETQLFTEYVRAVAELHQKAPEDVERPLCLPWYPNGLAYQLHLTRKDIRRSEPLYRLHNFLIVETTAGGISRQEAVSMIPPIVLDVRPTDKVLDMCAAPGSKTAQLIEALHAAPEEHKIPPGFVLANDVDNNRCYMLVHQAKRLNSPCLLVTNHDSSVFPNLVTTKPDGSKAILKFDKILCDVPCSGDGTLRKNPDIWLKWNLAQAYNLHGIQYRIVRRGAEMLEVGGRLVYSTCSLNPIENEAVLQRIIKDADGALELVDAGHLVPGLKYKPGMTDWKLATKEVDQIFTRFEEVPESLHTIIRPGMFPLPADEMAKIGLEKCLRVLPHLQDSGGFFVAVLEKRRQLSFEKNDVVELVKLNETAKQPAAEPQVDADGKPIEEKSVPWGPQRKKRRLHGYKEDPYVFFGENDPDYQAIKEFYQLDESLSQRCLLTRCVTEKKKNIYYCSEPIRDLVLNNENNIKIINTGVKTFVRCENRHTVHPFRLAQEGLQTSNAFMGASRRIQVEREDLVMMLNCTDPTQPPSTHELKKETQERCKELGVGSCILKYVDQRFTLYTVGWRGTSSLRAYVQKDETIHILRLLGADLSKFETNKYEDARVAAAAAADAEVGKSAEAEADSSGDGDATESTFSGSGAIDVTVAAETTGTPMDTEVVATS

SEQ ID NO: 13090 - DNA, 3655 bp, DROSOPHILA
ttaatgatgaattcgggtacagagatcgaacttttttatctagcatagcgcaacggaaacaatgtcgaaatgaagcaccggaaacggaaatgaaaccataagaaaaccctgtattgtatatcgctctatttttgatgtccgaatccaaatttccgagaaaaaaaaatggaaagcagagtaaacaaaaagaaatctaaaaaaaaccgaaacacaagcaaaaacaaaaacgaagggcgaagtttggaggagatcagctttttttggccaagtcagagaagggggaacgctgaaaaaagggcaaatgaaaccaacaaaagttgcattcaacaaagtaaataaaaatatttttattgtcattgcatatttcttaagctagtacttttaataactaaatcgtaagcgcggaaaaacaaagtaaatgaaaacacaaacgataggccacagcccaatacaaaaaaggattcataataaatcgcgtgccgaaactaaaaggatggcaaatacaaacgcaggcgaaaaatctgtagaaattacaatattgttataaatatttgtctcaatgagaaaacaaacaaacgaaaacaaccaaccaacaaacaaacaaaagcaaaacaaaaccaacaacaaagaaaaatatacattaaaaaatcaataaaaaatatttgaacaaattcgtatgcattttcatcaggatggatggggtggctttggggcagttggaaattcgtttgttccagtttcccccaggagtgctatccattcagctggaagttgagaggaacccaaattgaagcgcgtcacagcgtccgtttcacagaatgctttaatattaagtactcacacagcacacagactacaagatacgaatagatagatacaagatacaaaaagtacaagcgcatatacgcttgggattacaaatataaatacgtgtagatcagtcatagtgagtattggcgacggcaagatcctgcggagtctacgagatgaacaggtaaaggacgaaggtgcccaaaccgatgtagtggctgagatagccagcctgctgccagtgccacaggaaggagtcgccatcctcgccgacttccaggtcatcgcccagcagcacgacgcccagataggccaggtggaagatggccagcgccgtgaatgccagattagtgagcctcgccagccagtaggacagggagttcaatcgccgtttgctcgggcagtggctataccgacatcgttccttgcccggacacagattggcagtgatgcaggcattcaggaggctggcgagctgccgcctgagcagcgattcaccctcggctaggaacgccagcgagatgagcaccagatagatgcgcagatccatgccgtgcagcaggctggacaccagataggtggagagcacgaccaccaggatgcgtcccctcgaggtggacgcggtgggcttgcagggcgcgtagatgtaccgtttgagccactcgtgcatgggaatgttccagctccggaccaatgagctgatcgagcgcggccactcgatgcgccagggctgcgagatcaacggacccagcatgtccgactccttggtggcaccgtccagtcgctgatcggaggctaccagcagcgcctgcgccatcatgcccacaaagtagtggctgctgcgcacactcagtgcgtcccagtacatgaccaggaagtgcgagctatccccgaagaagtcactcagcgccggagccacgcaattggacacggtcacggccagcacgcagatcaccacgttgggcaagaggcgacgcaggctgaccagccagctattccgtggcaccagacagtccatgtagcagccgaagctcacccagggccccaaggcgcaggtggccggactgtagatgtagcccaggtaggcaaacggacccggaatcctcgcctgcagctgcccactggcggtcaggtcgaagcccagcgagataagcttcatattgaccaccatctggatgccgcgcagctgtggccagtcactgcgccgccgccaaatgagcagttcgtacaggaactggctgcccacggttagaacggccagaacttgagctcctcttcgtcccagtcgcaatagctggagcagcaggtagcccacggcggccagcaggagaagtaggagcagtcggtagcccaccgtgatctgcagtataatcaagccgcaggcgaagtggaacaaatgcagcggtgccaggctggtgaggcgtctgcgctgcgagtagaggaggcacagcaggcggcacaggaggcagaggagcagcatgggcgccacatactgcatgacctgcagcacagatggctgcacgcagctctgcaggctctcgagtaggcgcccggccagctccaggacaccgtgtccatctaccaccagctcctcctccacatcgtccccgccgaaataatagtcctcctcgccgtttggctgcccaaatctgtggtccaagctgccggctgtcaccacgtcgtcatcctcctcctcctcgtccagatcaatgtagtccgattcctcctcgaagtactggtagtccatcgccggccgcccaaagccaatacaatccgggggaatcaaggaaaaacccggaaatccgaggacttggaattatttgcaaagaatataccgcgcaatataccgaaaataccacatcggtggcttcgaactcatagctagtttatagctaagctgaaaataccagtagcttaaacagttttaaaaatcaaaataaaaaaaaatgtattaaacttgtaaaactgtttgttttgtacaccaagtgatgaaaaggttttgtatcagcttatagctcgttgtttttatcggctattgagttggcagatttcagcggatttccattgcgtctcagcttatttagtgatcaagatacggtcacaccgtatctagcagtaaataaactattttaagcagtttattcaaatttttcgctgccaaatccaggaaactctattgaaatgactcgccacgcacgtaactgcacggccggagccgtgtacacctacaacgagaagaagcgtgacgcggcggagtccggctacggcacgaatgcccagcgcctgggcaaggattcggtgaaatccttcgactgctgctccttgacgctgcaaccatgtcgcaggccagtgatcaccaaggatggctatctattcgacaaggaggccatcctgcagtacatcgtgaccaagaagaacgagtacagccgccgactgaaggagtacgagcgtctgcggcgcgcggaggaggataaactgagccaggaggccaacagcaagcagcaggcgcgcatggagcgctttgttaatgccgagaagccagcgatgacacccgcccactcctcggccgctgccagcgagaagccgtcgacctcttccgccgctgctgccgcttcatctgaatcctcgtccgcatcctcgatatccaacatgaccaacgggcacgagaagaagctgcccagcttctggctgccctccgagtgccccaatgccgggttagccaaggcccagaagcccgacgccaccatctactgcccggtgtcgcagaaaccgctgcgagtcaaggatctgattgatgtgaagttcacgctgctcaaggacggcgacacgaagcgctcgctgattg

SEQ ID NO: 13091 - DNA, 2338 bp, DROSOPHILA
atattgcgcggtatattctttgcaaataattccaagtcctcggatttccgggtttttccttgattcccccggattgtattggctttgggcggccggcgatggactaccagtacttcgaggaggaatcggactacattgatctggacgaggaggaggaggatgacgacgtggtgacagccggcagcttggaccacagatttgggcagccaaacggcgaggaggactattatttcggcggggacgatgtggaggaggagctggtggtagatggacacggtgtcctggagctggccgggcgcctactcgagagcctgcagagctgcgtgcagccatctgtgctgcaggtcatgcagtatgtggcgcccatgctgctcctctgcctcctgtgccgcctgctgtgcctcctctactcgcagcgcagacgcctcaccagcctggcaccgctgcatttgttccacttcgcctgcggcttgattatactgcagatcacggtgggctaccgactgctcctacttctcctgctggccgccgtgggctacctgctgctccagctattgcgactgggacgaagaggagctcaagttctggccgttctaaccgtgggcagccagttcctgtacgaactgctcatttggcggcggcgcagtgactggccacagctgcgcggcatccagatggtggtcaatatgaagcttatctcgctgggcttcgacctgaccgccagtgggcagctgcaggcgaggattccgggtccgtttgcctacctgggctacatctacagtccggccacctgcgccttggggccctgggtgagcttcggctgctacatggactgtctggtgccacggaatagctggctggtcagcctgcgtcgcctcttgcccaacgtggtgatctgcgtgctggccgtgaccgtgtccaattgcgtggctccggcgctgagtgacttcttcggggatagctcgcacttcctggtcatgtactgggacgcactgagtgtgcgcagcagccactactttgtgggcatgatggcgcaggcgctgctggtagcctccgatcagcgactggacggtgccaccaaggagtcggacatgctgggtccgttgatctcgcagccctggcgcatcgagtggccgcgctcgatcagctcattggtccggagctggaacattcccatgcacgagtggctcaaacggtacatctacgcgccctgcaagcccaccgcgtccacctcgaggggacgcatcctggtggtcgtgctctccacctatctggtgtccagcctgctgcacggcatggatctgcgcatctatctggtgctcatctcgctggcgttcctagccgagggtgaatcgctgctcaggcggcagctcgccagcctcctgaatgcctgcatcactgccaatctgtgtccgggcaaggaacgatgtcggtatagccactgcccgagcaaacggcgattgaactccctgtcctactggctggcgaggctcactaatctggcattcacggcgctggccatcttccacctggcctatctgggcgtcgtgctgctgggcgatgacctggaagtcggcgaggatggcgactccttcctgtggcactggcagcaggctggctatctcagccactacatcggtttgggcaccttcgtcctttacctgttcatctcgtagactccgcaggatcttgccgtcgccaatactcactatgactgatctacacgtatttatatttgtaatcccaagcgtatatgcgcttgtactttttgtatcttgtatctatctattcgtatcttgtagtctgtgtgctgtgtgagtacttaatattaaagcattctgtgaaacggacgctgtgacgcgcttcaatttgggttcctctcaacttccagctgaatggatagcactcctgggggaaactggaacaaacgaatttccaactgccccaaagccaccccatccatcctgatgaaaatgcatacgaatttgttcaaatattttttattgattttttaatgtatatttttctttgttgttggttttgttttgcttttgtttgtttgttggttggttgttttcgtttgtttgttttctcattgagacaaatatttataacaatattgtaatttctacagatttttcgcctgcgtttgtatttgccatccttttagtttcggcacgcgatttattatgaatccttttttgtattgggctgtggcctatcgtttgtgttttcatttactttgtttttccgcgcttacgatttagttattaaaagtactagcttaagaaatatgcaatgacaataaaaatatttttatttactttgttgaatgcaa

SEQ ID NO: 13092 - protein, 525 aa, DROSOPHILA
MDYQYFEEESDYIDLDEEEEDDDVVTAGSLDHRFGQPNGEEDYYFGGDDVEEELVVDGHGVLELAGRLLESLQSCVQPSVLQVMQYVAPMLLLCLLCRLLCLLYSQRRRLTSLAPLHLFHFACGLIILQITVGYRLLLLLLLAAVGYLLLQLLRLGRRGAQVLAVLTVGSQFLYELLIWRRRSDWPQLRGIQMVVNMKLISLGFDLTASGQLQARIPGPFAYLGYIYSPATCALGPWVSFGCYMDCLVPRNSWLVSLRRLLPNVVICVLAVTVSNCVAPALSDFFGDSSHFLVMYWDALSVRSSHYFVGMMAQALLVASDQRLDGATKESDMLGPLISQPWRIEWPRSISSLVRSWNIPMHEWLKRYIYAPCKPTASTSRGRILVVVLSTYLVSSLLHGMDLRIYLVLISLAFLAEGESLLRRQLASLLNACITANLCPGKERCRYSHCPSKRRLNSLSYWLARLTNLAFTALAIFHLAYLGVVLLGDDLEVGEDGDSFLWHWQQAGYLSHYIGLGTFVLYLFIS

SEQ ID NO: 13093 - DNA, 5662 bp, DROSOPHILA
agcgatgacacccgcccactcctcggccgctgccagcgagaagccgtcgacctcttccgccgctgctgccgcttcatctgaatcctcgtccgcatcctcgatatccaacatgaccaacgggcacgagaagaagctgcccagcttctggctgccctccgagtgccccaatgccgggttagccaaggcccagaagcccgacgccaccatctactgcccggtgtcgcagaaaccgctgcgagtcaaggatctgattgatgtgaagttcacgctgctcaaggacggcgacacgaagcgctcgctgattgccaaggaggcgcgctacatgtgccccattacccacgacgtgctcagcaacgcggtgccctgcgctgtgctgcgtcccacgtgagtgctcgctgggatttcgcgttgaaaacccttttaatagtaacctcttcactacagtggcgatgtggtgaccatggagtgcgtggaacggctgatcagaaaggacatgatccatccgctcacggatcgcaagctcaaggagaaggacatcattcccctgcagcgagtaagtacatcgcgaactgtgcaactattctgcattgctaaggtttctcgactatttcacagggcggcactggctacgcaacgacgaacgaccacctccaggccaaggaaaaacggcccatgctccaggcctaagacgaatttatatagccgccagctacttgggagcacttcaatagaaatgtaatcgttttagcactagctagtttaaacaatcaattatttctccagattttaaaacaattgtgtatcataacttatacaaaacttgggtattttatctgttccaattctaccttttcgtttattgcaagacgaagtgcatacatacttattgttaaataggaaaaaacaaaataaatacactgatactcgtaccacacaaccaattaaccagtagtccgaatttctatggaaacagccccgtcaaatgaaaccactgccaatcttggggttaaggtataatattatattctttatgtataattgtaacgtgtaatgtaaattgaagaagctgcagctggcggaatgcgggcaggtggccgagtacgtcgtctagatacgtcgctcctgctggtggctggtcgtccacgtccagttccacgtccactaggccgcctgcaccgactgcttctgcgaggagctgatcttgtcgcccagactcaaggccatgccctgtgtgaaaggcgcgaaatacggaatacggattagaaagttgcgcatgaccatgtgcagatgtgcggctggtttgtgctcgactctcacctgactcttggcgcgaatgcgtatgtgtcccgtcaccttcgaatcgggatcatcgacgggcttctcgatactcagattggccaaggcattctctccgaaaatggacctgcaaagtgagcggatgagttgtgatgagaatatgatggctactccatagtggacagctggacactcacttggcgtacatgttggcggccatgaagccgcactggccggacagcgccttctccggcgtgaggcacttcatgttggtgctcttcagcaggtgcttgagatattcgtgcaggtcggtgaagctggtgttgacggtgaccttgttctcccactcgaagtcctgccacatttgacggaactcggtgtccgtgcagctggccggaattatgtagtccatgatgtcgatgtgaatggtattgaggaccaccacattcgtgttcagggcggtttcgtaaactgttggttaagcgccataagtgagcgtgagtgcactttaacagcgaattccgcaattagcaactcaccaatattgccgaagatgatgccgttctctgtggaggagacctttacgttggccttgatattgcagaagtcgtgcggagccaggaccactggatgcgggcgctccaccagcttaagatcgcccaatgtggccaactccagtgtgcagttctgtagcgtgtcgtctgaaagtgatttcatggattgaaagcgatgccctttcgcctaaagatgcactactcactggtctggttgacgatcagcacgtccaggacaatatcgtactgattgacattgacgtaggcctccgcatagacgggatccgagaagccagtcagttgggtgaccttgttgagcttgctgttcggcgaggccacgtcgctcagctgggcgttcttgctgccggccaacgcctggttcagactggattcgaacacattctcgcccagctgattgtcacgtccgttcgagagctgtgcaaagagcaccggatcgtccggctgcaccttggcggtggccttctgcttctccttcaacatgcgctggtcctcgtcgtgctgcgcatccagcatcttgcccagagcctcgcggcagtacagtgtgaagacggagatagcctccggcgtgcgttcgctcagcgtgcgcaggcagacgaagatgcgatcggtgtcatcgttggttatgggcttgctagggaaaccggacttgcccaggtgcagtatcgagctcatgatcagcattacctgcgtggtcagacgattctgggcacgcgcctccgtctccagctctgcgtagcgcagtgccagcttggtcaacgtggcggatagagcggcgccgatgaagaagtcgccgtccatcaagtactgacgcaatggcggacgtttctccgccttggccaccctgcagaaagcattaaccagcgttagaatcagaactgcaaacaactattttgtaggtgctacgtattaagatgactcattgccgaacaatagataatgggcatgtctagctagaggcatacttatcagtgcaagctgatgcaatgccacaagcctcgaatgcctcattggtggcatgatatacgtacacgtagccattacttacggggccagactgtaggcactctgggtggcataggttccatcggaggtgaccttgttgctggcgtttccggagccagagccctctgcggcggatccagctgcattgccgcctgcggatccctgctgctgcttctgctcctcggtctggtcgccggccaagcgacgctgctccgcctccaccatgggcacttcgcccagcgtctgctgaatgacggcaatcacctccaggatttgcgagccctccacgtattcacccaaaatccaaacggcggcgcgatgaattttggaggacttaatctgcgggaaggcctcaattaaatgctcaatgatgagggcgcgcagggcggggaacttttggatggcttcgcgtatgaagataagcacatcggcggcggcaagttcgttggtatccgagaggaattcaaccagtacgggtataacattggcggccacatcgggaaacttgatggagcaggtgtgcagggtgcggacgagcagctgcctgtacttgccagtgtcctcgtgctccacattgtgcgtcttggccacctccttcttgaggaccagcaccatttcgccaatattacgcgaatagaccaagtccagggccagcgcgagtgttttcctgcgcacctcgatgtctggtgcggccaggacgcgcagaacgtccatcaccagatcctgcatcaccttctccatgccctcgtgctccttcatggccaccaggcgatcgagcacgattagcttgacgttgttgtcgctctccttgaccaccagttcgatgtagcaactggccgccgccttgatggccgtgggcgccagcgagagcgtaatcaatgtgccagcggactcgtaacgcaccgcattcgagctggagttcagcaggttgtagatgcagcgtatgaaccgcgaacgctcggcgggattggcatggcacaccttatagatcagctccacgatgaccagctgcagtatatcgccgaaagtgtgcacctgatcgatgcaactggccagatagttgagcgctcgctcctggtccgcatgcagtagcataaggaaggcgttgcgcttgcagctcatgtcctgctgcgtgtccaggaagctggcaatcagctccggcccatcgggcaccagccaatcgaagttcttgtagatggtaaagatggccagcacggcatttcgtcgcacatacgagtgccggtgatccaggcacgcccgtatggccggcatcagtggctccagcagctccggctccttcagcttgcagaggaagcgcagtgtcgagccgcgcagaaactcattgggatgctgcaaatccttcctgtacgcatcgcacaccagtatcatctcctgcagcagcttcccatccgccgatgtcttcggcacaatttcccagaagatgagcagcagcttcttgatcgtgtggttctgcaccggcaggacgaagcgtatgatggtcatgatcaggcccggataccgctccccattcagcagcaacttgattacccgcttcagcgtctcgatcttcacgttcgtgtcgcccttttcgagatcgcgcttcagttgcatctcgttggtcacctccaggtccggcgagttgattatcgtgtagcacggcacttgcgacgtcatcgtggctgcctattccgttcgcctgtttatcccgataatgccaattgaccaacttatttcctaatttccaaattcagtttttttttggtctttccgacgtgtcacaatgctaacagggtgtgaccgtgcgcggcgccgtgcggaaatgccacgcgagtgctgccagggctgcgcagtgctctagcggggacgcacaccgccggccagcaaccgcttcggctaacagcgggctgttgagcgcacttggcgcgcttttcaaacgttttgttatttgattgttatttatcattcttatcattttttagttcaacaagtttaacattagaatgtacaaaaagcagatgcacttaagctccacaaatgtatagctggaaatttacttgcattgcagtgcttgcatctacagagcgagtgctgttaagttacagtgtctttttcgcgccataactgcagtttgaaatgctatgtaactatgtaaatgcatgccaaaaatgtaaaaaatgaaaagtgttataaacaaattattctacattaagttaaagctaatgaatttttcatttcatatataacacatttaacaaaatattattttgttatatacttttatttaaaatagtaagtatcactgtttcaaaaatgccattcgatttgcaatttgtacttaaaataagtgagtagcagtgcttcatttttatcgcatacaatttccctgatgaatgccttttccgtgcggttaaataatgcaacgaagcttttgcgctgacaaacacactttgtgctgggcgtagctccattacctcccttctattacctggctgcagatagcctccgtgccagaggactgctgataagaggccacctcggactactcggaaaaatccccaacccattgcgatccgggtaaattcccgaccgctccggggctcttgaccttgcccagtgcgaagtgtgtgtgtttgcatctgcggcactgccaagcaatctaattcggtttctggtttcgattccactagaaagatccccgcccacgcccacgtcccaagtcccacggcatttgccattgtgatctcgttttgcacttcatcattcaattgccgcccccgcgactcattgcc

SEQ ID NO: 13094 - DNA, 3168 bp, DROSOPHILA
tgttagcattgtgacacgtcggaaagaccaaaaaaaaactgaatttggaaattaggaaataagttggtcaattggcattatcgggataaacaggcgaacggaataggcagccacgatgacgtcgcaagtgccgtgctacacgataatcaactcgccggacctggaggtgaccaacgagatgcaactgaagcgcgatctcgaaaagggcgacacgaacgtgaagatcgagacgctgaagcgggtaatcaagttgctgctgaatggggagcggtatccgggcctgatcatgaccatcatacgcttcgtcctgccggtgcagaaccacacgatcaagaagctgctgctcatcttctgggaaattgtgccgaagacatcggcggatgggaagctgctgcaggagatgatactggtgtgcgatgcgtacaggaaggatttgcagcatcccaatgagtttctgcgcggctcgacactgcgcttcctctgcaagctgaaggagccggagctgctggagccactgatgccggccatacgggcgtgcctggatcaccggcactcgtatgtgcgacgaaatgccgtgctggccatctttaccatctacaagaacttcgattggctggtgcccgatgggccggagctgattgccagcttcctggacacgcagcaggacatgagctgcaagcgcaacgccttccttatgctactgcatgcggaccaggagcgagcgctcaactatctggccagttgcatcgatcaggtgcacactttcggcgatatactgcagctggtcatcgtggagctgatctataaggtgtgccatgccaatcccgccgagcgttcgcggttcatacgctgcatctacaacctgctgaactccagctcgaatgcggtgcgttacgagtccgctggcacattgattacgctctcgctggcgcccacggccatcaaggcggcggccagttgctacatcgaactggtggtcaaggagagcgacaacaacgtcaagctaatcgtgctcgatcgcctggtggccatgaaggagcacgagggcatggagaaggtgatgcaggatctggtgatggacgttctgcgcgtcctggccgcaccagacatcgaggtgcgcaggaaaacactcgcgctggccctggacttggtctattcgcgtaatattggcgaaatggtgctggtcctcaagaaggaggtggccaagacgcacaatgtggagcacgaggacactggcaagtacaggcagctgctcgtccgcaccctgcacacctgctccatcaagtttcccgatgtggccgccaatgttatacccgtactggttgaattcctctcggataccaacgaacttgccgccgccgatgtgcttatcttcatacgcgaagccatccaaaagttccccgccctgcgcgccctcatcattgagcatttaattgaggccttcccgcagattaagtcctccaaaattcatcgcgccgccgtttggattttgggtgaatacgtggagggctcgcaaatcctggaggtgattgccgtcattcagcagacgctgggcgaagtgcccatggtggaggcggagcagcgtcgcttggccggcgaccagaccgaggagcagaagcagcagcagggatccgcaggcggcaatgcagctggatccgccgcagagggctctggctccggaaacgccagcaacaaggtcacctccgatggaacctatgccacccagagtgcctacagtctggccccggtggccaaggcggagaaacgtccgccattgcgtcagtacttgatggacggcgacttcttcatcggcgccgctctatccgccacgttgaccaagctggcactgcgctacgcagagctggagacggaggcgcgtgcccagaatcgtctgaccacgcaggtaatgctgatcatgagctcgatactgcacctgggcaagtccggtttccctagcaagcccataaccaacgatgacaccgatcgcatcttcgtctgcctgcgcacgctgagcgaacgcacgccggaggctatctccgtcttcacactgtactgccgcgaggctctgggcaagatgctggatgcgcagcacgacgaggaccagcgcatgttgaaggagaagcagaaggccaccgccaaggtgcagccggacgatccggtgctctttgcacagctctcgaacggacgtgacaatcagctgggcgagaatgtgttcgaatccagtctgaaccaggcgttggccggcagcaagaacgcccagctgagcgacgtggcctcgccgaacagcaagctcaacaaggtcacccaactgactggcttctcggatcccgtctatgcggaggcctacgtcaatgtcaatcagtacgatattgtcctggacgtgctgatcgtcaaccagaccaacgacacgctacagaactgcacactggagttggccacattgggcgatcttaagctggtggagcgcccgcatccagtggtcctggctccgcacgacttctgcaatatcaaggccaacgtaaaggtctcctccacagagaacggcatcatcttcggcaatattgtttacgaaaccgccctgaacacgaatgtggtggtcctcaataccattcacatcgacatcatggactacataattccggccagctgcacggacaccgagttccgtcaaatgtggcaggacttcgagtgggagaacaaggtcaccgtcaacaccagcttcaccgacctgcacgaatatctcaagcacctgctgaagagcaccaacatgaagtgcctcacgccggagaaggcgctgtccggccagtgcggcttcatggccgccaacatgtacgccaagtccattttcggagagaatgccttggccaatctgagtatcgagaagcccgtcgatgatcccgattcgaaggtgacgggacacatacgcattcgcgccaagagtggcatggccttgagtctgggcgacaagatcagctcctcgcagaagcagtcggtgcaggcggcctagtggacgtggaactggacgtggacgaccagccaccagcaggagcgacgtatctagacgacgtactcggccacctgcccgcattccgccagctgcagcttcttcaatttacattacacgttacaattatacataaagaatataatattataccttaaccccaa

SEQ ID NO: 13095 - protein, 963 aa, DROSOPHILA
MTSQVPCYTIINSPDLEVTNEMQLKRDLEKGDTNVKIETLKRVIKLLLNGERYPGLIMTIIRFVLPVQNHTIKKLLLIFWEIVPKTSADGKLLQEMILVCDAYRKDLQHPNEFLRGSTLRFLCKLKEPELLEPLMPAIRACLDHRHSYVRRNAVLAIFTIYKNFDWLVPDGPELIASFLDTQQDMSCKRNAFLMLLHADQERALNYLASCIDQVHTFGDILQLVIVELIYKVCHANPAERSRFIRCIYNLLNSSSNAVRYESAGTLITLSLAPTAIKAAASCYIELVVKESDNNVKLIVLDRLVAMKEHEGMEKVMQDLVMDVLRVLAAPDIEVRRKTLALALDLVYSRNIGEMVLVLKKEVAKTHNVEHEDTGKYRQLLVRTLHTCSIKFPDVAANVIPVLVEFLSDTNELAAADVLIFIREAIQKFPALRALIIEHLIEAFPQIKSSKIHRAAVWILGEYVEGSQILEVIAVIQQTLGEVPMVEAEQRRLAGDQTEEQKQQQGSAGGNAAGSAAEGSGSGNASNKVTSDGTYATQSAYSLAPVAKAEKRPPLRQYLMDGDFFIGAALSATLTKLALRYAELETEARAQNRLTTQVMLIMSSILHLGKSGFPSKPITNDDTDRIFVCLRTLSERTPEAISVFTLYCREALGKMLDAQHDEDQRMLKEKQKATAKVQPDDPVLFAQLSNGRDNQLGENVFESSLNQALAGSKNAQLSDVASPNSKLNKVTQLTGFSDPVYAEAYVNVNQYDIVLDVLIVNQTNDTLQNCTLELATLGDLKLVERPHPVVLAPHDFCNIKANVKVSSTENGIIFGNIVYETALNTNVVVLNTIHIDIMDYIIPASCTDTEFRQMWQDFEWENKVTVNTSFTDLHEYLKHLLKSTNMKCLTPEKALSGQCGFMAANMYAKSIFGENALANLSIEKPVDDPDSKVTGHIRIRAKSGMALSLGDKISSSQKQSVQAA

SEQ ID NO: 13096 - DNA, 5671 bp, DROSOPHILA
cccagtttaggtacggcacagtttcgccgttcctggcgagaagaaaggtgcgccggttacccaagcaattgatgccagcccaaacggagtgatgccagctttgggtgaaggatagccccatactctttaggaacgtggttgtgaggagtttgtcctcttgattgtcgagcaccattagttcggcaccaagttttcgacagcttcgatcggcaacatgccagttggcctgaaataatatttttgcgtttaaataaaatccttgtacaacgtattgtacgcacctcctgcaaagatacgtggtagcacttgtttccgactcgactaaacggcaacggacacgtctgtgcattggcacattcgagaatcagagctataagaaggaaaccgaaagaccctttgatgcacatgctcatgttttagggccaactgatatgtttatatgaaagctagctacttttaaacgctcggcagagaactatattttattgcaagcagtcgggagataatatttattaacgttatcttaagcaaattagggcaatcagtgcgaaaatggcaagcatgtacaacgactgcgaatttatcattatcatttattacaaaaatattcaaagcctgttaatttactatgccatctggacgatggcacatacgccccttttacatttaaattgcacaaaggaatataaaaaaagaacttataattttaatatgaaagatcttataaaaatttggaattatggaattacacctgtcaaaattccaattgttccactgagatatctcgttatatagaccttgttttgaattcaacgatgccttttcaataagtaccaccttcaaacatttaaacgttaaaataaataatttcatattaattttatttttgttttatgacttgatatatagataatatatacaataaatagtaagtataagctacatctttgcaaatgtgtccggagatttacaattaatcgctttaagcgcgaccgataactgaaggaataactcacatccctgggcgtctaacaactacccggtaatttctgttatctcttattcactgaacggcatttgtgacgagtagatcgtaagaaagtgcaactgtaatttgtgtaattatgaatttaccaccaaaccctgtaattgctcgtggacgtggtcgaggaagaaagcccaataatgtagaggccaatcgcggcttcgctccttcgctggtaggcatttatgtattttcatgttttatttttatccaacttatccaaaattagcttggccttgtcttttaatgtgcatcccatttcaatttctatgtaagatcagcatgcgtatcaaatgtatgtatgcataatgttattgtgtgtacatcgtttgtacattacattacatttttgtaatacgttaaggtcgaatagcatgtttgtacatcattttgccatgagttgttataacagtttattaatatgcatgtgacaataaaaacaaatacatgctaattaaataacactttgttataaaataagtgtaattagattaaataatcaattttttaaccaattcattcgcagggtcagaagtcggacccttcccactcggaaggaaatcaagcatccggaggcaatggtggtggtggtgatgctcaagtgggtccctcgatagagaaatccagtttgagcgcggtgcaaatgcacaagtccgagggttagtagttttatttggttttgctcaaaaaaatttgtttttttttttttcgaacccagcttctgtgagctgttgttattctcatttgttttcaatgcgttcgtaattaattagtaatttaattcaggcgatccgcgtggctccgtgcgcggccgtaggctaataacggatttggtgtattcacgtcctccagggatgaccagcaagaaaggagtggttggcactcatattaccgtgcaggcaaactattttaaggtattaaagcgtccaaactggaccatctaccagtaccgcgtcgattttacgcctgatgtggaggctacacgactgcgacggtctttcttgtatgaacataaagggatcctgggcggctacatctttgacggaaccaatatgttttgcatcaatcagttcaaagctgttcaagatagcccctatgttttggaactggttacgaagagtcgtgctggcgaaaacattgaaattaagatcaaggctgttggatctgtgcaatctacggatgccgagcagtttcaggtccttaatctcatactgcgcagggccatggagggcttagacttgaagctggtctcgcgctactactacgatcctcaagctaaggtttgccctctgtactcacatttatcatcactctcactttggtaatttaaaaatttagattaatttggagaatttccgcatgcaattatggcctggctatcagacttcgattcgccagcacgaaaatgatatattactttgttccgagatatgccacaaggttatgcgaactgagaccttgtacaatattttgtccgatgctattcgcgacagtgacgattatcaaagtacatttaagcgtgcagtaatgggtgagtttgattatggttctctcaagttcttattgtccaatttaaatacttcttaaaaggtatggtaatactaacggattataataacaaaacctatcgcattgacgatgtcgactttcaatcgacgccattgtgcaaatttaaaaccaatgacggtgagatttcgtacgtggattactataagaaggtaatattcgaaccaaaagcgtaattcattttccataagtaaaatctttttcagcgatacaacataatcattcgcgacttgaagcaacctctggtcatgtctcgtccgacagacaaaaatattcgtggtggaaatgaccaggccataatgatcattcccgagctggcacgggctacgggaatgacggacgctatgcgcgctgactttaggtgtgttttgatggaatcagttgtgatccaaaggatgctattaaatcaccgtttttataattctcaggacgttgagggccatgagtgaacataccaggctgaatccagatcgtcgcatcgaacgccttcgcatgttcaacaagcgcttaaagtcgtgtaaacagagtgtagagacccttaagtcctggaacatcgagctggactccgccttggtggagattccagcacgcgtgttgccaccggaaaaaatattattcggcaaccaaaaaatattcgtatgcgacgctcgcgccgattggaccaatgagtttcgcacctgttcgatgtttaaaaacgtgcatatcaataggtggtatgtgatcacaccgagtcgaaatctgcgcgagacccaggaatttgtgcagatgtgcatccgcacagccagcagcatgaagatgaacatctgcaatccaatatagtaagtattactaactatgataaatgcttaatataatttgacattccttgtagtgaggaaattccggatgaccgcaacggcacttactcccaagcgatcgacaacgccgcagctaacgatccacagatcgtgatggttgtcatgagatctccaaatgaagagaagtaattagcactagattaaccccaactaagccagtgctaactactttcccccatattgcaacagatatagctgcattaaaaaacgcacgtgcgtggacagaccggtgccatcgcaggtggtgacactaaaagttatcgcgcctcgacagcaaaaaccaactgggctgatgtcgatcgccacaaaggtggttattcaaatgaacgccaaattgatgggagctccctggcaggtagtgatccccctccacggtctgatgactgttggtttcgatgtctgccattcaccgaagaataagaacaagtcatatggggctttcgttgcaaccatggaccagaaggagtctttccgctacttctccaccgtaaacgaacacattaagggccaagagttgtccgagcagatgtcggtgaacatggcgtgcgccctgaggtcgtatcaggagcaacaccgttctttgccagagcgcattctcttctttcgcgacggtgttggcgatggtcagctctaccaggtggtaaacagcgaggtgaacaccctaaaggacaggctcgacgaaatttacaaatcagctggcaaacaggagggctgtcgcatgacatttataattgtatccaagcgcattaattctcgctactttactgggcatcgcaacccagttccgggcactgtagtcgatgacgttattaccttgccagagcgctacgacttcttcctagtgtcccaggctgttcggataggaactgtgtcgcctaccagctacaatgttatttctgacaacatgggactaaacgccgataagctgcagatgctctcctataagatgacccatatgtactacaattacagcggaaccatacgagtccccgctgtctgccattacgcccacaaattggctttcctcgtagccgaatccattaatcgtgcgccttcagcaggactgcagaatcaattgtactttttgtaaaactatgacttgcattaaatgcgttaacaattttacgatttgatatatgtatgtagatatgtacatcatttgaatttaataaaggtattgcacatttattgtctaccaatctgaaataatcgttgtttcttttaaatatgtaaatgtttttgtctataaagttccgttgctggaaaatgcatatattcgtatgaaatgagcttagtaaataagttaacacaatttacaattaacacaatatacaatttaataattcactgcaactttttccaatgcacaattacatataaatttcaattgttgccgaacacgtgcaatgctgttttaatcctaatatttcattttaaatcaaagttgttttgttgctgaccaaacggagtgttgatcagttgaaaagatccatttctaataggaatttccacattcactccatcaaagtctaaaagaaaaattattctgtgtgagtgcttgcaggagtaatcgaactttaaagaggttcggctcacctggtcaaccccttaaatgcagatgctaggactcgatttcctcttttacagtatttggcgtcgctggtgttgtttcttcatcgttcgagtcctaaattaaaaattgaacagttaacggaaatgtatacttagattgaaaaggtaattttaaatagcgaaaaaaagcgaatataaaatacaatcggatttccgaagttctcagatcaataattgtcaactactatacaaaacgaccaatttaaataataatttagacgcaaatttcggccagtgcataggatcacaggcatgcatgacaaaaaatggtaagcaaagggaaactatataggtttaaaacagtcgtaataaaattaagtgtgcacctaagattttacaatggatacatatgtatatcactttatagtcccatgtataacttatgttaaagtattataaagtatattaaatacaaaataatatcgtattgatttttctctatttgacaattatatactacgtttacacactaaattaaaatacattcttcaatcaagaaattatacttatagcaagtttatcaacttgtttatttacatgtaagtactgtccaatacaaaaatagaagaaa

SEQ ID NO: 13097 - DNA, 2838 bp, DROSOPHILA
tgaaggaataactcacatccctgggcgtctaacaactacccggtaatttctgttatctcttattcactgaacggcatttgtgacgagtagatcgtaagaaagtgcaactgtaatttgtgtaattatgaatttaccaccaaaccctgtaattgctcgtggacgtggtcgaggaagaaagcccaataatgtagaggccaatcgcggcttcgctccttcgctgggtcagaagtcggacccttcccactcggaaggaaatcaagcatccggaggcaatggtggtggtggtgatgctcaagtgggtccctcgatagagaaatccagtttgagcgcggtgcaaatgcacaagtccgagggcgatccgcgtggctccgtgcgcggccgtaggctaataacggatttggtgtattcacgtcctccagggatgaccagcaagaaaggagtggttggcactcatattaccgtgcaggcaaactattttaaggtattaaagcgtccaaactggaccatctaccagtaccgcgtcgattttacgcctgatgtggaggctacacgactgcgacggtctttcttgtatgaacataaagggatcctgggcggctacatctttgacggaaccaatatgttttgcatcaatcagttcaaagctgttcaagatagcccctatgttttggaactggttacgaagagtcgtgctggcgaaaacattgaaattaagatcaaggctgttggatctgtgcaatctacggatgccgagcagtttcaggtccttaatctcatactgcgcagggccatggagggcttagacttgaagctggtctcgcgctactactacgatcctcaagctaagattaatttggagaatttccgcatgcaattatggcctggctatcagacttcgattcgccagcacgaaaatgatatattactttgttccgagatatgccacaaggttatgcgaactgagaccttgtacaatattttgtccgatgctattcgcgacagtgacgattatcaaagtacatttaagcgtgcagtaatgggtatggtaatactaacggattataataacaaaacctatcgcattgacgatgtcgactttcaatcgacgccattgtgcaaatttaaaaccaatgacggtgagatttcgtacgtggattactataagaagcgatacaacataatcattcgcgacttgaagcaacctctggtcatgtctcgtccgacagacaaaaatattcgtggtggaaatgaccaggccataatgatcattcccgagctggcacgggctacgggaatgacggacgctatgcgcgctgactttaggacgttgagggccatgagtgaacataccaggctgaatccagatcgtcgcatcgaacgccttcgcatgttcaacaagcgcttaaagtcgtgtaaacagagtgtagagacccttaagtcctggaacatcgagctggactccgccttggtggagattccagcacgcgtgttgccaccggaaaaaatattattcggcaaccaaaaaatattcgtatgcgacgctcgcgccgattggaccaatgagtttcgcacctgttcgatgtttaaaaacgtgcatatcaataggtggtatgtgatcacaccgagtcgaaatctgcgcgagacccaggaatttgtgcagatgtgcatccgcacagccagcagcatgaagatgaacatctgcaatccaatatatgaggaaattccggatgaccgcaacggcacttactcccaagcgatcgacaacgccgcagctaacgatccacagatcgtgatggttgtcatgagatctccaaatgaagagaaatatagctgcattaaaaaacgcacgtgcgtggacagaccggtgccatcgcaggtggtgacactaaaagttatcgcgcctcgacagcaaaaaccaactgggctgatgtcgatcgccacaaaggtggttattcaaatgaacgccaaattgatgggagctccctggcaggtagtgatccccctccacggtctgatgactgttggtttcgatgtctgccattcaccgaagaataagaacaagtcatatggggctttcgttgcaaccatggaccagaaggagtctttccgctacttctccaccgtaaacgaacacattaagggccaagagttgtccgagcagatgtcggtgaacatggcgtgcgccctgaggtcgtatcaggagcaacaccgttctttgccagagcgcattctcttctttcgcgacggtgttggcgatggtcagctctaccaggtggtaaacagcgaggtgaacaccctaaaggacaggctcgacgaaatttacaaatcagctggcaaacaggagggctgtcgcatgacatttataattgtatccaagcgcattaattctcgctactttactgggcatcgcaacccagttccgggcactgtagtcgatgacgttattaccttgccagagcgctacgacttcttcctagtgtcccaggctgttcggataggaactgtgtcgcctaccagctacaatgttatttctgacaacatgggactaaacgccgataagctgcagatgctctcctataagatgacccatatgtactacaattacagcggaaccatacgagtccccgctgtctgccattacgcccacaaattggctttcctcgtagccgaatccattaatcgtgcgccttcagcaggactgcagaatcaattgtactttttgtaaaactatgacttgcattaaatgcgttaacaattttacgatttgatatatgtatgtagatatgtacatcatttgaatttaataaaggtattgcacatttattgtctaccaatctg

SEQ ID NO: 13098 - protein, 866 aa, DROSOPHILA
MNLPPNPVIARGRGRGRKPNNVEANRGFAPSLGQKSDPSHSEGNQASGGNGGGGDAQVGPSIEKSSLSAVQMHKSEGDPRGSVRGRRLITDLVYSRPPGMTSKKGVVGTHITVQANYFKVLKRPNWTIYQYRVDFTPDVEATRLRRSFLYEHKGILGGYIFDGTNMFCINQFKAVQDSPYVLELVTKSRAGENIEIKIKAVGSVQSTDAEQFQVLNLILRRAMEGLDLKLVSRYYYDPQAKINLENFRMQLWPGYQTSIRQHENDILLCSEICHKVMRTETLYNILSDAIRDSDDYQSTFKRAVMGMVILTDYNNKTYRIDDVDFQSTPLCKFKTNDGEISYVDYYKKRYNIIIRDLKQPLVMSRPTDKNIRGGNDQAIMIIPELARATGMTDAMRADFRTLRAMSEHTRLNPDRRIERLRMFNKRLKSCKQSVETLKSWNIELDSALVEIPARVLPPEKILFGNQKIFVCDARADWTNEFRTCSMFKNVHINRWYVITPSRNLRETQEFVQMCIRTASSMKMNICNPIYEEIPDDRNGTYSQAIDNAAANDPQIVMVVMRSPNEEKYSCIKKRTCVDRPVPSQVVTLKVIAPRQQKPTGLMSIATKVVIQMNAKLMGAPWQVVIPLHGLMTVGFDVCHSPKNKNKSYGAFVATMDQKESFRYFSTVNEHIKGQELSEQMSVNMACALRSYQEQHRSLPERILFFRDGVGDGQLYQVVNSEVNTLKDRLDEIYKSAGKQEGCRMTFIIVSKRINSRYFTGHRNPVPGTVVDDVITLPERYDFFLVSQAVRIGTVSPTSYNVISDNMGLNADKLQMLSYKMTHMYYNYSGTIRVPAVCHYAHKLAFLVAESINRAPSAGLQNQLYFL

SEQ ID NO: 13099 - DNA, 2852 bp, DROSOPHILA
caacagaagcggatggtcgctatatatgctatatgctatatggctaggctatatggctactcaaacggatcgaatttacatacaacttataacgcatatatatagcactttctagatgtggcaagcttttaagcaaatcgatcggcagcggtacataattgctgtggttgctgttgttgttcgtagttcattgcgattgaaaataggtggtttacctgacttaatgccgttggcatagccttcatcgtgtgaatatttaccggcaggggtggaatgccagtgattccactagttccgctcagcagtttctccacggacgtctgtccggttccgtactgcatcgattgaatggcatggctgcttagactcgaggatatgccgctgattgagttgggcaccagggccgatatggatgataggccgccttggccgccgcccccgaccacgcctcccgatccagcggagacgctgtgggcggcagcagcggcggccgcgctgtgcgagccaagactggtgccgctcaagctggtgctggccccaccattgggcagcgtggaggccagcgattgcggcaggcttgagtagccggaggatagggcggagacaccgccgccgccgccgccgacgccacctcctcctcctccgcttcctcccagaactgctcttttgtagcggttcagttcttcttcgagttctgcgggcattacaaattccattctatattctatttctgtattagtgttatctctggcttgcttaccactctttgatatggttctaaattcgctatttaccgtgctcaacatggaactgggcggcaatgctgacatgctggcgctggccgaggtgcgaggttgttccagctcggccagcacgcgattatcctgcaattaggcaataaggatagatagatttgtagtaaaatgacaattctctagagaacttgaatgtacatcttaataggctattactttagcattgatctattatttccccaactgccctgagaagtccgaagtagacaattttgtatagaaaaaaatccaaattcaacgtgagcaatccaaaccagattggacggatggatagctcggtgccatccggagccgaaagcggtcttatcaaggagtacaaggactttgccaaatgcctggacgaactggagttcaagaccgatgagctgctaatcgatgctaaaatggtggatcaggagttggccaactgccacaagtttcgcgaggatcagctgctgaagcatctgacggagaagaacgacgacgacgagcagatgcagttgctgcgggaaaacatcgagctcaaggcgaccggcgttgagttccaacacggcattgagctgatcatggagaagtaccgtgagcacagcgaaggggacatgttaatcgatacctaccaactgagggagcactacctggccggtttgtcgaaggtggtcgaagagcaggatgcccgcatcgagcgtatggttgatgtgatgaagctaactgtcgacttcgaggaccggagcagtgccgagaaccagcagatcatttgccagctgactgatgaaaatgagcagttgcgtcgtcagttgcagatcagtaccaccgatgagctgttccgccagggagcactgagctccagcgaaagtagcactcagatcggaccaaacgattctttggattcgagtgccacccgggagaatagcatctacagcatagatagcttcctctcctgcctttcgccgagcagcgtggaggatgattcggagtgctcatccaacaattcgctgctgagtgagctggaagtcacttgctttattgaggaggctctggccgagaagcccgaggagtagacctacaacatggacgaataggcacaacacacgttcctgccccactgcaacactggctgtttacgttgattgaatacttggtacttggtacccgaaatataatttcattcgaggctacactatccacacactactagctgtctgttagctgttgctgttctttcataaagatctatataccatttgcactcctaggagattagttgcacttaaatacctgctcaatctttgccattatgatatcaatctcggatccttggtcctggtggctgattgtcggtgcccaagtgacggtggagctgctggccgatgtaggaatggtcgcgccgccaccggaggacacgctccccattccggagcaggccgagcgggatgcctgtttggccttcagagccgacgtcagttcgatttgcagctcctcgcagcgcacattttccagcgcaacctatggatttttagagttcaatacgattgagtagatatgatttgagggcatatagtcaccttcttttccagttcccgggctctcgactgcagattctccaccgcctcggcatcgggacgagcgctaccgctcagattgcgtatttgtgccagggtttcctaggatagcatatatatataaatacagataaacaaaatgttctataaatcctataacaatacaattgcaatatactgttcttaaaatcaaactatagtaccatagtttttcatctgaaattccattaatatgtgcatgagttcacggtacctggaaggacactcacctgatgcgcccgctcgatctccgtgcgccgcatctcggcatcgcgcagctgcaggctgagggcgtccagcattccgttgggggtggtgccagcggccacggcagcggccgccgactgatgatggtgcatcgactcgtacggcatgctgtggctgcccctcggacgactgcaatggaagcgataatcgcacatgagaatggggtcagtgaatctgcagcacgacgaatgga

SEQ ID NO: 13100 - DNA, 852 bp, DROSOPHILA
gccctgagaagtccgaagtagacaattttgtatagaaaaaaatccaaattcaacgtgagcaatccaaaccagattggacggatggatagctcggtgccatccggagccgaaagcggtcttatcaaggagtacaaggactttgccaaatgcctggacgaactggagttcaagaccgatgagctgctaatcgatgctaaaatggtggatcaggagttggccaactgccacaagtttcgcgaggatcagctgctgaagcatctgacggagaagaacgacgacgacgagcagatgcagttgctgcgggaaaacatcgagctcaaggcgaccggcgttgagttccaacacggcattgagctgatcatggagaagtaccgtgagcacagcgaaggggacatgttaatcgatacctaccaactgagggagcactacctggccggtttgtcgaaggtggtcgaagagcaggatgcccgcatcgagcgtatggttgatgtgatgaagctaactgtcgacttcgaggaccggagcagtgccgagaaccagcagatcatttgccagctgactgatgaaaatgagcagttgcgtcgtcagttgcagatcagtaccaccgatgagctgttccgccagggagcactgagctccagcgaaagtagcactcagatcggaccaaacgattctttggattcgagtgccacccgggagaatagcatctacagcatagatagcttcctctcctgcctttcgccgagcagcgtggaggatgattcggagtgctcatccaacaattcgctgctgagtgagctggaagtcacttgctttattgaggaggctctggccgagaagcccgaggagtag

SEQ ID NO: 13101 - protein, 256 aa, DROSOPHILA
MDSSVPSGAESGLIKEYKDFAKCLDELEFKTDELLIDAKMVDQELANCHKFREDQLLKHLTEKNDDDEQMQLLRENIELKATGVEFQHGIELIMEKYREHSEGDMLIDTYQLREHYLAGLSKVVEEQDARIERMVDVMKLTVDFEDRSSAENQQIICQLTDENEQLRRQLQISTTDELFRQGALSSSESSTQIGPNDSLDSSATRENSIYSIDSFLSCLSPSSVEDDSECSSNNSLLSELEVTCFIEEALAEKPEE

SEQ ID NO: 13102 - DNA, 4462 bp, DROSOPHILA
ggtggctctgaccaagaaggaggcggatttgaccattgttcgcgcaactggctacgcggatgcccgtagcaaccagctgcagccaatcgtctacgagcagagggctcaggatgatgtccttgtggcggtcgcagcacccggcgttacacgggaggctctccagaaggccagcatgtaagtggaatccctcgatcatccgtagcacattagctacatatactatcaatattccgcagcaaattcaatgagaattgcgaacgatcccgtgctgctgccgccttgttgaacaagcgacgtggcctggacgcttgtcgtgtctcatccagcgacgatggagaggtgcagatcgtgcccgcctccgagctggagaagcacaaggacgcgcagctggtgtgccccagtctggagcggcgaccggtcaccgacttccgtgactgcaacgtggacgtacagctgccccgtgccatcttcatccgatcggacaccaccagcgtggagcaggagacagtgaagcatctgttctcgctgatctcggacaagtttggtgcccgcggcaagctggtggatgttttcgctctgttcggcgaattccagaagggcaagaagaatgtgtatttcaacgtaagttatcctctttccttatttaagcttcggcgtttaaaaagaaaacaactttctctgcaggacaaagccgttcagctcaccacggagctcaaaaacgaaatccagaacgagcagatctacacagatctccagtgcaatgctaacaagattgccaagcagtgatcacattttatactactagatcccactatctgcatcaataaaatttaattcgaatataaacagatatcacgtcttaatgcctacttaagggaaaatcgaaaaaaaaagtttagacctattaaatatggctaactagttaccaaatacaatgctacaaagtttcccagccaattggcttttcacaccactcatgaattattcaaaacgaattgttctcattcaattacagcaatttatggttttcatttttaaaaaaaaaagacacattatatgtatggaaccagctaatttataatgtataatgtatatatatatatatcggttatggtatatagtttcacatatctgtgcttgggtaaaatcgccagggaaaatcgtacgtttcataattgcttcgaccacggtgtggatttcgggtaagggtttgcaaggctaatgggggcattggggaagtttgagaataaaattcgttgatccaaacattccattccagaagggcggctgtggcatcatctagtcttcggaggcatcgcgcacagcctctgtggaagactcggcaccactgggtgtctcctcctcctcggaatagtcctcgtcatgggtgtgggtcaccacggtgggcgtcgacggacgagtgtgcacaatggagctctggaacaagaacaagattcgattaacaatggtctagattataatcatagttggcaagtacttactgcgcgatgcaagtccttggggtccttaacgtgctcggcggtgcccgccaaaatgcgagccggctcatccggcgaggcagccaccgatgcggctcccgtagccggaacaggaacagggcccagtggcggaggcggctgatgggcctgatcatgggccaccgtcgactcatggggcagaagcatggccggagctcggaacatatacgagaatgggtagtaaatgaggttgagcagggtggccgcatagacgtcggcatatcgcaccacctggctggagaagaaggtctggcgcgagccggagcggaagagtgagcccatcataccgtaggacatgtccatcttgtgtgtcacatcgcggatgcacgtgcgcagctgcgaaatgtccggcttgaccttggcactcgagtcgagatccctgtacaggtcgcccagcttgatgtccaggttctgtagctccgcaaacagctggcactcatccgtccaaacgtgcagctccctcaccaattcgggcacaattaggaaggtgcgccagcctcgaatcttcttcgatttgagaatatcgccaaaaatgtgatcgcccacatagagcacgtccttgcctttggcattgatgaacttggtaaagagctcgcaggagccaccggaataaacctgacccggctgcaggggtccaacgtgtgtgccgatcttcaggcttccggtcttcgtgtccacctgccgcagcacggtgccctcgtcgaagaagagcggcttgcgggcatccaccacgatcacatcgaagtaggtcttccagtcgcgatgcggctcatccggagtggcgccatgggggaaatcaaacaggtaggtcatgatctcgttggtgtacgtatagtcgctgttggtcagcataaagagtttggcgcccgactcccggattcgcgaaaggaccgtgggcaaacgctcgtccttcttcacatagtgagccatattctagttgatagtatagtatagtggtattaaaacggacgatcttcacaagatgatctaggtgcagtaaactcacctgagtggtgcgacgcttcagatcgccatcggaatgcacccagtcgacggcacgtcgcacatcctggaaaatcgacttgtaggtaaaaagtaaatcgccagctttgatgccgcgctcaacgctgtcgggtgaaaagaatgagtaggagaaagtagagaaaggggaatagagcagcaatagaccagggagtagaccagaaggcacagatacatatatcttttcagataaatgcaagatcaaaaggtttataaagctagcaggagcaatattttccattcaagcgattcaaacttaccgcacaaagtcgctgctgttggttaggaagtcgacgagacaggcaaggagataggtttcaggaagattgaagagagtattcaggacatagacacgcgactcgtccagtttcaagaacttgttgggatacaactcgtacacctggtgactaaaacaagggaaggaaggggatcacgtcagtgcgttcgcgataagtttaagttcactccactcactgtttgatgaactcgaagccatgaacgcagaccaggatgttgccgtaggcatccactttcagcagattcccgtagagagtgtcgaaccacaggccgcgtactgggaaggtgggatcgtactcgaactgcaggatctccttggggtagcccatgaagaccaggcgctccttgaccaggttgaagcccagctgctcatactgcggtgacttgtactctgttcggaatagagatggtcaacattatacggatatgtggtatatggatgtgtggttagtatcggtgtcccacctgccaaggtgtagtccatatcgaagccatagtacttgatattctccaaatgcagcgatctgttcacaaacactctgtttataaaaagaaacaacagaatatttacattattatgttgcatacgtttaggcttagaaggaaaagttaccaccactacaaaacttcaatataaactgtgaattttagtctatttcagaatattacattattcatattaatttccaccaatacttattactattatagataagattcttcttcaaattatatgaatattgtataaatcattaattttgtccctcatttcattttcaatgccaattatcacctgctaattgagtttatatcaatgtttattgcacattttcatcagtcattgttcttattatatataagatcaggtagatagattctataatgttttcagtctagaaaactaatcgatttggctgatcattcgatcggttaagtgagtcaatgggttatcaaattggcggggaatcgcgaatggagaacggcgtgaaaaactagcatcagtttgcctcgagtgcaaataactggcgcatggaaatggcgtgaaaatcgtttgacattcaattttcaactttgttgtggctctttgatggcggcgtggcgtggggccctcaggcttttccattttccgccagccaaaggcgttgctcggtctcaattcgccgcggcttcgactgcggtcagcaattagtgttgaaaacttgttgtgggcggctcgggctgccacgcccctttcgccttcgacagactgtgtacggatgtgtgtgtgagtgtgtatgtgggttggtgccacgcctctttgcggaaaaaactcattagcgggatgagcgtggacaaaatgttttgagagataccctcatttttggggttttccattttccatttttggcacagaattgggtcattcgatgtactcgatttatcatggttgaaaaactattcacttttcatgctcccatctttgttgttccccaccgaacactacatacatattttgaatactttttaatgtcggtccgatcaataattcgattaatcataactgggatgggattatgccaacaccaccgccgtctctcagtcgggca

SEQ ID NO: 13103 - DNA, 2009 bp, DROSOPHILA
atgcaacataataatgtaaatattctgttgtttctttttataaacagagtgtttgtgaacagatcgctgcatttggagaatatcaagtactatggcttcgatatggactacaccttggcagagtacaagtcaccgcagtatgagcagctgggcttcaacctggtcaaggagcgcctggtcttcatgggctaccccaaggagatcctgcagttcgagtacgatcccaccttcccagtacgcggcctgtggttcgacactctctacgggaatctgctgaaagtggatgcctacggcaacatcctggtctgcgttcatggcttcgagttcatcaaacatcaccaggtgtacgagttgtatcccaacaagttcttgaaactggacgagtcgcgtgtctatgtcctgaatactctcttcaatcttcctgaaacctatctccttgcctgtctcgtcgacttcctaaccaacagcagcgactttgtgcgcgttgagcgcggcatcaaagctggcgatttactttttacctacaagtcgattttccaggatgtgcgacgtgccgtcgactgggtgcattccgatggcgatctgaagcgtcgcaccactcagaatatggctcactatgtgaagaaggacgagcgtttgcccacggtcctttcgcgaatccgggagtcgggcgccaaactctttatgctgaccaacagcgactatacgtacaccaacgagatcatgacctacctgtttgatttcccccatggcgccactccggatgagccgcatcgcgactggaagacctacttcgatgtgatcgtggtggatgcccgcaagccgctcttcttcgacgagggcaccgtgctgcggcaggtggacacgaagaccggaagcctgaagatcggcacacacgttggacccctgcagccgggtcaggtttattccggtggctcctgcgagctctttaccaagttcatcaatgccaaaggcaaggacgtgctctatgtgggcgatcacatttttggcgatattctcaaatcgaagaagattcgaggctggcgcaccttcctaattgtgcccgaattggtgagggagctgcacgtttggacggatgagtgccagctgtttgcggagctacagaacctggacatcaagctgggcgacctgtacagggatctcgactcgagtgccaaggtcaagccggacatttcgcagctgcgcacgtgcatccgcgatgtgacacacaagatggacatgtcctacggtatgatgggctcactcttccgctccggctcgcgccagaccttcttctccagccaggtggtgcgatatgccgacgtctatgcggccaccctgctcaacctcatttactacccattctcgtatatgttccgagctccggccatgcttctgccccatgagtcgacggtggcccatgatcaggcccatcagccgcctccgccactgggccctgttcctgttccggctacgggagccgcatcggtggctgcctcgccggatgagccggctcgcattttggcgggcaccgccgagcacgttaaggaccccaaggacttgcatcgcgcaagctccattgtgcacactcgtccgtcgacgcccaccgtggtgacccacacccatgacgaggactattccgaggaggaggagacacccagtggtgccgagtcttccacagaggctgtgcgcgatgcctccgaagactagatgatgccacagccgcccttctggaatggaatgtttggatcaacgaattttattctcaaacttccccaatgcccccattagccttgcaaacccttacccgaaatccacaccgtggtcgaagcaattatgaaacgtacgattttccctggcgattttacccaagcacagatatgtgaaactatataccataaccgatatatatatatatacattatacattataaattagctggttccatacatataatgtgtcttttttttttaaaaatgaaaaccataaattgctgtaattgaatgag

SEQ ID NO: 13104 - protein, 569 aa, DROSOPHILA
MQHNNVNILLFLFINRVFVNRSLHLENIKYYGFDMDYTLAEYKSPQYEQLGFNLVKERLVFMGYPKEILQFEYDPTFPVRGLWFDTLYGNLLKVDAYGNILVCVHGFEFIKHHQVYELYPNKFLKLDESRVYVLNTLFNLPETYLLACLVDFLTNSSDFVRVERGIKAGDLLFTYKSIFQDVRRAVDWVHSDGDLKRRTTQNMAHYVKKDERLPTVLSRIRESGAKLFMLTNSDYTYTNEIMTYLFDFPHGATPDEPHRDWKTYFDVIVVDARKPLFFDEGTVLRQVDTKTGSLKIGTHVGPLQPGQVYSGGSCELFTKFINAKGKDVLYVGDHIFGDILKSKKIRGWRTFLIVPELVRELHVWTDECQLFAELQNLDIKLGDLYRDLDSSAKVKPDISQLRTCIRDVTHKMDMSYGMMGSLFRSGSRQTFFSSQVVRYADVYAATLLNLIYYPFSYMFRAPAMLLPHESTVAHDQAHQPPPPLGPVPVPATGAASVAASPDEPARILAGTAEHVKDPKDLHRASSIVHTRPSTPTVVTHTHDEDYSEEEETPSGAESSTEAVRDASED

SEQ ID NO: 13105 - DNA, 10241 bp, DROSOPHILA
ggacttcaaaaggaaaatgtatgtccttaaggagaactacaattatcgattggagctgctaaagcagctgaaaaatgacatgaaaaacaactacaaaagcgaggcccagcaactgtatatccactatcactccattaagaaccagacgttaaatagcccccctttaaaagagatgctagacgcaaaagaggaataagtggatccaccaccaaagataggataatatcacaccatcagtttctagatcgttgctccatctagcacagactcacacaaaagtaatgatcaaaattaactaaacacactacatttatctacaatgaaaggattgttattcctgctactgctgctacttactgctcactacactacacactcagtacaagcacaatttttacaacatacaccctacttcattttctaaaaaatatccacaaaagtgttgccgggctttccaaatctagaagaatataatataacctagaacccgagccccgaaatcatagctacgaagtgggacgacctgccgaaagggggattcaatgggactgtacctcttgcattcattgtgtgcacttgcttctttgcatcttgaagaagtgcatctgtatctcatttactgagcttccatggtacagtcaccactctgaacgccccgcggtatgcaacagtatttctgtgctttgtatatgccacaaaccttaaattttcgccacttctgttttgcatgtcgaaataaaagcaaagacaatgagaattgacccaaatacctggctctattgtaattttgctcctttggtattgtaatttatggactgcgaaagtgatggtggtggggcttttttggggtcgcagcagccaagagaaaagtggagcagcgaagtgaacaaaaggtgtccgttggtattcacttcatattgttccactggctttaaaatttaattcagcaggaaagttgtacagtaatactgaaacttgagggatacttgaactgggagtttcacatgatttttccgcttaaggaaaactttaaactttccaaataccaaagaattgatcgccatggtggtgagtgggaatcgctccacgggcggctaatccgttcaaagctgccaaaaatctgcgtcgtttttcttcgatgtgacgcacaaaacgtagatggtccggatgaggaggaagaggagaagctgggctcaaagtggcggacggacggacactcgtggcaggcgcttagcaacagacagacaaagcttcaggcttaagcccacgggccacgccccctcctaccaaaccgcccctgcggcggcttacaacaaagcaaaatggtaaataaaggccaaaagcgatgacagcgggcgttgaaatggaaatcaaaatctgactcccatcccaaaatcaagacaaatcaatgcgaggcaatagctttggactcccctctaaaaaattgatgaaaattcgaaattgaaaatttactttggcaatttggattgcagcaccgttccgacaatgaaatatgtcaatttcaattatgccctttgccgcgggctaaaaaaagtactcgaatccgattttatttcagcgtttcaacaaatgtgtcaattttcctgtaaagctctatcgattgcagaattggcaacgccttcaattgtggcatccgcatccacatccacattctctgggcggattgattgtctacagggtaattatagttgttagggctcaaatgttggcccacaatttgctgacagttgtcagccgcccgaggcgcggatttcgtaggaataaagcactcagtttaccaataaatcgaatgtaagttgggacccattctagataagctctttcacttaagtgtgttagaatttcagtagaataagccaaggttcaaggctcaaaatacatatcaatcgaagtctagctatcaagatgaataagcactgtaagaggagatactaaacaaaataaaattcatctttaaatacatttgcatagttttctaggctttaaactattataaattaaatattcttagtaactagtttgatgtaaacacgttgtgctggcaagcggaaacataagtggcatgtgcgaaactttacacaaatcacgttgaaaactttgcgcgagactcatcaatttcgcaggtctgccgtgagatatttcctgtaatataaactcctggagaggagggccgcatcaatggaaactatcaaagggtcataaaactttcgcccaacactttgcagacaggaaatatgacagggcccgcacaataaaacgagctgccggtcatttgccaatgtctagctgactgaatgactagctgactgaataactgacggactgactgactgactgactggctggccatcgctgtgtccaccagattgatttgcaagtggttggagggcagagccgggattgaaattgaacttgaaaagtgcacagcagacagacgacatcgcaatgacaatgacaaggctctcacgattacacaaaagccagccaagccagcggcagcagcagaagaaaataaaatgccacgactccgggactccgacgactccctgttgtcgatatgatctcgtcattatgtcgccaaaggcagacaccatagtccccgggttccaaggcggatctcggggggcaaagacgtctgcacgttgcgtcgtgtgggcgacacatttatgtgaaattgatgatgattgaaagctgcatcggttggaaaggcaaggaattattggacatgacagcgtgatgctcacgacatttgcggataatagatacatttatatctaagctatatatttcgacacatttttgtgagaaaatgatcttatattattttagattattccatttcatatgcaaagttcctgacattttctcatcaccaaagtacatttacaagaagtacatatagcattgtatatgtagaatactagctcatctctagttgtaatcttgtgccatccgctcgctgatgtcggcatacgaattaaacaattaaaaggcaaacaggctgtgttgtatccccacatcagaggccccccacaccagcccatccccaacccatctcatacttccatttagggctggccacagatttttatggcgccacgatgttctttaagatatatgtgtcaaaactacttgtgtgccatcgtaaatttaattcataggcgtctgcgtcaccagctgatgattgtcatcatcatcatcataatcatcatcatgacgatgatcatcccaatcgcaatcacaatcccaatcgtgtgggacttgaaggcgagtgctcattgcatttttatcacttacgcgaaattggtttttatgtgtcgggagtctcatgtgcgcctattaaatggaaacgctgcctccaattcctttggcgaccgcactcaacatcaattccacatatcacaactaccataagtaagtaggcctgtgcgtatgtatgccacgaatatgaagggagtacacagtacgtatacgcagcgttaaccgggaaggcagttaaataaaatgctccgctggccgtttaagcgatggcaatcagccgaatagtcaagtgatatatggcagagcactttcagccacctaagaactaggaagaccaacgaaggagactactcttcttagggtctcttgtcattgttttattgatttataggtaagtgactggttgggttgtgccacttaagacatttcaacttacgcacttaatttgggtattgaatggatgaaatcgttggaaaattacctgcaatgaaaggagaattgtattattagacagagaatttaagtgggatattcaacgtttgtgcagaacaaacttcatagtacacgtgttatatatatcatactctattgactccatatgcctatctatgacctgaagcacacagggcaaacaaacttcgaccaccagaattcccctccctcatccagggaatgaaaaatctgtcaagctcaacaaactgacaacttaatgccacaagccgaccaaccaatcccaaccagccgcaggagcagccactggttacaggatgagaaggacgacgactacacaggctcaatgacttggccagactggtctctgtggtaaaatttaatttaacatacaattcagaatgcccggcgacaaaatctctggccagcaactagggccacacaatggccaaaattgttgccaggacacaaagttttctggccacgaggaggtggtggtgatgatggtggagtcgaagagttggagagtcgaggcccaaggctcgaacccttaattatattgagtgtatgaaatcctttggccacacaatggccggcaggaagtgaaagtggccatgtccttgtccctgctcgccgtcgtgtttaatccaagcaatttgcaatttttggtaatttaactgacaaaactttttaatggggatgaagtcaccccactcacagactgacaatggaaacgaatggcatttgtggctcccgttcgattcgattcgcaactgttgccaggattcaggcgagctccctaatcccggcaaggaaggactcttcgaacccttcaaccggctcgaataaaaccataattttcgattgttatgtacttaaaggagaatttcgtcatgtgcgctgaatgcaaatatcgttttcaatttcgctttttatgtctgcctttggtctattatattttatgatttatgttttcgcagattgtgggccaaaggggtagatcgtggaaggggctacattaagcggactaaggcgttaatatccttggtgcaggatttgtcgccgcatggactgggcggcaaaagagttgtggcaatttacgagatgatttgattttaatctctaaccgccctctgggaatacaatgcgaattgcgtattttgtttctgctgaatcggtgatggtaacagattaaaaaccaaatatttataagtgaaggggattagaggagatttatgtgaatgagaaaagtttccgacaatgatctgttgccttcgtcgtgggagtatggtgtgaattatgcaaaatgtttaatataagtagcttaaggcatagatttatttagaaacaaagttcctattgcatgacttactcaactgtttatgaatttacctactcccccatgcctcattaatcattcgcagctcagatcgtattctatccatctactcgaatactttctgatagctctaattacaaataacaacagcagatcgcgttgacgacagaagtttcagcgctgagggagtataaagttgagtcgataaaagaggaaaatgaatgtcctaccataagccgtaatttttgcgcaaaagtcgagctactgcgcccccgaaagcagtttgaaatgtcagaaatgacaaatagtccgtcgaggatttaattttgaatgcaccgcttcgcagtcgcagtgcagtggaaattaactaagcgacgtttccccattgggagaagtcagtgggaaaagcacccaccatggcaacacagccaccaccgaaaatctcgcagacggaaagcggcattaaaagcgatccacacacacacacaccttcccagtgaaaatcgcatcccttccccgccgcttttcataattttccaaggggtgcgtttgtccaaaggggatgcaaccatgtttgtccgggaaattagtttggctcaacagcggcatcattggaaaataaaggattttcagtttagaacagtacgagtatttataaattactcgtccgcagcacaattgctcagccatacgttttattgcaaattctggaagaagagaaaaaaaaataaaggatcccaggttgctgggactactacgcacgtgtatgagagaaacccttcgagccatccacttattaaaaatacttgtttgtttgcagtactatatctgcaactgggcattgtctatggattcgcgggttgcgtcaactggctttatttgcgattcgctggggcatgtaattaaattttcggattgcaccttttcagcagggaactttgcacagacaggtcaaaggatgtgggagtatgctttacaggctcaacattttgcatgtttttcaagtccactaaaacattgccaagttcatacttttaaggccagttaatggctttttattaattacttcctaccacttatctttgctgcccaccttttcttgcataaactgggctgtaacattaatcattgcataatttcgtggttcatagctcatcggcactgtaaactaaactcattaattactacaattaggccatacacatttttttccgctagccctcaaattgtttaatctggcaaccgattcagggccgcactgcccgctaaatgatacgcacgcgacccccgaagagaacccaacattgggttcccaacttcccatttcgagtcgttaaaatggtccgctttggataagaagtggaaaaagaaaaactgaaatgaaaaggaaaaatatatgtaaaactgccgtgctagactcggctgctttgattaatggtttcttccagcacgtcataagcgggcaggtcctggcaaatccctaccccgcctcatagccatcaaaggcaaagcaccttttttttgtattttttgtgtgtagggggaaaaaatgaaaagactgggccgtgtcgtccagtcaagtataattaacaactttgttgggccgtttgggctttcctttcgctgttcgttaagaaattgcaaaaacgttgttgctcgttctatgtaaatgatgtgtaaacaccacgtgcaggagtgcctcgaagttcataataatccggagcagtgcaacaatgtggcattttgaaaaatactcgatgcatatttcgtggcgcatgtccattagcattgggtaaagggactaaaacgagagtacaacgacacgtgtcgcagcgatttattagcataatttctcttcctcaggttttttaatgctcgccacggaagcattaaagcgaaatggatgttcatctacccgaaatgatccgaaggagtgagagtgaggcggactcgcttttcaatttccaaggcagccccggggccatcatctttgtcagcataaattcccaggaactactcccttaattgttgtgcatttgtcaacctgagcacacgaaagcactttcaaaaacggcgtcaaactctcgaacgtcttcatctccatctatccagagccatccagaagatccacacttgaatccagttcgagcactttaaattctggcacacaagacaaggcacagacatttgctcgattcgagtgctatttatgtcttacttagtagcacatttgctgtgactagttcgtaaattaattggatttgcaattacacgccccacaagagccagactaacaaacagcagaaaagtggtgggacaaagcgaggcagtacagccagtattgaatgagaagagctgactaaacggatagaaggcaaaatatatgtacagtctgtaaattcaatggaaaagaccctgaaaagagcaaaataattgaacgagtgttgaataagataacagagcgaagtaaactcgttgagaagcgcatagaaaggcgcgaacttaaccttaaggttatattacgcttttcgatacagtttggtactaatcgatacaagtgtatgaacgttctggaaacaataacgtgctaccaaacaaaatcagaaccagaaatcttgaagtactctcactccctcataacattcatatccctttctcagatcgaccattacactaattgctggcatacaacatttttattgcaattgccgactcctattctggaatttcatgccgtacataccgccgcttaatatgcatagcaataaatggtcatataagagcataggttccccaactctggacctcaatttcgccaagggagcagtcagagaaatactcacaaataaacacaaaaatcaaaggcacgaaaagcgaaagcaaattgcttgaaggcctcacctgtacaaaccagtccctggcgaacatttcaatacaaatgaaatcggcaatggaaacggacagagagcaaatttcataacgaaatgaaattagaatttttcggcagtcgaggaaattgctgcacgcacgcaaacaccagaaaatattgaaattacatccaggaacgcagaattcaaaaatatatatatcgcccagcacttctatgcaaaataaccgcaggccatttgtttgtagacaaacatttggcattctgtatgccggtatctgagcatccgagagtggtttgcgtgcccagtcaaacggaaatgggcaaatgcctacgcaaatgtgcgcatttcaattaaatttccgttttaatcacttttacaagttccattgctaccattcagagtggccagcatgggttaagcagggggtcaaagccccatgttgttggtatgctcactcattaaaactgtgtctggggtcaggtcatgcgaactaatttgatgacgtggatccgtgatctgccatccacttccgagctaaacttgttgagaatcacgtagagaggcgcttcactgatgaaggatttgccgaagtggttccactaacaagaatgcttgtatacctttttcaaatatttcaaatattataaatgttattcaccatttattaaatatgtatgaaacttcaatccgcttactataattttgaaaaatactatgtggcctaatttgtaatactgtatctgcgcccgtccgctataagtgtagtttcactgtccgtgctctcctgattgtactctttgttgttccataccaagtgaacaggtatgctgagcgagattcccgacgatgcgaagctacggctggtgattgtggtgtccgaactgcttcgctcattgcccagttcctcgtagggcaccagtgccctatctgaaggatctgaaggatcctccttatcccaatcacccaggccgcactccgaaatgatgggcgacgaacgggctccgctttccgccgagttccacgccttatcgctggtcctctcgtaattgttgtccacaataggcagcaaggatggcaatgcctccagttgacctccagctttcgatctcggcatggaacgcagactctcctctacgggcagcgaactgcgccgcaggagcttctgcagcgtcttgaaggattcacgcatctctagaagttgcccctcatcgtagggttcggtgagtggagtgtttggcaccgacagggcgttgataagaaactccaagtcatcctccatggcttttattgatttcgatgattgtttggtatgttccaagaaaattaactttattaaaatttagaaattttattcaaatttgatttctatgccgacgatgagaaaagcaaagctatctaaccccaatgcctcgatagaatctttaactttcattattagaaagttgtatattctcttcatttgtataaattactttcttattactttattgcatatttggtctatcgcatcatcttgtaatttgtgcctcaccattggttgtccttttcgaactgcaaacttttttcattaattccgtctgagggctttaagaatggcatcttaagttcctgtaccgccctaatctacatcctcccaccgctccatcgttcaatccgactccatccctaccgaattttgctacaaagtcattacgaacaacttaagtttgtgttaaacacgcctacattaccagattttgcatttggagcggcaaaaagcaaagttgagggaaagcagccgaggcagaagcgaactgcaagaagtggaaaacttgagtttgggtctccgtgtaataattgtaatttcgcagttgccggaggaggaaagcgaggcaaaccgaggaaaacacgaaaaataacaatcagaaagcatttagcagcaacttctgaaagcgagagtcccaggggagccgagttaaccaaagtgtgttcgcttgtcgacgccaggtggcttcctctatggtcgagttgcaagttcgtgtgttgccgatcaaagtaatacatatatgtggtatggtggctcccctttttcgtgtgtcaacgcataggaaaacttgaacggccggagggagagaaaaccagaaacaaaccatgaattcctttaacgattaaacaaggagcaggataccatataggatacagtgttccttcctccttctccctgcaaagaaacacacataaatctcgttttggggtgtatcccagagtgtgtgtttctgtttcgcctggcgtggcaattt

SEQ ID NO: 13106 - DNA, 1533 bp, DROSOPHILA
atggaggatgacttggagtttcttatcaacgccctgtcggtgccaaacactccactcaccgaaccctacgatgaggggcaacttctagagatgcgtgaatccttcaagacgctgcagaagctcctgcggcgcagttcgctgcccgtagaggagagtctgcgttccatgccgagatcgaaagctggaggtcaactggaggcattgccatccttgctgcctattgtggacaacaattacgagaggaccagcgataaggcgtggaactcggcggaaagcggagcccgttcgtcgcccatcatttcggagtgcggcctgggtgattgggataaggaggatccttcagatccttcagatagggcactggtgccctacgaggaactgggcaatgagcgaagcagttcggacaccacaatcaccagccgtagcttcgcatcgtcgggaatctcgctcagcatacctgttcacttggtatggaacaacaaagagtacaatcaggagagcacggacagcatttgcccatttccgtttgactgggcacgcaaaccactctcggatgctcagataccggcatacagaatgccaaatgtttgtctacaaacaaatggcctgcggttattttgcatagaagtgctgggcgatatatatatttttgaattctgcgttcctggatgtaatttcaatattttctggtgtttgcgtgcgtgcagcaatttcctcgactgccgaaaaattctaatttcatttcgttatgaaatttgctctctgtccgtttccattgccgatttcatttgtattgaaatgttcgccagggactggtttgtacagttttacatatatttttccttttcatttcagtttttctttttccacttcttatccaaagcggaccattttaacgactcgaaatgggaagttgggaacccaatgttgggttctcttcgggggtcgcaatttgcaataaaacgtatggctgagcaattgtgctgcggacgagtaatttataaatactcgtactgttctaaactgaaaatcctttattttccaatgatgccgctgttgagccaaactaatttcccggacaaacatggttgcatcccctttggacaaacgcaccccttggaaaattatgaaaagcggcggggaagggatgcgattttcactgggaagttaatttccactgcactgcgactgcgaagcggtgcattcaaaattaaatcctcgacggactatttgtcatttctgacatttcaaactgctttcgggggcgcagtagctcgacttttgcgcaaaaattacggcttatgcgcctgccacgagtgtccgtccgtccgccactttgagcccagcttctcctcttcctcctcatccggaccatctacgttttgtgcgtcacatcgaagaaaaacgacgcagatttttggcagctttgaacggattagccgcccgtggagcgattcccactcaccaccatggcgatcaattctttggtatttggaaagtttaaagttttccttaagcggaaaaatcatgtga

SEQ ID NO: 13107 - protein, 510 aa, DROSOPHILA
MEDDLEFLINALSVPNTPLTEPYDEGQLLEMRESFKTLQKLLRRSSLPVEESLRSMPRSKAGGQLEALPSLLPIVDNNYERTSDKAWNSAESGARSSPIISECGLGDWDKEDPSDPSDRALVPYEELGNERSSSDTTITSRSFASSGISLSIPVHLVWNNKEYNQESTDSICPFPFDWARKPLSDAQIPAYRMPNVCLQTNGLRLFCIEVLGDIYIFEFCVPGCNFNIFWCLRACSNFLDCRKILISFRYEICSLSVSIADFICIEMFARDWFVQFYIYFSFSFQFFFFHFLSKADHFNDSKWEVGNPMLGSLRGSQFAIKRMAEQLCCGRVIYKYSYCSKLKILYFPMMPLLSQTNFPDKHGCIPFGQTHPLENYEKRRGRDAIFTGKLISTALRLRSGAFKIKSSTDYLSFLTFQTAFGGAVARLLRKNYGLCACHECPSVRHFEPSFSSSSSSGPSTFCASHRRKTTQIFGSFERISRPWSDSHSPPWRSILWYLESLKFSLSGKIM

SEQ ID NO: 13108 - DNA, 2297 bp, DROSOPHILA
accatcgtgattgtgacccacaggaaaaactagttttgttcttttctggacgatatatactgaaataaatgataaaaaagaactcaaacattttttttttttttttttgaagcagtaataacaattttattaaggaagaatttttgtgatctttaaaagtgattggtgtctaaatcatccattgtggttctccgcagacgcatttccggatcttctgctggagattgcgaatatcgctaatgagctgctgacaaagttggggcttttcgggacagcccgtgcaggcctttccaccaggaccacacggttggcactcacaggcaccacccagggctagatcggagaatccaatgagcaggatgcaagctggggatattgaggatgcgagatattgaagttggttgtggattaaagatcttattatgtagttaccgatgatggtgactgcgatcagtttcatggttctatctagattgagactactttaccagatggtaccaactcaaggaaagcaacacctttatatagcgcaaaaagttagctggatcaatggaaaatttcagtgagcacatccaaaaataaaaagtactggacaaaccaattgtattaaaataaataaaacaccaaacacttggctttttatacggcaggcgctttatttatagaattaactttttatagatacttattaatttaatatatttgttactcagatataatttagatttcattttatgagtaatactttctttagtaaaaagggcatgtaaaatgttatattatattagtatgaacgatgacacagaaaatggtgagaacaaagggcgaagtttaatatcgtgtttctatttgcttaagcacaaatggttatatattttatttttggatgaattcaatgaaatttccattgatcctataacacatttgttttgctataaaaggggtagggtgttcataaacggttaccatctggtaaagttaatttgttaaagcaacaaccatgaagctgctcgttgtcgccgtcattggtaagtgccaaaaagtactattttttatgtgacccaaatccacttagccatccgttcattctgacccagcgtgcatcatgctcatcggattcgccgatcctgcctcgggctgcaaggattgttcatgcgtgatttgtggacctggtggcgagccgtgtcctgggtgttccgcacgggttcccgtctgcaaagatctgatcaacattatggagggtcttgagcggcaggtgcgtcagtgcgcctgcggagagcaggtttggctgttctagagatgtgccctcaacctaatcggcactgaccttttatctgctggcatttaaaactgctgtctaataaaactattatcattcctgcacgacccaaactccttttctttgttttttaattatttattttcagatgtattgcttaaaaagtgtcagaactagtcttttctgtgtgtcacaatcacgatggtcttgtggcacctctttggattcttgcacttccgcttgggaatgcgggtgtggcaccaattgttgcccctccaacaaagctttttgtgagtggaagcggccgttgttgttgttgtggttgatgctgcagtagtggttgttgttgtggtggtggcatccgtggttgttgtggtactagcagatgacgcaacctgaatggccagggcaataagggcaaccacgaaaagatacttcattttgaaataagattagatttttcgatacgactggaattgaacgatcaggtgttgtgattaattaaaatcatacccactgcttttatagcaaaacaagcagatttccgcattcgctttactatgtttttgcttcccataacgcataagcacataaaaagcgagtacaatagcaaaagcatttaataatcaaatgtttgaacagtaagcaaagacggttttgttgacatatttgtaatatcaacaattaaatgggttactattcctaaaaaaattccctaaaaagtatgcaataatgtttacccacgacgattgtatttcaatgtcaaaacactgcaacagaaataaaaaatatttcaaaatattctagaagcttttggaagaatattacccagaagaaaaaaacacattaaatttgttcacattttgttcacacatgaacacgaatatatttaaagacttacaattttgggctccgttcatatcttatgtaaatgaatcgagagcgataaattatatttaggattttgttatctaaggcgacatgggtgcattgctcaaaaacatgtaatttaagtgca

SEQ ID NO: 13109 - DNA, 228 bp, DROSOPHILA
atgaagctgctcgttgtcgccgtcattgcgtgcatcatgctcatcggattcgccgatcctgcctcgggctgcaaggattgttcatgcgtgatttgtggacctggtggcgagccgtgtcctgggtgttccgcacgggttcccgtctgcaaagatctgatcaacattatggagggtcttgagcggcaggtgcgtcagtgcgcctgcggagagcaggtttggctgttctag

SEQ ID NO: 13110 - protein, 75 aa, DROSOPHILA
MKLLVVAVIACIMLIGFADPASGCKDCSCVICGPGGEPCPGCSARVPVCKDLINIMEGLERQVRQCACGEQVWLF

SEQ ID NO: 13111 - DNA, 3211 bp, DROSOPHILA
ctaaatctataacttatttatgttctcgttatcgcaatgctaatcgcaatgctaatcgtaattaattatttattgagcttcccagcgatggttggcaataaagcgcgccattgatattgcatccgaatgtctcagcacagcatgcttcaaaagatccccagcaccaccaatcagtcacccactctctctctctctctctcttttcccgcacacccactttcctgcgctgctgcaccaccacacacattgaatcgggaacccttttctcacctctcaccgatctctttgcagtctaccatcagtagaggacgataaggaagctgtggaccacgcccagttcgttaacagcaccgtccatctccacgtatcctagagttagtcaaaccgttcctgcctattccgaatctatctgctgtcactccccccattctatatacatttccgaattcgaagaacctctttaagggccacccagaaacttcagttggcattaattgaacttccccatcttacgtttaagtatttaaattaaataaatcgttgattaaacacgaagacttttatttggttggtacatttaaatttggccgaaaagtatgctacgcactagtcgcgaaataccatgtaaagtttttgtaaaagagtcttaatttcatgtagagtgctgtatatagcaaatgtatttctagatgtaacaatcgcaataagaaaaatattttatatgtgtaattatggacaagttcttttaccccgcaaagatgttgtgttgatcttagcctgaaagaaggctatgatttataccattaacttttcgtttaactattgaactaacgcagtaaaatctcttcgaacttattgtagttaaatttattacagggaatttttaatatcgcttagaaaatctgaggacagggtacacctgtgcgattaggacctagaagcaaggaatctctgggttattcaggatgatgggcactgcaaccgcctgccaaactccagctcagtagtagccgaaggtgatgtcgtgcagcggctgggcatttccctggggcagggcgtagtcccgagctaactgatcgagcaatccggagccaccgcctccaccactacgagcctgtggccgcggttgtggctggaagctcggctgctgctggacaggacgagcgctgggtccctgggattggccaaagcccacgggttccagcagcggacgtccaccggaggcgggagccaggaatccctgagcccgggcactgctcggagctggtgaggcggggggcagggcgtaaacgggtcgggaaatccgcacattcgagggaccatcgccgaagctctgcgtttgcgagtaatccggttccgggcgagcgggacgctgcagtggtgagtagagtacgtcggtggttcgctgagcaccaggaacctggagtcttggcggtgccggacccaccgatggttggtggtgctgttgtggcagatgttgtggctgcggcagtggttgaggctgcggctgaggagctggggcatactgaactcgacgtggtgactcctcttccacctcgtattgcacatactgtggctggggttgaggttgtgggcgaggctgagggcgtggctggggacgttgaacacgctgaaaaaaaattatcagttttatcaaactaattattcggttaagtgtgtcgtgactacttacatagggtttctgcgggcgctgtggtgccggctcatctgcgtaatccggttcctccttgagagtttcatccaccagtgtgggtggtgccacggtgataccttctccagatggctggaagccatacttgttggctccgtactcaactactcgaacttttccggtctcatccacatatccgtacttgcccttcacttcgccagtggccagcttggtctcgattttgaaggatccatcagctccctcatagccataagtgtaagagccatcttcgttgtgcctggtgtggaatattatgtgtggttagtgatattaaatgtttaaattgttacccacttgttgatctgcttgaggattgccactggatcagcccgcggcgcttcagctcgagcaggagcggcattagctcgcagtcggagaggagcagtccttggtgtgttctcctggtagtcttggtagtcctgtgatctcaccatacccacgcctactatgaggcaaccgacaaagagcacgcgttgcatctgtaggataagccaattctttttaagtcaattaaatcagtggggataggatataaatgggcataagtctgtctagtcaaatgacaaccggttagttaattgcaccctgtctgccagaagagttgggtttccacctcgcccctggccatcgaaacaccttgacagtgcatcagagtctgagtgctggccagaatgccagacggcgacgatgtctacaaaagtcttaagtcaggctgcctttcacttttccgccggccaatgacaccctcaatgccaagcaggaaccaataccccggattcagttacaaacacttaaagaaataccttcaatttccagtcagaacagaagtaaaagaaaaatcaatacaatattaaaggtataattggtattttgtgaattagtttcttttttaaattttaaatttacaaaaaccttttccttttatttcagtgtagttgcataaaggccgagcccaattgaaagcccaatcccaatgacacgcgatatggccgctcagcaggatgggctggacgggattaattgaatgcccagcagtggcgtggagaaatgctaccgggaagaaagatgccaaagaagctggggaatgccaattaacgttgcccagccatgtgactcccacacagcgaacatatcgcagctgcaattgggtaatccggcagcaaattcagggggggaagaaaacccgaaagaggcaggcacgcaaattatgcatgggaaaatgggaaaagttcccacacttgccgaaatgtgttgcaagtatgcggctgcggcaagcaaatgccaaagaaatttgcgcgaaattactgaataactgaaagacaagtctgtgactatacatgttttgtatgcctgcaattcgtaggatcttttcgcataaatcacaataattgcaatcaaatatttaaatcaatccatttcaaatcatttctcagtcttttgtgaagaatcttcttcttccccaaactccctgaaatggtg

SEQ ID NO: 13112 - DNA, 1092 bp, DROSOPHILA
atgcaacgcgtgctctttgtcggttgcctcatagtaggcgtgggtatggtgagatcacaggactaccaagactaccaggagaacacaccaaggactgctcctctccgactgcgagctaatgccgctcctgctcgagctgaagcgccgcgggctgatccagtggcaatcctcaagcagatcaacaagcacaacgaagatggctcttacacttatggctatgagggagctgatggatccttcaaaatcgagaccaagctggccactggcgaagtgaagggcaagtacggatatgtggatgagaccggaaaagttcgagtagttgagtacggagccaacaagtatggcttccagccatctggagaaggtatcaccgtggcaccacccacactggtggatgaaactctcaaggaggaaccggattacgcagatgagccggcaccacagcgcccgcagaaaccctatcgtgttcaacgtccccagccacgccctcagcctcgcccacaacctcaaccccagccacagtatgtgcaatacgaggtggaagaggagtcaccacgtcgagttcagtatgccccagctcctcagccgcagcctcaaccactgccgcagccacaacatctgccacaacagcaccaccaaccatcggtgggtccggcaccgccaagactccaggttcctggtgctcagcgaaccaccgacgtactctactcaccactgcagcgtcccgctcgcccggaaccggattactcgcaaacgcagagcttcggcgatggtccctcgaatgtgcggatttcccgacccgtttacgccctgccccccgcctcaccagctccgagcagtgcccgggctcagggattcctggctcccgcctccggtggacgtccgctgctggaacccgtgggctttggccaatcccagggacccagcgctcgtcctgtccagcagcagccgagcttccagccacaaccgcggccacaggctcgtagtggtggaggcggtggctccggattgctcgatcagttagctcgggactacgccctgccccagggaaatgcccagccgctgcacgacatcaccttcggctactactga

SEQ ID NO: 13113 - protein, 363 aa, DROSOPHILA
MQRVLFVGCLIVGVGMVRSQDYQDYQENTPRTAPLRLRANAAPARAEAPRADPVAILKQINKHNEDGSYTYGYEGADGSFKIETKLATGEVKGKYGYVDETGKVRVVEYGANKYGFQPSGEGITVAPPTLVDETLKEEPDYADEPAPQRPQKPYRVQRPQPRPQPRPQPQPQPQYVQYEVEEESPRRVQYAPAPQPQPQPLPQPQHLPQQHHQPSVGPAPPRLQVPGAQRTTDVLYSPLQRPARPEPDYSQTQSFGDGPSNVRISRPVYALPPASPAPSSARAQGFLAPASGGRPLLEPVGFGQSQGPSARPVQQQPSFQPQPRPQARSGGGGGSGLLDQLARDYALPQGNAQPLHDITFGYY

SEQ ID NO: 13114 - DNA, 3359 bp, DROSOPHILA
cccggaatgccaatggaatgacatcatctcaacggttggcccgaaacgataagaaaccagatatgagccgatttaaagaaaccggctgtcatggcgtcgcagcgtatcgtttgataacacatatagtaaataatcactgcaggtgattcttaatacttactgtccttctttgaagtactccttcagcgttgtgctgaacttcttggaatatttgacgaactccttcttacgctgctccacagcctgcttgcccgttacgccaggtataaacgagccgatctcgttgaccacatcgagtagtttctttatggcgctggcgatttccctgtaaaacgcagtaaaatttcattattcattaatcagttaagcttatgcagtgagttttagcttcattttgagtttttacttacttgatggtctccaggaaggtcttcctgtcgtttatctcatcgggtatgcggctgaggatcaccttgagagccacggacttacgattgagctcctggaagggctcctccgtgcgcgtcaagcggtattcattgactgtggaagggggaaacttcgttagctacgaaactcagctgctggcgtggctacttacggtccgcttccgtaattttgccctgcaatcggagcacggcctcgtttaggttaacattcagatcggcccgccgcacaattgtggctacgaggtcatagcagaagcccggattgttctgctccgacttgagaatggcggagcgcagagattgggcagcgccaacgtcgcgtcgctcgagctgcaggtaaacgtacacaaagttaagcaattacaaacccaagtaccccatgtaaaggtttacgcaacaggccacgatctgacggggctgaagggttcagaggtacggtttggggctgacgggttcggagcagagcacagcagagcggagccgagcacctgggatcgtttcacctacctgggagaaaatgggccgcagtatgacgggcagaacgagagacgacgtgggctcgcccattgtcattgctactagtgtgcttggtcttctctactggtgcctaggtatcctggcgcatgctgcaggaacccagttgcgattcccgttccgtgcgatgtccgtcgcttcgctcgcacgacgctcgcaaatcaaattaaaaaattaacaaaaattgttcacaacagcacaggcacagtgttgtttttcaatactggaaactaactggtttttatcgatgaacgtgtcgtgcttggttagatatcgattgcttctgtagaagctgatggtagaatcagctgatttacataaacctatcggaactctgcaataaattggtttatttttgtttacctgtccttttatcaatgataagagaaatgtccaaccacgatatcaagctggaggtctgcgtggactccatacgatcggcttttgccgccgaggaaggcggagcttcacgcattgaactgtgttcggcattgggcgaaggtggcttgacacccagcatcggtaccctaaaaactattaaggaaacgctcacaatgcccatttactgcatgctgaggccacggcggggcaccgactttgtctacagcgacgaggagatgtgcgccctgctcacggacatggacttgctgcgggaaaacggtgccgatggcttcgttttcggatccctgaatccggatcgcagcatcaacgtggatcagtgtcggcacgttttgctggcgtccggtggtctgccagtgacctttcaccgcgccttcgacctcaccgaccagaagtccatggacgagaatgtcgacatgttgcgggaactaggtttccgacgtctgctgagcagcggattccgacccacggctgccgatggcgtagattgcctggcacagctgatagccaaacatcaaagagactttatagttatgcccggcgccggcataaaggtgtccaacctggaggagatcctcacggtcagtcgctgcctagagtttcacgcttccgccctggacacggctggcgaggactacgtggcgcccaccaccacgcgaatggagtgtgacgtgaccatgggcaaacaggacgtggacccctactacggaaccaactccatcgtggtgcgaaagatggttaccattgcgaaagcgatgagctcccgctgaaaatcatagtacttaacctatccctaagacttaaattattccttaactgtttgtttacatcatatataactagtatataccttttacttaagtagtcttatccctaaaattctaaattctaaaaaataatccaaatttgatttgatttgattgtgctgaaacaacatgattgtggagatagtagagaatcctgctgctctagaacataattcttttaatgatcacttaaataatgcagaaagggtattgcatagaatagaagcatacaatgtaaagctaaataatcatatgaggagattgaaagaactgctggccaacaatagaagattgatttcggggctatcgtacaatgagcacagcattaaatctttattggaaaacaaagctcaagataaacaaatagagtaagctaaagaaggaaatatgaactcggttataaactaatatatttttaggcgaaattcaagtaaaagaaggtgtcatcttcgtaggacttgcaaggcgaccaacatcagagaggcatgttggacgcaatgcaagtctcacatggagcctgaagaggaagagcaaacccaagacgtggtggagatccaaacgaaaacacaaacatctagaagccgttccggaaaagtatgtgaacggcagaaaggtggtagggagctgagttcatattacgagctaagtgaggagattggtttcaaaggtaggtttttatcaatttctgagatctctttcttgaaatccaagtatatcccaagtgaaatgcatgctaaagcttgtcgaaaagatggatttcaaaacggccacaattgccgaagtgaaaaccattcgcagaagggtgttaagtgcaatatcaagtcgccaaaaaaacctgcagtgagccagaaggagtttggtcgcatctgatatgtatgtcgaaaaatccgtattcctacaaataggcaaattgaatgaaataaattgaaaactcttttcaaaataatgacattagctgtttaatgatatttacatatgaggacaagaacattaatttcaaattaggcttatcgatatgaatcgaatttcatgcgcaggcgcatctaaaattgattcactctagctgtgtgttttggaacagaatggggtccttggagcccgagaaagtgtgatacagctggctcctccggacagccctcagtttacaatcactgtcaatgtcaacatctcg

SEQ ID NO: 13115 - DNA, 1359 bp, DROSOPHILA
acgtgggctcgcccattgtcattgctactagtgtgcttggtcttctctactggtgcctaggtatcctggcgcatgctgcaggaacccagttgcgattcccgttccgtgcgatgtccgtcgcttcgctcgcacgacgctcgcaaatcaaattaaaaaattaacaaaaattgttcacaacagcacaggcacagtgttgtttttcaatactggaaactaactggtttttatcgatgaacgtgtcgtgcttggttagatatcgattgcttctgtagaagctgatggtagaatcagctgatttacataaacctatcggaactctgcaataaattggtttatttttgtttacctgtccttttatcaatgataagagaaatgtccaaccacgatatcaagctggaggtctgcgtggactccatacgatcggcttttgccgccgaggaaggcggagcttcacgcattgaactgtgttcggcattgggcgaaggtggcttgacacccagcatcggtaccctaaaaactattaaggaaacgctcacaatgcccatttactgcatgctgaggccacggcggggcaccgactttgtctacagcgacgaggagatgtgcgccctgctcacggacatggacttgctgcgggaaaacggtgccgatggcttcgttttcggatccctgaatccggatcgcagcatcaacgtggatcagtgtcggcacgttttgctggcgtccggtggtctgccagtgacctttcaccgcgccttcgacctcaccgaccagaagtccatggacgagaatgtcgacatgttgcgggaactaggtttccgacgtctgctgagcagcggattccgacccacggctgccgatggcgtagattgcctggcacagctgatagccaaacatcaaagagactttatagttatgcccggcgccggcataaaggtgtccaacctggaggagatcctcacggtcagtcgctgcctagagtttcacgcttccgccctggacacggctggcgaggactacgtggcgcccaccaccacgcgaatggagtgtgacgtgaccatgggcaaacaggacgtggacccctactacggaaccaactccatcgtggtgcgaaagatggttaccattgcgaaagcgatgagctcccgctgaaaatcatagtacttaacctatccctaagacttaaattattccttaactgtttgtttacatcatatataactagtatataccttttacttaagtagtcttatccctaaaattctaaattctaaaaaataatccaaatttgatttgatttgattgtgctgaaacaacatgattgtggagatagtagagaatcctgctgctctagaacat

SEQ ID NO: 13116 - protein, 263 aa, DROSOPHILA
MIREMSNHDIKLEVCVDSIRSAFAAEEGGASRIELCSALGEGGLTPSIGTLKTIKETLTMPIYCMLRPRRGTDFVYSDEEMCALLTDMDLLRENGADGFVFGSLNPDRSINVDQCRHVLLASGGLPVTFHRAFDLTDQKSMDENVDMLRELGFRRLLSSGFRPTAADGVDCLAQLIAKHQRDFIVMPGAGIKVSNLEEILTVSRCLEFHASALDTAGEDYVAPTTTRMECDVTMGKQDVDPYYGTNSIVVRKMVTIAKAMSSR

SEQ ID NO: 13117 - DNA, 6122 bp, DROSOPHILA
gctccgtttcgcgaaatggtttgtagctaatatacagcaatattatatatggagcattacttaacaaatgatttagaagtaattagcaccgataacgcaggcgtacttaatatacagatgtgtaaacgctgactgtgattatgtattaaacgtgcacctttgtcgtgcaacctgactagtattgctaagtgattaaggtattaatctgaggtatgcggcgttcgaatacaagttccagtgtatttccacagtgaatcagaacagaacacgaagggacgccaagtgaccacaatccgcgcaacggagccagtggcgtaatgagaaaaagtacattacaaagggcaatccaaactctacgattatatatatacatatataaaatcggtgggcggagatatatggatagttgctaattgatatggacgcggctgtgtgtggctgttggggatgtgcatgattgatgaccctggccaatgcccaatcgaccagggcacgacactggatttggccaaacgggaaggatacctaataatagtaattaaattgtggcactttgcccgcccacaacgaatccacaagcattcgcattgttcggcctaactttgacatagtttattgtgtctgggaatcgataaatactattgatttccacatgtgccagcgccagcacctcaagacacatcgcgcatacgccccgctgacagttggaaaaatccagcgccaggaagccgaagtcgatgcatgttatccttttgccggtgaaagccaaccaccacccctttgggggaatgtgtttacactcactagggtgtaattggtttgcgcagcggggcgaaccgaattattgttaataagcaaataaattgtccaccaggtactcgctgatgggttcaaagaactttactttgctggcatgtacttgcatacatttattatacattatctttttttaacatacatttttcaaatcgttatttctatctttcttgtttttttttttgtgttttgtgttttgttttgtttttattctaggactaattacttgcatttctagcttaggcattagacgtggaagtcaaaaatgaatatatgacacgaatatggttaaaatgactcgacttaaagctctaaattaatatgcacattggtctatgtgtggattcagcagattatagaataaatcaatgaccactgatcagtttggcctgccattctgtggtgggtgaaacttcttgctgcaaagagaagagatacaatttatatttttggtctagttaacaaggaaataatgtcaatgaagctgtatacatatttagagttgtagtctcagtctgaaaagtttgactcttcgaatcacaagaaacattattcttgaatttaagtacaatacttgataaagcacagttcgaaaatccgcattcgaacatattttcaagacttctgaattgcagacattatactatctcattccgatggatcgcgtcgttggcaatttcgagaacaagtttaagcatttggtgaaggctgaaagcaagggaatggccctaaagctggtgggattctacgccgtcggctggaccctgcgcaagttggtcaagtgaagcgttcgccttaagtcgcaaggattcattgaaatcctctacttcttggtagtcagtcgtttctgttctgtacctatttttaaaatttaatgtacgaataaatcgtggcctcacctcaatatcacattgtcgcagccatcgactggagaatcccattttccagaatcacccagtcttcaacgcgcacttgcagcaggaagggatcttgaaggaattctgcaccacgtccagttcgccatcacttttgatgctggccagggtctgctgtgtgtagtgctgcttgcagattggattatagctctgcggaaagttggcggcgaagtcacagggttgatccgctcctctggaagggaaggtttggcaattagcaaggctaatggaatatatcatagattcaagctataacttactcgcactcttcgatctggatggcctgtttgtactcatcgttattgacaattaactgccaggtgtcgtccgccctcaagcccttttttgggtacaccagcttcctgatgctcctgcaaaggaatcgctcgtctgagccaccaacgcgagagctcacatccgtgggctgaagatcgttgctaaagaacttggcaaagttgttttttagcttatgtgtgaggcctgaaaggtccggatagtcgtccacattcgtgcagaagtttctaaggtgttggctttcatccttggcgcagggattgtgctctttagtgtcattcctcaaaggacgagctggggattgtggtggccgatacttggctatgggggaatcggggaagacaaaggctaaaattaggcaagcgccaaaggcagttggccagtgagtatgggatcgatttagtagttagttgtaaggcatgtttgggtatcgaatgtaactgagcatatataggctaaaatacttagtacttactatccgatggatgtcgggggggtatcggctgttcggattgcacctccgtgtccgtcctctgcaaagatacgaacgtatcgttaaagaccagattcagctttccattcggggagcgctgcactttgaagtactgatctggttggatcaggctgtgatactgatggtaatggcggttcgtttcgggtatcggagattgattctgattctgtttctgtttctgggtcggatcgtcgtgctgggtgggtatgggcatgaagggtgcactgtccgcggacgtctgtacgggtaaaatttactcgtgttagtctttagccaattggcaaaaaaaggaagcacaaagacaacacacaacccaataagaaaccaaatgagcagtgaaatggggatgcaatataggatgaagagtagttataagaaagcagcgcaccaattcgtccttgaagctatgaattgcgtttcacatcaaagacacattttacagagaaatcatgcatttgcctatgtatacacttacattaaagaggacaactccctcatcattggttattgtaaaaagctctttgatgatacgttcatactccttggcctcgtactgtagcaaaaatggcgaaataaaaagacaagacaatagactttagtctcggttcagaagttttgaccacaccacagacaaattaaggctattaaggtgttaagcataacgatacaactgggtctgtttcgggacactcggggacactgtgctcacacctgtaagtgattagatgctgactttccgggtccgccattgttaatggtagccaaaagggccttatagtctgccactgttttctctgccctcacctcggcctcgtgtcgcttcgttaattcgatattgatataaactatctgaaagatacaggtgagagttttgtttgcagttcatcaacattgccaagacaacggagtatatattcgtgggtcggtgctcgggctcgtttgtttgtcaacccagacttctctctctctctctctctattgtcgggcactacatttgcgtattcaaaaggtttgaacagctgtttttcgggcaagcgcagttttctctcgcaattctatagttccgttgagttaggacccgaacctatatacatataacaacagccagagtccaaaatcagagttgataatcccctcgagagttgcctctagcttagcaacttgaaaacggatgtccctcttccgcaagcaataaagactgaataattggaaaatctaaaggcaagccgatcctgaataaaaatcaacataatccaaccggaaggttatttatataaaagaacaagccaatagttgcttttaatgtattgataatccgaggaccataattatgcaaatagcttggcgattttagaattatcagcacttttagtgctactctttaaaatatttctatgttatatatatatgtatatgcagtgatataaataagccttgataatagcccctaatctcgtcaagactttttattatgcttaaattcttgaatagagtccatggaatcgtcaacagaatttacccaaattaaaattgggtctcgacgagcatgtagaaaacccgctttaaggtgccaacccatctgaacttgattgtctgagaacttttgcgatttctcggaaatgttttttcccaatcaattagcaatcaacctttttttaaacgcgttcatcagtgtttggcgtagacgcaactaaggcaaacattggatcgtttttccatcacagttttaggttttccgtgaacctattggaatttagctagaactgaaaacgatctttagaaccggtccgctgcggaattcgcggaaaaccggaaagacaaaagttctcgggcgcttttcaaacggattttctaacattcgacgccattaatacgaactaattgcttttctcacagagatgatcatacaatttgtccggcagtaaattacttccaaagtcgtgtgcagaatgtctggcattgtttgtgtcaattaatattattgtaatgcctatgatgtgcatttatcatatagagaatgaaaattgcacataacctgccgctggcaatgcgaacaggttttctagtctgtgactaaatttaaacttgaaactgcccttcggctaatggaactgctagaacaactatggaaaatctaaaataaatcttaatagctaaaaagcccatagcccgaaatatattgcaatgaaatgacagttatgttaagcatagattaacacggaacagaaaaaaacagaaatgcagtcgaactttcataactggaacaagcgagcacctgtttcaaataaacaaaaaatcaagttctggagtcttaagatcttaagtgcttgtcttaagaagacaaggagactttaaccttttatcagattagatagatttggaataaattattgtttcgacgcaaagatctttaaattttaaaactttaacttcttttgaaagtttcccttatggaggttcgactgttttgaaatttgtaaaattgtaaatttctcaccgtggcaaagaaggcgaacagcagcagcaggactttgaacagcgatatccacatgggcgtcatcatgctcgatctcgggcttaatcaattggatttataaatatatatagattctgcggacggcgaacgtctgcgtcggggattagtaatagtatatagcaggtgattggcggatcggtggcgtcttataccaattttcttatttctacaactttgttattatagcgccggctgctgttgttttttagtgatctgtgcgtttttttctttttatgggctttgcgtatataaaaaataaacaaactggcacgactaaatgttaatgccgggcctttatactggtagctggtgttactgttgcctcttatttatttataaatattttgtgcggtggctctgtgtgatatgttggctattccgttttgtttgtttcctttgcacgtttgcgagacacacagacagacacttcaattagtcggtttgcttttcactttagtttcgctctcgccgctttagtggaaccgttttcggatcggttcgatttggttgctctgatgaaatgccgcgatattgatatcgtttataaccgatttggcttgcaactgggcaatgggctatccaagtagctgatcgcaggatatgtgagtcttcaacttttcggctctgtgcgccgtctttgagtgacacgaaaagctcgagatgaatgcgcttttatggacctcaagcccgataccatctgccaccgatcttaagtgtttatagcgacgcgcgctgggattttccggtcagatcgagagtttcaccatatctcccgggcatgcagagtgttaagcattaaccaagttcgatttcgactgcgatttcgatttggatttctcgcgatcgagaacacacgacagcgagagcgcacgtctgggaggcaactgaaaatgaaaagtggagcccagaggccgccgactcgactcgtctgctcccccaaacaattgctcagtgcttaagtgcagctttaagctagcttgcgagagtgtgagcgggagcgggcgctgtgcgcgagcgagacgccgcc

SEQ ID NO: 13118 - DNA, 1267 bp, DROSOPHILA
atgatgacgcccatgtggatatcgctgttcaaagtcctgctgctgctgttcgccttctttgccacgtacgaggccaaggagtatgaacgtatcatcaaagagctttttacaataaccaatgatgagggagttgtcctctttaatacgtccgcggacagtgcacccttcatgcccatacccacccagcacgacgatccgacccagaaacagaaacagaatcagaatcaatctccgatacccgaaacgaaccgccattaccatcagtatcacagcctgatccaaccagatcagtacttcaaagtgcagcgctccccgaatggaaagctgaatctggtctttaacgatacgttcgtatctttgcagaggacggacacggaggtgcaatccgaacagccgatacccccccgacatccatcggatacctttgtcttccccgattcccccatagccaagtatcggccaccacaatccccagctcgtcctttgaggaatgacactaaagagcacaatccctgcgccaaggatgaaagccaacaccttagaaacttctgcacgaatgtggacgactatccggacctttcaggcctcacacataagctaaaaaacaactttgccaagttctttagcaacgatcttcagcccacggatgtgagctctcgcgttggtggctcagacgagcgattcctttgcaggagcatcaggaagctggtgtacccaaaaaagggcttgagggcggacgacacctggcagttaattgtcaataacgatgagtacaaacaggccatccagatcgaagagtgcgaaggagcggatcaaccctgtgacttcgccgccaactttccgcagagctataatccaatctgcaagcagcactacacacagcagaccctggccagcatcaaaagtgatggcgaactggacgtggtgcagaattccttcaagatcccttcctgctgcaagtgcgcgttgaagactgggtgattctggaaaatgggattctccagtcgatggctgcgacaatgtgatattgagcaagaagtttcacccaccacagaatggcaggccaaactgatcagtggtcattgatttattctataatctgctgaatccacacatagaccaatgtgcatattaatttagagctttaagtcgagtcattttaaccatattcgtgtcatatattcatttttgacttccacgtctaatgcctaagctagaaatgcaagtaattagtcctagaataaaaacaaaacaaaacacaaaacac

SEQ ID NO: 13119 - protein, 326 aa, DROSOPHILA
MMTPMWISLFKVLLLLFAFFATYEAKEYERIIKELFTITNDEGVVLFNTSADSAPFMPIPTQHDDPTQKQKQNQNQSPIPETNRHYHQYHSLIQPDQYFKVQRSPNGKLNLVFNDTFVSLQRTDTEVQSEQPIPPRHPSDTFVFPDSPIAKYRPPQSPARPLRNDTKEHNPCAKDESQHLRNFCTNVDDYPDLSGLTHKLKNNFAKFFSNDLQPTDVSSRVGGSDERFLCRSIRKLVYPKKGLRADDTWQLIVNNDEYKQAIQIEECEGADQPCDFAANFPQSYNPICKQHYTQQTLASIKSDGELDVVQNSFKIPSCCKCALKTG

SEQ ID NO: 13120 - DNA, 8467 bp, DROSOPHILA
cacacatacataataccgagatggaaacaaccgtaaatctaaaactaaaacctaaacttaaatcggcatagtttcgcatgaaaaggtaatatatacatacatacataaatataacaaatatattcatacgcgcactaaaaggaagcgttgcatagtttaattacatttaccgtacgaacactttttatagatgtttaatgttgttatggttaagataaatccggacgaattgatggattttggccaagcacggtgcactgcatatatgtagcaagtgagccaagtacaatttacacaaatgtatacataattagatgcatatatggttcgatgtaaactaataataaatcgatgtaaaagcgtaaaaacggaagttaagaaaccacacacacacacaaacacacacacccacaaaaaccagaaaaagctgaggcgacaaaaatatgagaactctgttaaatgtttgttatgcatttgtttttttttttatctaaattaatattaaactaatgtattagtgaataaacttgtgtacctacatacaaaacaatgataaagcagttatggcggtggttttatttgtttttcttccaaaataataattgcaagagctgtacgaaagtaataaattacttcgatgccagaacgttaaataatttctttaaatgttttatatttcattttgtggcattcaatgcttatttttttttttttgaacgtttggcgctgcatttaccacaatcagtgatttaagcaaatagtggggaaaacccttttgtgaaagtgaaaaaaagttagctttttcttaaagttattctagatttcgtatcaattcagtgctcagactatcgagaaagagtgaacatctatcgacaggctagtatcgacacgggcaccgacggtcacactgtccgaatccgaactatcagcctatcgctctccgatagcagcagtcgctacttgtccgaaccaatcgcctatcggggagactgcgtggctgctgcgttccgtaaaacgcaaagaagccaaaaagcaagggcattcgcattgaccaaagcaccaaacgctgctccttttcgaaaaacttcagtgcgcttttatttccccgccgctgtcaccgctttaaggagcaccaacatctaattattgaaaatcctaacgaacagtttagtcgaacagtgtaaaagcgtgaaaagaaaagaaaggaacgaataaaataaaagaaaaaccgctaagcgagttccgcaaaatgagtggggatgtggctgccgaaaatgtaagtgccctaaacgaaatatccattccttttttatgtaatgtgcaaacgtgttgaatggggggactttgcctgccgcctgcagcctgcctgtcagtcccaaaaaatcaagttaaattctgaaccgcataattgtagggtgcacaggatagttgcaagtgtaccgctcgctgctggcagctggcagcgacgccgacagcgctgccagcagagtgcgtaaaatacaacgagcagagaaaaaaaagtaagaagaggtcttttggtaattgacgaaaatggcgacaatgcaagtgggaaaaggtgaaggatggtgtgaagcagggaggggaagagccgaggcagacgaaatgtatttggcacagtgtggccgcagctggctggtattttaatcaaaactggtattttcaccagccactcgaacgttgcctttccacatttttccccctcaaaaacaccctttaactaactcatttccctgcatttccactgcaacttgccttatttacgttcgcatagcgtctcaatttccctgttcttcgtagattaccaccaagtttggtcacactgccctcttccacacacataatatcacatgtgtttgctgctgttgttgttgttgttgttggttgtggaccgctgctttcatgtacatatgtaattgcaagtgtcccattttgcaattacacttctacatgcacatacatatacgaaggtgttccgtcgtctgataagacagatgtgccaccccaaaacagccaaaaacaaataaaagcattaactagaaaatgctccggatgaataatatgcaaccacaataacaacaataaccccgtggggatgtgtttgtgtgtgtagctgttaaaaaaaaaaaaaaaaatgcaaaaagtgtaaaaaaaaagcaacgattttctgtattctaaacgactcttgtgcgtgtgtgggtgtcattgtttggcaaggtgttttttaaatatatattaacctattccaagtgattcggaaacaattttcaatttcctgtcgccatcgctcggcggctcttcttcttcgattaacccattgctggtagtttaaagtgaattttcctacgcggcatttgttagggttgattttcaccacgtggtgagcggatagacacgagataatagccaatcatcgccagaaatcgagaggaaatcgagtagatccacaagcgaccagttgggccaacatgacggatgcacaggtttctggcccggattcactctcacttttcagctggtccatctacatatatacgtactaactaactgataccatctccctttcttctttcttccatctcgccatctctctcgcgcccgcagagcatccacatacaaaatggtggcagctgcgaggtggttcaatccaacggggtgaccaccaatggacacggacaccaccaccatcatcaccacagcagcagcagcagcagcagcagcaagcataaatcctccagcaaggacaagcatcgtgatagggagagggagcacaagagctccaattcctccagctcgtcgaaggagcacaagagcagcagtcggtacgtatgtaggagcagatcgatttgactcgactctatgcgattcgattcgaatcgggccactcgtgtcgaaccatctggaacagtccaaataggtcaaagtcaggaaaggacaatgtaatcacctgggattcataatagtgcttacattaagagacagttgttccccatgtgctcattgttatagttcttataatcaatttacagtgccaaactaatgaaatgtaggtagctatcactttaaaggtattccgtctaaaatggcctaagtttctatgttcagttcctaagtaatttaaattatctcccaagaaagcgactttagatagaagctggaagaaaaggtgcatatgtatatagaatgagaaactgcaatcagaccagataattcaatattatatacagagtaatgcttttttcagagctatagattaggctataacatttcacaaggaatccaactaataaccctaaccttttacattttagcgacaaggatcgacacaagagcagcagttcgtcgtcaaagcatcgggacaaggacaaggagcgcgatggcagcagcaactcgcatcgcagcggctcatcgtccagccacaaggataaggatgggagcagcagcagcaagcacaagtcgtcgtcgggccaccacaagaggtcctcgaaggataaggagcgacgcgataaggacaaggatcgcggcagcagttcatccagtcggcacaagtcctcgtccagctcccgtgacaaagagcgcagcagcagcagtcacaagagcagctcctcttcatcctcatcgaagagcaaacattccagttcgcggcacagcagctcatcttcctcgaaagaccagccatcgtacgatggcgtatttgttaagccggagcccgtttcccaacagctgatgcactcgggctcggtggatgctttccagatgcaacagctcggtagctacgaagccgcagccgccggcaccaattttaatggcaatggaaacgttgccggtgccaactataagaacggctacgaggaatcgatcgtagacatcaagaaggaggaggagagctttaacaatctgtcgcaagccagctcctgtgactactccatgtcccagtttcgtgccgatgagccgccgtttgtggtgaagcacgagcagagctacgccgaagaggacagcaccatgaactacaatgatcacgacgacgacgccgacgagatgaacgacgacgaggaggatgtgccgctggccatgcgcaagcgcaaacaggaggcaaccgatcgtcctgatggcggcatggataacgacgatgacgacgacattccgctgctggcgcgcaagaaggttaagaaggagaagatcaagaaggagtccaaggaaaagtccaagaagcgggtcaaggaggagcccagcgatgattacggcaatgtcaagccgaaaaagaaaaagatgaaaaaggtaggcattttatcatttgtaacttgtaaattacacgtatgccttataatcgaaaaaattttttttgtcaggagcccgagcctgccgtatcccccggcaaacgacagaaggcaaaggccaaggtggaggaggaggaggtttggcgatggtgagttgtccgatttatcaaaaatatcatagaaaatggtctagaaaatgacactggagattcggggataggtgcagagctatcctttcaaatggatacacttcacaaacgttcagatgcactttcagtgcaaatcccgagcaatttggcccactcactgcgcacgggttattcgcggtgaaaggcctttggaacagatggcactggctctcccgcagccaagtacttgattatatcaaggcaaagccacgctcgatcagtgcgcattgctcagattcgtccgagctcaaggcaacatgccgccatgtgtttttggctgcgagaagttttcggatgtcactgacctacatttccgaaagtcacacactcagcggacggccgacgcacagtggctgccgcaagttattgtccgcctgtggctcgtcgcacagtggcgttcgtttgggcgacaactgttggcgctcactgtgcggcgagcgccattcgccacgaaacgcatgcgtcgctccagcccctgctccccccgctcaccatgtacagttgcaatgaaaaaaaaaacagctgagcaggccgaataatgcgcatttgaggttaggttcgaacgcggctgattgactgctgctttgcgtaatgctatagataaatcggagatataccaaaccaaatgttgcgctcttgggtggcattgcgtccattcgaaaagcagagtgtctgcctggtgctcggacagcgtatgttggccgtagccaccgttgcgggcaaacggagaagagtgcgacggaagagcgtccaggaagagcaaattcgatggtgcgacttgataggggtgctcctctagacaaagaaaagagggtggacccaattgctcttgattactgctagcaatggctagcctatgcctatgcctagcctataatttctataaaaactagaatagtaatagtacccatttatattagaaagttaattgataatatttcttcgacaatcgggggtgcttaacattttgaactcaactatagaaggttcagtcttaaagctcctattatccgcgcctgtatatgaagcactaacccgagtcatcctacattccaggtgggaggaggagaagcgtgccgatggcgtcaaatggtcaacgctggagcacaagggacccgtgtttgcaccgcgatacgaacgggtgccacgcaatgtacggttctactacgatggcaagccgttggagctctctgaggaaacggaggaggcagccacgttctatgccaagatgctgaaccacgactactgcaccaaggaagtgttcaataacaacttcttcaaggacttccgcaagtccatgacgcccagagagagggagattatcaaggatttccgcaagtgcaacttccaggagatgttcaactacttccaagcggagtccgaaaagcgcaaggcagccagcaaggaggagaagctgatcaagaagaacgaaaacgaggcgctgatgaaggaattcggattctgcatgattgatgggcacaaggagaagatcggtaacttccgcctggagccgccaggcctgttccgcggtcgtggcgagcatcccaaaatgggcatgatcaagcggcgcatccaagccagcgatgtgtccattaactgtggcaaagattcaaaggtgccttcaccgccgcccggatctcgctggaaggaggtgcgccacgacaacacggtcacctggctggcctcctggatcgagaatgtgcagggacaggtcaagtacatcatgttgaatccctcctcgaaactcaagggcgagaaggatcacattaagtacgagacggcgcgacgcctggacaaggtaatcgataagatacgtgccacctatcgcgacgagtggaagtccaaggagatgagggttcgccagcgagcggtggccctttacttcatcgacaaactggcgctgagagcaggcaacgaaaaggacgaggatcaggccgataccgtgggctgttgctcgctacgcgtggagcatgtccagctccacaaggaactgaacggaaaggagaacgtggtggtctttgatttccccggtaaggactccattcggtattacaacgaggttgaggtggagaagcgcgtctttaagaacctcgaactgttcatggagcacaagaaggagggcgacgacctcttcgatcgtctcaacacgcaggtgcttaatgagcatctcaaggagctgatggaaggtgcgtatttacaaattatctataattatttttcaacatacttactcgtcgctttttattggccaacgcaataggtctcacggccaaggtattccgtacgtacaacgcatcgaaaacactgcaaagtcagctggatctgttgaccgatccgagcgccacggtaccggaaaagctgttggcctacaatcgcgccaaccgtgccgtggccatcctctgtaaccatcagcgttccgtgcccaagagccacgagaagtcaatggagaatctgaaggagaagatcaaggccaagcgggaagccatcgaaaaatgcgagtccgagtatcatgtaagtatattcgagaggttcttccgctagcagtatgtttaattgttataaaccaatgcagtcgagagacgagaagaagggcaaacagctggagcgcctaagggatcagctgaagaaactagaactacaagagactgatagagacgagaataagaccattgccctgggcacatctaagctaaactatcttgatccacgcatatcggtggcttggtgagtggtctctcccttcaagcagcacattccactcaacgagaactaatatatatatatatatcatccatttgcaggtgtaaaaagcatgacgtgccgattgagaagatattcaacaaaacgcaaagaaccaaatttctgtgggccgttcatatggccgatgagaattatcgtttctaaatgggttctcctcacagccacgcctagacacaaacacacaagtacgccgacccttcctccacccaccaccaccccttcagacacacacacaaacacacactcgcacccgatcgaagaagatgtaacaacaaaccacacccaccacaaggccggtttataaatagattccatgccaatcccgccattgtttggtccacagtttatgcaattgatagtgcatatgtccagctttcggccaacgcaatgggggattgttagccaaaatgagcgggacggaatgctgcactacatcgtagtcgtggaaccgcttgtacgcgtccgttttgtctgctttgaatgggattaatgggatcaagtgcatactacgccgaagtctaacttgcgaaatgtgcacacccaaacacaagctaatccaatatatgtcagttttattcattaaaggcaagaggagatgtgaaacctgggcaagacgtcgccgccacctaaaaacaaatcaggagcataattttctatgtctctacaaaagaacttttttgtcaagatacccttatacttcataattttacatataaaacatatatacatatatatatttatatttatgtatataataatatttgtgtatatatttttatttttaatataatacatacatttacataaatatatatatatagatatatatatatatataaaaatatagatgtatatatatatctatatatatatatatatatttaatagcaaaagcaaacgaaaattatacaatttaaaacgcaattttttttatgtttacctatagttgattttgtttagcgaaaacaaaaaacaaaaacaaaaacaggcatttgtacataacaagccagcaattagttaccaaattagatattaactaaattaagatataataacattgtaaataaatatagctgtaagccccgtagctaatgctatactatctaagttagtctagttttgtaaactattctatctatcataataataataataatttgtataagtgcaaactgaacagagaaaccttgtagcccaacttttagcatagcataatttattcaa

SEQ ID NO: 13121 - DNA, 3254 bp, DROSOPHILA
ctgcgttccgtaaaacgcaaagaagccaaaaagcaagggcattcgcattgaccaaagcaccaaacgctgctccttttcgaaaaacttcagtgcgcttttatttccccgccgctgtcaccgctttaaggagcaccaacatctaattattgaaaatcctaacgaacagtttagtcgaacagtgtaaaagcgtgaaaagaaaagaaaggaacgaataaaataaaagaaaaaccgctaagcgagttccgcaaaatgagtggggatgtggctgccgaaaatagcatccacatacaaaatggtggcagctgcgaggtggttcaatccaacggggtgaccaccaatggacacggacaccaccaccatcatcaccacagcagcagcagcagcagcagcagcaagcataaatcctccagcaaggacaagcatcgtgatagggagagggagcacaagagctccaattcctccagctcgtcgaaggagcacaagagcagcagtcgcgacaaggatcgacacaagagcagcagttcgtcgtcaaagcatcgggacaaggacaaggagcgcgatggcagcagcaactcgcatcgcagcggctcatcgtccagccacaaggataaggatgggagcagcagcagcaagcacaagtcgtcgtcgggccaccacaagaggtcctcgaaggataaggagcgacgcgataaggacaaggatcgcggcagcagttcatccagtcggcacaagtcctcgtccagctcccgtgacaaagagcgcagcagcagcagtcacaagagcagctcctcttcatcctcatcgaagagcaaacattccagttcgcggcacagcagctcatcttcctcgaaagaccagccatcgtacgatggcgtatttgttaagccggagcccgtttcccaacagctgatgcactcgggctcggtggatgctttccagatgcaacagctcggtagctacgaagccgcagccgccggcaccaattttaatggcaatggaaacgttgccggtgccaactataagaacggctacgaggaatcgatcgtagacatcaagaaggaggaggagagctttaacaatctgtcgcaagccagctcctgtgactactccatgtcccagtttcgtgccgatgagccgccgtttgtggtgaagcacgagcagagctacgccgaagaggacagcaccatgaactacaatgatcacgacgacgacgccgacgagatgaacgacgacgaggaggatgtgccgctggccatgcgcaagcgcaaacaggaggcaaccgatcgtcctgatggcggcatggataacgacgatgacgacgacattccgctgctggcgcgcaagaaggttaagaaggagaagatcaagaaggagtccaaggaaaagtccaagaagcgggtcaaggaggagcccagcgatgattacggcaatgtcaagccgaaaaagaaaaagatgaaaaaggagcccgagcctgccgtatcccccggcaaacgacagaaggcaaaggccaaggtggaggaggaggaggtttggcgatggtgggaggaggagaagcgtgccgatggcgtcaaatggtcaacgctggagcacaagggacccgtgtttgcaccgcgatacgaacgggtgccacgcaatgtacggttctactacgatggcaagccgttggagctctctgaggaaacggaggaggcagccacgttctatgccaagatgctgaaccacgactactgcaccaaggaagtgttcaataacaacttcttcaaggacttccgcaagtccatgacgcccagagagagggagattatcaaggatttccgcaagtgcaacttccaggagatgttcaactacttccaagcggagtccgaaaagcgcaaggcagccagcaaggaggagaagctgatcaagaagaacgaaaacgaggcgctgatgaaggaattcggattctgcatgattgatgggcacaaggagaagatcggtaacttccgcctggagccgccaggcctgttccgcggtcgtggcgagcatcccaaaatgggcatgatcaagcggcgcatccaagccagcgatgtgtccattaactgtggcaaagattcaaaggtgccttcaccgccgcccggatctcgctggaaggaggtgcgccacgacaacacggtcacctggctggcctcctggatcgagaatgtgcagggacaggtcaagtacatcatgttgaatccctcctcgaaactcaagggcgagaaggatcacattaagtacgagacggcgcgacgcctggacaaggtaatcgataagatacgtgccacctatcgcgacgagtggaagtccaaggagatgagggttcgccagcgagcggtggccctttacttcatcgacaaactggcgctgagagcaggcaacgaaaaggacgaggatcaggccgataccgtgggctgttgctcgctacgcgtggagcatgtccagctccacaaggaactgaacggaaaggagaacgtggtggtctttgatttccccggtaaggactccattcggtattacaacgaggttgaggtggagaagcgcgtctttaagaacctcgaactgttcatggagcacaagaaggagggcgacgacctcttcgatcgtctcaacacgcaggtgcttaatgagcatctcaaggagctgatggaaggtctcacggccaaggtattccgtacgtacaacgcatcgaaaacactgcaaagtcagctggatctgttgaccgatccgagcgccacggtaccggaaaagctgttggcctacaatcgcgccaaccgtgccgtggccatcctctgtaaccatcagcgttccgtgcccaagagccacgagaagtcaatggagaatctgaaggagaagatcaaggccaagcgggaagccatcgaaaaatgcgagtccgagtatcattcgagagacgagaagaagggcaaacagctggagcgcctaagggatcagctgaagaaactagaactacaagagactgatagagacgagaataagaccattgccctgggcacatctaagctaaactatcttgatccacgcatatcggtggcttggtgtaaaaagcatgacgtgccgattgagaagatattcaacaaaacgcaaagaaccaaatttctgtgggccgttcatatggccgatgagaattatcgtttctaaatgggttctcctcacagccacgcctagacacaaacacacaagtacgccgacccttcctccacccaccaccaccccttcag

SEQ ID NO: 13122 - protein, 974 aa, DROSOPHILA
MSGDVAAENSIHIQNGGSCEVVQSNGVTTNGHGHHHHHHHSSSSSSSSKHKSSSKDKHRDREREHKSSNSSSSSKEHKSSSRDKDRHKSSSSSSKHRDKDKERDGSSNSHRSGSSSSHKDKDGSSSSKHKSSSGHHKRSSKDKERRDKDKDRGSSSSSRHKSSSSSRDKERSSSSHKSSSSSSSSKSKHSSSRHSSSSSSKDQPSYDGVFVKPEPVSQQLMHSGSVDAFQMQQLGSYEAAAAGTNFNGNGNVAGANYKNGYEESIVDIKKEEESFNNLSQASSCDYSMSQFRADEPPFVVKHEQSYAEEDSTMNYNDHDDDADEMNDDEEDVPLAMRKRKQEATDRPDGGMDNDDDDDIPLLARKKVKKEKIKKESKEKSKKRVKEEPSDDYGNVKPKKKKMKKEPEPAVSPGKRQKAKAKVEEEEVWRWWEEEKRADGVKWSTLEHKGPVFAPRYERVPRNVRFYYDGKPLELSEETEEAATFYAKMLNHDYCTKEVFNNNFFKDFRKSMTPREREIIKDFRKCNFQEMFNYFQAESEKRKAASKEEKLIKKNENEALMKEFGFCMIDGHKEKIGNFRLEPPGLFRGRGEHPKMGMIKRRIQASDVSINCGKDSKVPSPPPGSRWKEVRHDNTVTWLASWIENVQGQVKYIMLNPSSKLKGEKDHIKYETARRLDKVIDKIRATYRDEWKSKEMRVRQRAVALYFIDKLALRAGNEKDEDQADTVGCCSLRVEHVQLHKELNGKENVVVFDFPGKDSIRYYNEVEVEKRVFKNLELFMEHKKEGDDLFDRLNTQVLNEHLKELMEGLTAKVFRTYNASKTLQSQLDLLTDPSATVPEKLLAYNRANRAVAILCNHQRSVPKSHEKSMENLKEKIKAKREAIEKCESEYHSRDEKKGKQLERLRDQLKKLELQETDRDENKTIALGTSKLNYLDPRISVAWCKKHDVPIEKIFNKTQRTKFLWAVHMADENYRF

SEQ ID NO: 13123 - DNA, 4478 bp, DROSOPHILA
cattcccggatcaaagtaagacccatttaagctactattattcaatcttcttcaataaaacgagagcttattgcatattcaatttgttatcgagtcaaacggatagcaccatggtccatataaatctccacaggctcactgctaaatctaatttacgacaatattatgcgagaaaagaaaatgctgcgggggggtgtggaaaagcgggggaattgcgtagggcagagatcaaatgtaataatcaaatgtatttgcagcaattttcacttcagcaccttgagcgcgaatcgggaaagcacttaagtggaaatgccgccagtcaaacgctaaaagcccagccgcttttccccttttcctttttcccatccgtttatcctgtcaactggggggtgggaaacttctcctatggagctaatagtttttccacttttcctttgactttcacttccgtgccatctcaacaagttgctcgagtggttcggctatttcctcttggtttttcgcccaacttgttgatttaaattcatgaacgtttggcacaaagaaaaatctcgccccacttttttttcgggttatttgtttttttttttgattccttcgccctgctgtatttgtcaggctggaggaccggaggattcccactcaatgtccatgtgtttggccagacacttgacacaagcacttggtgctggacacatccaccactgactggcccccatccacttccgctgagttttcccctggtggggttttagtgtcaactgcaggagggtcttcgcctccagtgcgtgtccatttaattgactgtcgacggctcggcacttggagctgcccaactcagcctgctccattggccatcgtattggcatctgataatgactaagcaggggcacttcagcattgattagttgctggctggtatttgatttaattgcacatcttcccacataaattaagggtgcactaagctctttctgaaatatcagagcaactactgcagataatacttatcctatgtcagaatgaatgccttacgctttgctaattaattaagcttgtgggaagtattatacttaattcgatataagatatatataatataaagtttaagtattgctctctaaacgatatattgcttgtactcaagggatatgctttctttcaaatacggaatactattttcaatgaagttctagcatagaatctaagaatcctgataaaatctcagcactcagtatccctgggattgatgaactgacaaccaccattcgcattgacaggaaggcgttcattagcttaagtgccgctcagtggtaattttatgccaccacttgcgccattccccaaggaaatggacaatttccaggcgattgactggcaaggataaccagctcccggtagataaatgctcatgaaatgctaatggccagcagggaataagatttatgcgtcgtaatatatgtatggtatctatcttaaggtatccccatcaggtataagtgtagttaaactcacccactgtggtcagcagcatgttgtcgaggagcagggctatggccacgatgacgagcaccaggcgattggatccccgccagctgaccatccaggatttggcggcggcccaggacccggcagcgcgtggatcctcctcgcggtactgatccgctggcggcggagcctgtcgtcctgcgtaggtctgcgactggtaggtgggcggcggcggtaccggtggctccttgccgacgcccatgatgccgcaatccggctccatattgccattctgttgattgctgtccaactgctgcttgaagggatttttgctgggcgtattgctggcgggtccgccgggaatctgttgctgctggctgttggtggtggtgtttgcgtttacggtgaaggaggtggtctcgctaatctccgactgcttctggggggctgtgctctgcgtgtgttttcttggtccaccattgcccgcatcggtcgatgattgcattgcgtcgctagccgctggttgctacgaatggcaaggcagtaagccgattgtctttttaaaatgtaatcaaatcaagagtaagcagctttcccataccaattcccattcccaatcgcatttccatgcccattccccttccaaatcaaatccaaaagtcgcacgctcgctttatgccccaatgattttcgctaattaaaagtaaattacaagtcttggggctggcaattaagaagcgtatctttcacacggcaacacgactctaattgaatcatacgcaatttaaatatttatttaattgcctgccaccccggagcactaccagcaaacacacggggcgtatgcgcaacatttgtaattttgacattttctgttgcctatcgccaggcgcaaattcaatttgccagcataattcgctcgcaaagtctcacaaaagggagtcgaaaaagagaggcagagttctttaagttttcggttgtaaaattgaattaacccactgcttttagcaaaaaaaagaaaaggtctcgtaattgaaggcgtagatgaatcaagtcttccgccaatagtctttgcataatgccttctcaatttactttgcaattgatcaagtttacaattgatgcctgtcccgtcgtacaattgattgtttatgacgtcttcgtattgataaagtgttgacattgaatgacaaatgaaaattatctgacaaatagacgaggaagctgctgaaagttcatacaactgcaacacgtttgggggcgtgacaaacaaacggcagcaaattttgtcatttcaattgattaaatcaactagaattggctgcctaaatacaaagctgttgcgttagttatagtattgtacaagggaaatctggcatcgttttaattagcccgtatatttgtccattaatctctgttttaattgcgctactgttgtttatgggaagattttttaatggctaacaaatgggataactttttataacaagggataagttgtattcatataaataaacaaatatcggctctgttttctaggatatatagtattctattctttctcatccctttgccaaaatgcactttcaatttaatgtgcattctttagaagaaattatatgatgttagatatgaagttcaatcatttacctggcagcttttcctgatttaatagatctggagattaatgctccacaaactgaactctcgcccctagaatatcacgtgcactaatgaacctgaatctgctttaacgaccgatatttatatggcttttggctaatcactgaaagccgccagaaatgcgcactgaaatcccaattagccgatgactctgttgatcaaaatcaaaatcacaagttaaggctgtgtgttttgcatttgggaagtgctgatgtttgtctggattgcactttctttttcacaattggttcactttggaatctttttcggggtggatcgttcattccgcggattccaattctaccgacaagtcggcgctctgaactcaaactaaaaactttagcgtgccgccggcggtttattaaacgaattaattttgagcaagcgaaaaagattcgcttagtttttttttctatacaaaaagtgctggaagcgtagtaaatgcatgggtctttgcatttcaaatgaatgcacaatgaaaagtgtgtaaaatacattttaataattattaattaacaattggcatgcgattttggtttatgggcgtgggaaaattcgattcaaacaaaagatactgtttttttttttttagatttcaaattatgctaattcattggattttcaagtttgactttcagagcctgaaagttgaactttttcatttcgatttgattcaaatcgaacttgattcaattgctaaaacaattcttgagtacatatcgcgtgtatgtttttattccataccagaataatgcatgtaaaccaggagaatttattgcaatttttttaattcaaagttttaatactctttcaaaagctgaagtaccagtataccattcaaattttcaataattcaagttttagaaatacaatttttttgaaatttgtgtgaagttccatatatattatctttagaatagagaatataacatagaattcctgcattgaattaaattgagctgcatgtgcgatgcgatgtgacgaatgcgattgtttaattctttatttatgttccctcagatatttattttgattactgtttgtcgttgcttttttgtttaattgttgttgctgctgcagcttgtgctaattgcccaagatttttcaaatggcgacgttggtttaaaatgtagtggcttgctgcctcttctgagcatcggcacgcaactttatttaaattgtgcccatttttcagttgtgtattaattaaaacgtagctcatgcctgcgcttagtcagtggatttgagcttgacattgaggcagatggaagagacctcggtttatggaaggccataaactggttttc

SEQ ID NO: 13124 - DNA, 1354 bp, DROSOPHILA
tcggtagaattggaatccgcggaatgaacgatccaccccgaaaaagattccaaagtgaaccaattgtgaaaaagaaagtgcaatccagacaaacatcagcacttcccaaatgcaaaacacacagccttaacttgtgattttgattttgatcaacagagtcatcggctaattgggatttcagtgcgcatttctggcggctttcagtgattagccaaaagccatataaatatcggtcgttaaagcagattcaggttcattagtgcacgtgatattctaggggcgagagttcagtttgtggagcattaatctccagatctattaaatcaggaaaagctgccagcaaccagcggctagcgacgcaatgcaatcatcgaccgatgcgggcaatggtggaccaagaaaacacacgcagagcacagccccccagaagcagtcggagattagcgagaccacctccttcaccgtaaacgcaaacaccaccaccaacagccagcagcaacagattcccggcggacccgccagcaatacgcccagcaaaaatcccttcaagcagcagttggacagcaatcaacagaatggcaatatggagccggattgcggcatcatgggcgtcggcaaggagccaccggtaccgccgccgcccacctaccagtcgcagacctacgcaggacgacaggctccgccgccagcggatcagtaccgcgaggaggatccacgcgctgccgggtcctgggccgccgccaaatcctggatggtcagctggcggggatccaatcgcctggtgctcgtcatcgtggccatagccctgctcctcgacaacatgctgctgaccacagtgggtgagtttaactacacttatacctgatggggataccttaagatagataccatacatatattacgacgcataaatcttattccctgctggccattagcatttcatgagcatttatctaccgggagctggttatccttgccagtcaatcgcctggaaattgtccatttccttggggaatggcgcaagtggtggcataaaattaccactgagcggcacttaagctaatgaacgccttcctgtcaatgcgaatggtggttgtcagttcatcaatcccagggatactgagtgctgagattttatcaggattcttagattctatgctagaacttcattgaaaatagtattccgtatttgaaagaaagcatatcccttgagtacaagcaatatatcgtttagagagcaatacttaaactttatattatatatatcttatatcgaattaagtataatacttcccacaagcttaattaattagcaaagcgtaaggcattcattctgacataggataagtattat

SEQ ID NO: 13125 - protein, 167 aa, DROSOPHILA; identical to SEQ ID NO: 13077

SEQ ID NO: 13126 - DNA, 3964 bp, DROSOPHILA
ccatggccaagaaatagaacttaactgaacaaagacagagtcgtggaatctcattattgtggtttattttaagcaatcgatgaaccagttttcaacttggctactgtatcgtctcattcaactacttgccggctttattgaggttaattgaaatgatttattaacatttgtgcaatttttgttggcgcttcgaaaattcccaaattgagataatttgcataaaaaaacatttggcgcccacaacttaaagtaatttaatttcgaccttttttgaggattttttgagcaatattgttttttttttatgaacatccgtgtgcggtttatgggtcaacgcttaaatatttgctgcgtcttcgcgatcgatttattttgattttatttgcaatgtttgccttgatttggtttcttcttcattttagttttgttttgaccacgaaccggttggctagcattaactgaatttcgctccttttgccaagtcattatttttattggcacttttgattttggttttcttgtaaccccaaaacctgttgaacttgagctcaaaacacgttcaggatgaatcggagtgcatcgggttgtgaatagggctcagaacatgaaaaggaaaaaagtgaaatcgttctcaaggtcgcagacactcgcatgggaatgctaatttcctcagaatattctgactttctattttctgaacgttaattgaaatgttttgagtaggaagttttactttttattaaaaacagagtcataaacaatgtttatatatatgtggtaaaaaaaacttatgtcgcagcaatgcaaaaagtttttaaaaaagtgcgcttttgacattttaacaacacgcaagaaataacgattatttttaacaaggttgtcactaaaattcgtttcactgaagaataatatagattttgaacacacatgcaatcgtaaaaactgtttccagtttttgtttattttaaacgcaatattcaacctttcaggttaaaccaagatgagattctgtggagtgctgattatctgcctgtggtatattcaagtcacctggtcccaacttcttgtggatttggctcgtgatttcgagacttcttttctaaacaataggatcccggacaccacacgattcctgccggaatatgacttcatcatcgtgggagcaggaagtgctggatgtgtgatggccaatcggctgagcgagatatcctcggcgagtgttctgctcctggaggccggtgatcaggagacattcatcagcgatgttcctctgacagcggctctcacccaaatgactcgatataattggggatacaaggcggagccaacggagcacgcctgtcaaggattaaagggaggcgtttgcaactggcccaaggggcgtggcgtgggtggcaccagtttgatcaactttatgttatatacacgcggtcatcgaagggattatgatgagtgggcggcggccaacaactcaggttggtcctacgatgagttgttgccatactttcgaaaatcggagaggattggaataccggagctgtataaatccccgtatcatggacgcaatggccagttggatgtgcagtatacggactacaggtcacaactcttgaaggcttttctaaaatcaggcagggaaatgggttacgaaattaccgatccaaatggagagcacctcatgggatttgcaagatcgcaggccaccatccgaaatggcaggaggtgcagtacgagcaaggcttttatacagccagttgtgaatcgaaagaatcttcatatctcgatgaaaagttgggtcacccgactgataattgatccgatcactaaaactgccactggagtggagttcgttaagcaacgtcaacgctacgttgtgcgggccagaaaagaagtgatcctctccgctggcaccatagccagtccccagcttctcatgttatccgggatcggtccagcagagcatcttagggagcacaacataacagtaatgcaggatttgccagttggttacaacttacaggatcacataacacttaatggtcttgtgttcgtggtcaatgattcgacggtaaacgatgctcgactgctgaatccctcggacatatttaggtacatcttcgcaggacagggaccatatacaattccaggtggagctgaagcattcgcctttgtgcggactcccagttccaaatttggtacgcatgaatcatgaccaaatgtgtaaatttgttttaatcctatgaaatttctatagcaaaggactatcctgatatggaactggtcctaggagccggatccttaagtggagatcgctttggcactatgcgaaatttgctgggcatcaccgacgagttttacgactacatgtttggagatctgcagagcaaggagacctttggtctggttccagtgctcctgcgacccaaaagtcgcggcagaatatcgctgcgcagtcgcaatcccttccactggccccgtatggaacccaatttcatgcagcacccggatgatgtgagggccatgatcgagggaatcgaaatggtaggattaatctgtttgaatccgaaacataattaatttccttggcattttcagattctaaagctttctagatcgaagcctatggcgaagatgggtactcgtttccatgaccgcccatttccgggttgcgagaacctgaaattcgccagcgaggcgtactggaaatgctgcttaagaagatatggctccagcttgcagcatcaatcaggcacctgcaaaatgggtcctgcaacggataatacttcagtggtggatgcccaactgcggatccacggtatccgtggattgcgggttgttgatgcttctgtgttacctaatgtcccagctggtcacaccaatgccattgtgatcatggtcgccgaaaaggcgggggatatgattaaggatgcttggcgcatgccgatcactcccttgagctcatagacttaccattaagatcgttatttattatttagttgtcgcacaatccattaggttaagttcgcatgtgatagcttatatagtagctaaggggttccttattgtctcaatgggttatattttaaacaatttattgtttccactaagatatttaaaaaataagattcctcttccaaataaatataatttaaagaaatcggttattttacaattttatagattttttgtggctgtaatgcattttggtattttaaatttcgcgccaggctagtaagcttttgaaagccttgaccgaatacttttcatatcaggcatcttttgtaacttaggctcgaagctttttggtgtaaattaaattgacaagacaagaacacataatattaatacacttttttcccttttttatttttaaataaaaatttggatgttatatgttgactagcttatgtaaaacccttacaacttaacttttgacgtctcgctttttacatgtagagaacagtggcgctacatttgaaaaacgtaagagatggcgtgcttaacgtttttagctttgcgttttataacggacgtcgtaaggtaaagttagcacctaaattccgccttgaatattctctaactaaggctaacccaaaatttggcttcttgtgttactgaaataagtaatgtcacgcagaggcatattttagttcacatgggaactgagacccagcatgaggctaataccaatggctttgcgtgctccgctgaggattgtttttaatgaccgctggccgggtaattgctgacctccctctttggaaaaatagaagcatagacaaagctcccgcctagcaaccgttgcgttttagaggttccttaacccggccataaagctaacccactttgtctggtcacatactcgtacgtactcgtatgggcggccatggccacgtggcgtatgggaaataagcttaattaaatatttaaaccgtaggcgggagctaatgtttgtcattaaggg

SEQ ID NO: 13127 - DNA, 1851 bp, DROSOPHILA
atgagattctgtggagtgctgattatctgcctgtggtatattcaagtcacctggtcccaacttcttgtggatttggctcgtgatttcgagacttcttttctaaacaataggatcccggacaccacacgattcctgccggaatatgacttcatcatcgtgggagcaggaagtgctggatgtgtgatggccaatcggctgagcgagatatcctcggcgagtgttctgctcctggaggccggtgatcaggagacattcatcagcgatgttcctctgacagcggctctcacccaaatgactcgatataattggggatacaaggcggagccaacggagcacgcctgtcaaggattaaagggaggcgtttgcaactggcccaaggggcgtggcgtgggtggcaccagtttgatcaactttatgttatatacacgcggtcatcgaagggattatgatgagtgggcggcggccaacaactcaggttggtcctacgatgagttgttgccatactttcgaaaatcggagaggattggaataccggagctgtataaatccccgtatcatggacgcaatggccagttggatgtgcagtatacggactacaggtcacaactcttgaaggcttttctaaaatcaggcagggaaatgggttacgaaattaccgatccaaatggagagcacctcatgggatttgcaagatcgcaggccaccatccgaaatggcaggaggtgcagtacgagcaaggcttttatacagccagttgtgaatcgaaagaatcttcatatctcgatgaaaagttgggtcacccgactgataattgatccgatcactaaaactgccactggagtggagttcgttaagcaacgtcaacgctacgttgtgcgggccagaaaagaagtgatcctctccgctggcaccatagccagtccccagcttctcatgttatccgggatcggtccagcagagcatcttagggagcacaacataacagtaatgcaggatttgccagttggttacaacttacaggatcacataacacttaatggtcttgtgttcgtggtcaatgattcgacggtaaacgatgctcgactgctgaatccctcggacatatttaggtacatcttcgcaggacagggaccatatacaattccaggtggagctgaagcattcgcctttgtgcggactcccagttccaaatttgcaaaggactatcctgatatggaactggtcctaggagccggatccttaagtggagatcgctttggcactatgcgaaatttgctgggcatcaccgacgagttttacgactacatgtttggagatctgcagagcaaggagacctttggtctggttccagtgctcctgcgacccaaaagtcgcggcagaatatcgctgcgcagtcgcaatcccttccactggccccgtatggaacccaatttcatgcagcacccggatgatgtgagggccatgatcgagggaatcgaaatgattctaaagctttctagatcgaagcctatggcgaagatgggtactcgtttccatgaccgcccatttccgggttgcgagaacctgaaattcgccagcgaggcgtactggaaatgctgcttaagaagatatggctccagcttgcagcatcaatcaggcacctgcaaaatgggtcctgcaacggataatacttcagtggtggatgcccaactgcggatccacggtatccgtggattgcgggttgttgatgcttctgtgttacctaatgtcccagctggtcacaccaatgccattgtgatcatggtcgccgaaaaggcgggggatatgattaaggatgcttggcgcatgccgatcactcccttgagctcatag

SEQ ID NO: 13128 - protein, 616 aa, DROSOPHILA
MRFCGVLIICLWYIQVTWSQLLVDLARDFETSFLNNRIPDTTRFLPEYDFIIVGAGSAGCVMANRLSEISSASVLLLEAGDQETFISDVPLTAALTQMTRYNWGYKAEPTEHACQGLKGGVCNWPKGRGVGGTSLINFMLYTRGHRRDYDEWAAANNSGWSYDELLPYFRKSERIGIPELYKSPYHGRNGQLDVQYTDYRSQLLKAFLKSGREMGYEITDPNGEHLMGFARSQATIRNGRRCSTSKAFIQPVVNRKNLHISMKSWVTRLIIDPITKTATGVEFVKQRQRYVVRARKEVILSAGTIASPQLLMLSGIGPAEHLREHNITVMQDLPVGYNLQDHITLNGLVFVVNDSTVNDARLLNPSDIFRYIFAGQGPYTIPGGAEAFAFVRTPSSKFAKDYPDMELVLGAGSLSGDRFGTMRNLLGITDEFYDYMFGDLQSKETFGLVPVLLRPKSRGRISLRSRNPFHWPRMEPNFMQHPDDVRAMIEGIEMILKLSRSKPMAKMGTRFHDRPFPGCENLKFASEAYWKCCLRRYGSSLQHQSGTCKMGPATDNTSVVDAQLRIHGIRGLRVVDASVLPNVPAGHTNAIVIMVAEKAGDMIKDAWRMPITPLSS

SEQ ID NO: 13129 - DNA, 3276 bp, DROSOPHILA
gagaagctgataaacatccgtatccaatacatacttccagcagacccggcttatttctctccagattgtaatgccattccagcatactggtcgccgtcgtgaaaaagtccagctgtgcttgcggaagagtcatcgtgctgaaaactgtgatgaggcgggctaactcgggtgcaatgctaacttaaaatgccgtcagaccactgttttgggatgaaactacaaactaatctgaagatttggtcgactgatgctcaatgtacccacgctcccgccttctgctaagtgttaccagatatcctcacattctcggtattgttttggtatatttcgattgaatattaatggatttcacaatttcaggcgccttagcggggtattatgaaatcgtctgtcacaagaaacatttgcaaacgtgcatgaaattaatattttaataataatttcttttactgctaatatatattatatgataaggacgcgtatattaatagacaataatggttttagtaggcatattcagtgggcttaaatactttgaaaaaacgttgataattttatataaacagtaactgtgctaatacaagtataataaaaaaagcacttcccatgccggaaacttttgagaatataaaaatattagaatgtgaagagtataactcagttgagcgcaacaggtgtgttattctctaaaatcggtaaaacctcaaactactgaatgaattcagcatttcgaagctttgccaatggattttataattgtgattaaaatccactttccgctttcccaaatagacttgatttaagccttcttttcaaaaaaaaaaaaaaagactactgtaactcaacacagaaactctagcgcttaacagcacaatgcgtaacgttaacagcaccccaacggcacatggcgctcaaaatttagcgcattttgtgcgcctcacacagccacattaaatttcccttcttttcttttccccgtttccggtgagtagtgtgttccgcgttatatttttattgaaattttaacccaaaatatctctaaaaccaccccttgcagcgaggagtccatccagaatttgtgtcatacaaacgagggactaacggagcgtaagttttgtgtgaaaaagcgccccaaaacatcgaatcgagtgaaacggcaattggcgtgtggcactgaagagccgccgtttttccatttccgctgggatggatgatccataaacaaattggaaaacaataggcagcgcacgttttgttagcccgatgtgaactctgcgattcgatgtttggaatgctctgtgacaagcacttgtagccttgataaactaataattaatgtttttgccgacagtgtcatcaagatgcgtaccattaattccaaccagtgcgtgaagatccctaaggatatcaaggcctcggtgaaggcccgtgtggtgaccatcaccggcacccgcggcaccctgaagcgcagcttcaagcacttggctctggacatgtacatgcccgacaagcgcaccctgaaggtggagaagtggttcggaaccaagaaggagttggccgccgtccgcaccgtctgcagtcacatcgagaacatgatcaagggtgcgtacagctagggtaaacacaacaggaacactttcacagccaggcctttcatttgccaatcacacgagaatttaataataatatctgggaagacgatttactaaactccattcatagatatcaattttctttacaaattacctaaaaatgctatatagtagttagtaaatattttcagtgtgtgctggcaaattagattcggcattaggttcctaaagacatttgcattcaaagtaccacacaattaattgcaatttctctctcgccaggagtcacgtttggattccagtacaagatgcgtgctgtgtacgcccatttccccatcaactgtgtcacctccgagaacaacacggtcattgagatccgtaacttcttgggtgagaagtacatccgtcgtgtggagatggctcctggcgtcaccgtggtcaactccactgcccagaaggacgaacttatcgtggagggaaacgatattgagtctgtctccggatctgccgccctcatccagcagtccacgaccgtcaagaacaaggatatccgtaagttccttgacggtctgtacgtgtccgagaagacgaccgttgtgaagctagagtcttagacttttggaatgtgtttcaacctaaaatgttaataaaaaaaaaccaacggccgaaactttcaataagaaatttagtgtctttaaacttttgtaatataatgtattcagattttatcacaatgctccactaaaaaagtgatgattggttgaaaattcgttggtaagattgtgttatttatcttatttatttatttgcaaggtttcataagttcatgataacttgagattgaaagcactacaaaaggacctttaggaagagatcccgcttaaggcagaggtagtcctctgctggttccctctggcacacatatggaaactgaaccttgcactctatatcgtgatacccaaaggctccattgtaattggcgaatccaacacaatcctcttcgggggaagcgttgttcggttccaggggtacccagtttaggtacggcacagtttcgccgttcctggcgagaagaaaggtgcgccggttacccaagcaattgatgccagcccaaacggagtgatgccagctttgggtgaaggatagccccatactctttaggaacgtggttgtgaggagtttgtcctcttgattgtcgagcaccattagttcggcaccaagttttcgacagcttcgatcggcaacatgccagttggcctgaaataatatttttgcgtttaaataaaatccttgtacaacgtattgtacgcacctcctgcaaagatacgtggtagcacttgtttccgactcgactaaacggcaacggacacgtctgtgcattggcacattcgagaatcagagctataagaaggaaaccgaaagaccctttgatgcacatgctcatgttttagggccaactgatatgtttatatgaaagctagctacttttaaacgctcggcagagaactatattttattgcaagcagtcgggagataatatttattaacgttatcttaagcaaattagggcaatcagtgcgaaaatggcaagcatgtacaacgactgcgaatttatcattatcatttattacaaaaatattcaaagcctgttaatttactatgccatctggacgatggcacatac

SEQ ID NO: 13130 - DNA, 760 bp, DROSOPHILA
gcgttatatttttattgaaattttaacccaaaatatctctaaaaccaccccttgcagcgaggagtccatccagaatttgtgtcatacaaacgagggactaacggagctgtcatcaagatgcgtaccattaattccaaccagtgcgtgaagatccctaaggatatcaaggcctcggtgaaggcccgtgtggtgaccatcaccggcacccgcggcaccctgaagcgcagcttcaagcacttggctctggacatgtacatgcccgacaagcgcaccctgaaggtggagaagtggttcggaaccaagaaggagttggccgccgtccgcaccgtctgcagtcacatcgagaacatgatcaagggagtcacgtttggattccagtacaagatgcgtgctgtgtacgcccatttccccatcaactgtgtcacctccgagaacaacacggtcattgagatccgtaacttcttgggtgagaagtacatccgtcgtgtggagatggctcctggcgtcaccgtggtcaactccactgcccagaaggacgaacttatcgtggagggaaacgatattgagtctgtctccggatctgccgccctcatccagcagtccacgaccgtcaagaacaaggatatccgtaagttccttgacggtctgtacgtgtccgagaagacgaccgttgtgaagctagagtcttagacttttggaatgtgtttcaacctaaaatgttaataaaaaaaaaccaacggccgaaactttcaataagaaa

SEQ ID NO: 13131 - protein, 190 aa, DROSOPHILA
MRTINSNQCVKIPKDIKASVKARVVTITGTRGTLKRSFKHLALDMYMPDKRTLKVEKWFGTKKELAAVRTVCSHIENMIKGVTFGFQYKMRAVYAHFPINCVTSENNTVIEIRNFLGEKYIRRVEMAPGVTVVNSTAQKDELIVEGNDIESVSGSAALIQQSTTVKNKDIRKFLDGLYVSEKTTVVKLES

SEQ ID NO: 13132 - DNA, 3540 bp, DROSOPHILA
gccctagttataagggctcaactataataatcacccacatgtactgttagccacacccaacttgagtgatgagtaactccgaagggcggaaaaatcctttcaagtaggaactacaaggccagacctacaatacaacaaaaaatcaccatgatgtgcatgatttacggacttgggacagataatgtgagaaaagaaaagcgaaatcccaatgtgaattcatttaaataattaaaccatgattcccgcgtacacatttgaccttaagagccggcgagttaatagccctcaaattatagcaactttgtatgacgggacaggaaaataagaatcgagcgtttcgcagcagaacagaataagaggaataattaaaacgaacgaaattaatttgttccacttcagccacccgcctagcaaagtcgttttgaaccaacatcgattgtcgggccatgtctgcttgtctaggccagcttgtctaagccagcttgtctaagccatggcccaaacacaaaaagtgcgcacagtgccatacatgatgatataacgtattttcgtggagaatcccatgtgttcccagtataatggaatcaaacaaagaaaacttacacacccttccattaaattgttacgaaaactacaggtaatttgtgcaagaggtacactttgagaaaaataattttttatttctccatattctatggaactaaaagttcgagtattggtataaccaaaatcgcctataagcatttttaaaaatatcggtatcttaaattataacaatcctctttttaagtggtatgtactttagcgttttttccagtgcatccaagccatgcaggtatataataatgacaagccaaaatttgaagaaaccacaaactaacacgaacccaaaaacttgagcagactaaacgaaatctccttctgttttttgtcaaattattcctgctagacaccagagcattttttgtactgtctgctaaatagatctgattttaccaggatgagctccaccaagaaggttgagacccgccaagagagcgacaccctgggacccatggaggtgcccatggatcgctattacggcgcccagacgatgcgctgcctcataaactttcgcattggcggcgaggaggagcgaatgccggtaagtgtcttagttgtactcttaacccatatgatatcttaaccattggacaaactatgctacactgatcagcgccagataatccaggccatgggcatactgaagaaggcggcagccgaaacaaaccaagaattcggattggatcccaagttgagcacggccatctcgaatgcggccgacgatgtgatctccggaaagctttacgatgagggtcacttcccgctgcccatttggcagacgggttcgggcacccagagcaacatgaacagcaacgaggttatcgggaatcgtgccatcgagctgctgggcggacgtattggtaccaaggacccagtgcatcccaacgaccatgtgaacaagtcgcagagctccaacgacacctttccgtcggccattcacattgcggtggccactgcgctgaccaaggatctccgaccggcggtcaccgctctgcgggattcactgcaggccaagtcgaatgaatggaaggatatcattaagattggacgcactcacacccaggatgcagtgccgctaacgctgggccaggagttcagtggctatgcccaacagctgaccaacgggctgcagaggatcgatgcggtcctgccgcgagtttatcagctcgcactgggtggaaccgctgtgggaactggattgaatacccgccggggattcgccgagaagtgtgtcaagcggatcgcccagctcagtggattgcccttcgtggtggcgcccaattttttcgaggccctcgcctgtcgagatgccatggtggaggtgcatggagcgctcaatgtcctggctgttagcctgatgaaggtcaccaatgatatacgtttcctgggatcgggaccacgttgcggtctgggcgagctgtttctgccggagaatgagccgggcagttctattatgcccggcaaggtgaatcccacgcagtgcgaggccatgaccatgatctgcgcccaggtgatgggcaaccacgtggccgtctccgtcggcggtgccaatggacactttgagctcaacgttttcaagccactgatcgcatccaatgtgctccgctccatcaagctgctgggtaagtttctatataaaattattgaaatatatattttataagatgaatttcctagctgatgggtgcatcagcttcaactgcaactgcgtcaagggcattaagcccaacaaggagaagctggcaaagatcgtgaatgagtcgctaatgctggtgacagccctcaatccgcacattggctatgacaagtccgcccagattgccaaggcggcccacaagaatggaactactctaaaggtggaggcattgaacgccggcatatcggagaaggatttcaacgagtgggtgcgtcccgagaagatgctgggtccttcttaggttttcctcccttgttccatgtgttacacattcataaattccatattgcaaaattttatcgttggaaatacaatcgagtgaagaaggatgtaaacagttttggtaacacaaggttgtgatgaaattcttgtggatatttttgttccaattaaatttcaaataaaaatagcaatcgccttaaaaatgtaagacgctactaaaaacccattgctatatccgttgggaagttcctaattagggttctgtaatatcgcaggaagataatagaaagggaagttttgagaggatgaaaaccctgccagctgaatgcgtaccaaatgaggtcgtcaagtcaaagtcgaaaccccttacctttcggttagggtcgcactcttgtcgagtgggaaaggaaatcaaattattttaatgatacacaaattgatactttgaaacaaaaaaaaataacaaaagcaaaaataaaagtagctcgaagcaattgcgactattttcctatttcatggaaatggcagtcgtttcaatcgaaggggacattgatgtactcggattgaagctgccaccgacattaggtgaaaattggattccctacattttgcttattcctttctattccaacgcaccccacattttcctttttttttttttgcattacttttctcttttttccgcattttccatccagttgaagattggtcggggacagggtctttaatacctgaagcgagtgcaattgctattattatgcaaatttttgctttcattgcatgcgtgtgttactttctcattgtttctttgtttttttccccctcctcttttttgtaatttaaatgagggtcgtcggtatccactcccttttccaggcctttatgtcctcggtcctggcaataataaaagacaattgaaatgtcaatagcttacaattgtctgcaataacatcccaggtaaccgccgtcgtatccgaacagatcattacctaggggtagcgtatcgaaatgagacaggg

SEQ ID NO: 13133 - DNA, 1413 bp, DROSOPHILA
atgagctccaccaagaaggttgagacccgccaagagagcgacaccctgggacccatggaggtgcccatggatcgctattacggcgcccagacgatgcgctgcctcataaactttcgcattggcggcgaggaggagcgaatgccgcgccagataatccaggccatgggcatactgaagaaggcggcagccgaaacaaaccaagaattcggattggatcccaagttgagcacggccatctcgaatgcggccgacgatgtgatctccggaaagctttacgatgagggtcacttcccgctgcccatttggcagacgggttcgggcacccagagcaacatgaacagcaacgaggttatcgggaatcgtgccatcgagctgctgggcggacgtattggtaccaaggacccagtgcatcccaacgaccatgtgaacaagtcgcagagctccaacgacacctttccgtcggccattcacattgcggtggccactgcgctgaccaaggatctccgaccggcggtcaccgctctgcgggattcactgcaggccaagtcgaatgaatggaaggatatcattaagattggacgcactcacacccaggatgcagtgccgctaacgctgggccaggagttcagtggctatgcccaacagctgaccaacgggctgcagaggatcgatgcggtcctgccgcgagtttatcagctcgcactgggtggaaccgctgtgggaactggattgaatacccgccggggattcgccgagaagtgtgtcaagcggatcgcccagctcagtggattgcccttcgtggtggcgcccaattttttcgaggccctcgcctgtcgagatgccatggtggaggtgcatggagcgctcaatgtcctggctgttagcctgatgaaggtcaccaatgatatacgtttcctgggatcgggaccacgttgcggtctgggcgagctgtttctgccggagaatgagccgggcagttctattatgcccggcaaggtgaatcccacgcagtgcgaggccatgaccatgatctgcgcccaggtgatgggcaaccacgtggccgtctccgtcggcggtgccaatggacactttgagctcaacgttttcaagccactgatcgcatccaatgtgctccgctccatcaagctgctggctgatgggtgcatcagcttcaactgcaactgcgtcaagggcattaagcccaacaaggagaagctggcaaagatcgtgaatgagtcgctaatgctggtgacagccctcaatccgcacattggctatgacaagtccgcccagattgccaaggcggcccacaagaatggaactactctaaaggtggaggcattgaacgccggcatatcggagaaggatttcaacgagtgggtgcgtcccgagaagatgctgggtccttcttag

SEQ ID NO: 13134 - protein, 470 aa, DROSOPHILA
MSSTKKVETRQESDTLGPMEVPMDRYYGAQTMRCLINFRIGGEEERMPRQIIQAMGILKKAAAETNQEFGLDPKLSTAISNAADDVISGKLYDEGHFPLPIWQTGSGTQSNMNSNEVIGNRAIELLGGRIGTKDPVHPNDHVNKSQSSNDTFPSAIHIAVATALTKDLRPAVTALRDSLQAKSNEWKDIIKIGRTHTQDAVPLTLGQEFSGYAQQLTNGLQRIDAVLPRVYQLALGGTAVGTGLNTRRGFAEKCVKRIAQLSGLPFVVAPNFFEALACRDAMVEVHGALNVLAVSLMKVTNDIRFLGSGPRCGLGELFLPENEPGSSIMPGKVNPTQCEAMTMICAQVMGNHVAVSVGGANGHFELNVFKPLIASNVLRSIKLLADGCISFNCNCVKGIKPNKEKLAKIVNESLMLVTALNPHIGYDKSAQIAKAAHKNGTTLKVEALNAGISEKDFNEWVRPEKMLGPS

SEQ ID NO: 13135 - DNA, 5358 bp, DROSOPHILA
atccggacactttagcagcggtgagcccttggaggctgagctttcacagaagatgcgattgctgaagactcagttggctggctataatctgtgccaggacctctacctggcggatctcgacgtggagctgcaccgctcgaatgccttctggctggaggtggttcgcaagctgtggccggtttatcaatgcatgccgctggacaagaaggacgcacatccgtgctccctgaccgacatttttgccggagattgggcggccgcccagttcagtcacttgtattcccgcctcatagccgccgacatttcgagcagctttgctgagcagcgaagcgaagagaactacgcggtcgttggccggcgctacaagcagaccttcctcagctgcggcggatctgtgcccacggcggaagtgttccgtcgcttccagggtcgcgacccgtcggccgaggcacttctaaagtcgctggacatatttgaaccctcccagaccacagataacaactgagggtcgccctctgttccgctaaaacgttatctattgtgtgtagtcaacaaatgctgatcgatggcagcctgtggaggcccgacgagtggcaaccttataggaaagtaagcattggagtattggaaaatattttaaaatagttttgaaatgtattctgttaaatatttgtttattggtcaagatcccacttgtacttatttaaaagaaagtatagccgtaattgaatgaccccagccaggaaactgaaaaccaaaaacgattgataagggctttataaattttggaagtgtaactattaaaacaagaattctatactttacgcctccacgatttattagtcggcaattcgatctacaccctaattggcagccggatgtgatagcgatcgcgtgagtcaggcgggatcttatcgcaggtgtgcaggtggtgtcgccaggcgacatcgtcagttaccccagttgaacacacatacacacacacgttgttgctttatttaaataatactttaataataaattgcataaatttataacatttaacatattctctcgcttcttgctcggttctctcgattcggttcgatatatttatatacacaacaaaggcgaagtatgcattcagcggaaaggaaaaagacatctaggggtttggatggaaaccgaggattaagagctatcatctgtcttggccttctgttggaaagccactagaaatggttaaccggtagtcaggaagaaataatcaaagtacatttcgacgcaggggtatggattaaactggttagttacaggaattaatttatatatatatatatatataaatatgctctagatcaaagtgtggtactacaatatgcgtatgtgctgctccgaaatcagtcggagcgtgtcccgctgtggtgtgttagttgtgtgtggaggctggatatctgaaaactttagaatattcgctaaggctgctatgtgtggtagtggctgcagttgctcccttggctgctccgttggctactgctgtctagtatatgtccggacagccttcgaagttctgagccgccttggcctcccagtaagtgttcttgaaaacgtgcacatattcctcgcttccctcctccttttcgcgcttgaaccacatgggctcataggctggatatggcctaccctctgcggcggcctcctccgcctcgttttcccgccggcggcgttctgtgcgctgcttctcctccaggcgcaatttctccttattcgactcgtcccagtcgccctgctccatcagcctttggtcgggacgaaggcgtgagtccgtcggcgccacgccctcctcctcttcgttgagctggcaggctagtgtagtgaagttataaaacttgtccgaatccggaggagcaggacgacggcgccaggccagcttaaactcgcccgtggtgtacgttggactgctgaccgatcccgatgtcttgagcaccggtgcaatctcgatcttcatgtcccacgtaccacgcaccacccacttgacctcgttgtctttgttcattaccacgcctttgacgcttcgctgcacatcgcgactaaagtacgagtaggggataaagttcaggatgcatttgtgcccctctgccgcctgcgatccccggatttccatttcgccatgctggtccacccacagtttgcccacaatgatgttgttcaccgttgtggtcaccttgcgccaggaatagcgcctgccgctgttcgggaattgcacatagacgccgcccaagggattgatctgtcgcgaaattaatgcattattagattatcacattgtaatggaagtaaccccgatcccaggagtaacttgcttctttcataaagtcctatacacctatactcacttgaacgtacttgccgcggaacttgctggtcatggagaactcctgccagcacgtccagttcttactttcgcagtgcagcgccgccaccggtggatgatgggacacttgctcggccaggcaccgccaaccatagtcatccatccggtcacactcgtaggtctcgcccagcagcggattgaagggcttgcctgtgcggtttgtggtcgtggcataggcggacacggtaaaggcggctatgtaggccagctgctcgcactcgtcctggcaggtggccgcgtagtcgagtatctccgtgtactcatagtcctccaccaggcgctgcagcatggacagcggttcgttaaagttgatgggcatgggaattttggacagatccttgccaatgcaatttttcatgatgccccacaggctgatggggtggttcggtttatctggcacacggtcgcgtcgcttcttaatcagatccggattccagttgcgtccgtagatggagtcggtgctctccttggccggcaacgccttatccacgtcgtcatcgtcgtcgccctgaccgcccgatgctacccgtggcgcactcaccaggcacacctgctgcaccgtttgcacggtgcgcttctgctcgtcactctccgaggaactgccctccaaatggccctccacctggtcctcgctactactgcggcgcttgtgcatctttaagataaaggtaccccgctcgcaatccgaagactcaggggagcgaccgctgcctgaatagccgtgctcctcggcatcgaaaaactccatctcctcatctgaggtcaccaaggagccggcggtgcctgcccccgaggtggatgacaccggcttgttctggcgcaccagtacggcggcctgctccatctgcgactgctgctttgccatctgctcgatgatctcctccagccgctggcgttgctcgcgctcgtggtgtagcatcttggaccacttatggccttgtgcctctgccgtgtgcaggtagtcgttgccggcgttgatcatcgcattggaggttatccggaagagggtcgccctctcgttgacgatcttcgtgcggctgcccagcgactcctcctcgttcgtctccagatcgttgagagcgcgctgcaaggctgcgccatgcttggtgatcaggtcgtagcaggtacgcatgctctccagccgatcggtgagatctcggaccaccgagctgatctcctggctgggcaccacatgtgccgtttccgtctcctcctcctcctcgcattcgatggcccggattgccttagcctttgccagctccagggcggtgacccacgactggcgctccacctcggtgccggccttgatgtggaacgtttgggtgccgccgttcgagattacgaacgtgcacgaatcgaccgtgtggatgagggctccgtgaagcgatatggtgccccggcacgtgtggttaatctccgactggttgcggtagtagctcagcacgcccttggatagcacgaaccatcgccgctggtagcccttgatgtaattggtccactttagcagccagcctttcatctccggtaggcccttctcggccagcgcattgccagcggcgtctgtcatgatggcaaccggttccggtatccgtatgcgttcctccggccggatgaagcacttgcttcgagactgcgaatagcgccacgtacgatgactggcgattggtcggattggttccgttccgcaactccgacttgaaattcgaatgctattggttattggacggcgacggctgattgctggccagtggctagcatcgcacggtgtgcacttggcctccggatcaccaccgagattccgattacgttacggtcgcgagtccgccgcgagttcactgcgaatttcgtgtcgttttgcttctaattttcctgcagaaaataaagaaactgtagtggaagttcagtgcgcgtctgtgtgcgtgtgtgttctgtgtgtgtgtgctggcgcatctgcaggtgtgtgagtgtcagtgttaccaggtggttggttgcgtttcctcctacacatatcgatgggcgataggcaacgataatctgcgatctgaaaaaatctttttcaaacactgtgccgttagaaagcttaaacaatatttagaaatatgattattattttcaaatcgataaggattttgttaaacaatatttagaaatatgattattattttcaaatcgataaggattttgttaaaaaaaaaactttttagaacccatatattttttccttccatacacaccttgctatatctacatttaactttaaaatccccaaactacatcaaattacatttatattaaatagtaattgttaatttctttgtaattatacaatatgtgaaaataattcatatctccggtcactattaaattatgtgtgtacccaaaggtgactcatggccaacagtaaaacagattgcgctcgaaattggattacacatttttatttataaatatgtggtctgataaatggcaaaaaatacaagtgttcaaggtgggaacttttgggccgcggcctcggcagtcggtgctccatgtgccggatcacttcttgtactccgcccaagagtagcggaaggagcggatcatgtggataaggctgcaaatacaaatctggtaaaaacggagggcagtgtttgttgggcaacacatgggagttgtggtgtgaatggcacatggacggcacagggacactcacaagacaagacgatgacgtatatacaataaatcgtttattcgtaggcagttcttgcataatataaaataaatatgtatacagttacaagtaatttaaaagtacaaatacagtttcatttccataggttgttttgtttgccctctcttgtcatcttaatagttccattcacacattgcagacacaagatctttagaagctttcatggacgccttacacaacaagacaacaaacacgaggcatgatggaggggatg

SEQ ID NO: 13136 - DNA, 3252 bp, DROSOPHILA
ccagcacacacacacagaacacacacgcacacagacgcgcactgaacttccactacagtttctttattttctgcaggaaaattagaagcaaaacgacacgaaattcgcagtgaactcgcggcggactcgcgaccgtaacgtaatcggaatctcggtggtgatccggaggccaagtgcacaccgtgcgatgctagccactggccagcaatcagccgtcgccgtccaataaccaatagcattcgaatttcaagtcggagttgcggaacggaaccaatccgaccaatcgccagtcatcgtacgtggcgctattcgcagtctcgaagcaagtgcttcatccggccggaggaacgcatacggataccggaaccggttgccatcatgacagacgccgctggcaatgcgctggccgagaagggcctaccggagatgaaaggctggctgctaaagtggaccaattacatcaagggctaccagcggcgatggttcgtgctatccaagggcgtgctgagctactaccgcaaccagtcggagattaaccacacgtgccggggcaccatatcgcttcacggagccctcatccacacggtcgattcgtgcacgttcgtaatctcgaacggcggcacccaaacgttccacatcaaggccggcaccgaggtggagcgccagtcgtgggtcaccgccctggagctggcaaaggctaaggcaatccgggccatcgaatgcgaggaggaggaggagacggaaacggcacatgtggtgcccagccaggagatcagctcggtggtccgagatctcaccgatcggctggagagcatgcgtacctgctacgacctgatcaccaagcatggcgcagccttgcagcgcgctctcaacgatctggagacgaacgaggaggagtcgctgggcagccgcacgaagatcgtcaacgagagggcgaccctcttccggataacctccaatgcgatgatcaacgccggcaacgactacctgcacacggcagaggcacaaggccataagtggtccaagatgctacaccacgagcgcgagcaacgccagcggctggaggagatcatcgagcagatggcaaagcagcagtcgcagatggagcaggccgccgtactggtgcgccagaacaagccggtgtcatccacctcgggggcaggcaccgccggctccttggtgacctcagatgaggagatggagtttttcgatgccgaggagcacggctattcaggcagcggtcgctcccctgagtcttcggattgcgagcggggtacctttatcttaaagatgcacaagcgccgcagtagtagcgaggaccaggtggagggccatttggagggcagttcctcggagagtgacgagcagaagcgcaccgtgcaaacggtgcagcaggtgtgcctggtgagtgcgccacgggtagcatcgggcggtcagggcgacgacgatgacgacgtggataaggcgttgccggccaaggagagcaccgactccatctacggacgcaactggaatccggatctgattaagaagcgacgcgaccgtgtgccagataaaccgaaccaccccatcagcctgtggggcatcatgaaaaattgcattggcaaggatctgtccaaaattcccatgcccatcaactttaacgaaccgctgtccatgctgcagcgcctggtggaggactatgagtacacggagatactcgactacgcggccacctgccaggacgagtgcgagcagctggcctacatagccgcctttaccgtgtccgcctatgccacgaccacaaaccgcacaggcaagcccttcaatccgctgctgggcgagacctacgagtgtgaccggatggatgactatggttggcggtgcctggccgagcaagtgtcccatcatccaccggtggcggcgctgcactgcgaaagtaagaactggacgtgctggcaggagttctccatgaccagcaagttccgcggcaagtacgttcaaatcaatcccttgggcggcgtctatgtgcaattcccgaacagcggcaggcgctattcctggcgcaaggtgaccacaacggtgaacaacatcattgtgggcaaactgtgggtggaccagcatggcgaaatggaaatccggggatcgcaggcggcagaggggcacaaatgcatcctgaactttatcccctactcgtactttagtcgcgatgtgcagcgaagcgtcaaaggcgtggtaatgaacaaagacaacgaggtcaagtgggtggtgcgtggtacgtgggacatgaagatcgagattgcaccggtgctcaagacatcgggatcggtcagcagtccaacgtacaccacgggcgagtttaagctggcctggcgccgtcgtcctgctcctccggattcggacaagttttataacttcactacactagcctgccagctcaacgaagaggaggagggcgtggcgccgacggactcacgccttcgtcccgaccaaaggctgatggagcagggcgactgggacgagtcgaataaggagaaattgcgcctggaggagaagcagcgcacagaacgccgccggcgggaaaacgaggcggaggaggccgccgcagagggtaggccatatccagcctatgagcccatgtggttcaagcgcgaaaaggaggagggaagcgaggaatatgtgcacgttttcaagaacacttactgggaggccaaggcggctcagaacttcgaaggctgtccggacatatactagacagcagtagccaacggagcagccaagggagcaactgcagccactaccacacatagcagccttagcgaatattctaaagttttcagatatccagcctccacacacaactaacacaccacagcgggacacgctccgactgatttcggagcagcacatacgcatattgtagtaccacactttgatctagagcatatttatatatatatatatatataaattaattcctgtaactaaccagtttaatccatacccctgcgtcgaaatgtactttgattatttcttcctgactaccggttaaccatttctagtggctttccaacagaaggccaagacagatgatagctcttaatcctcggtttccatccaaacccctagatgtctttttcctttccgctgaatgcatacttcgcctttgttgtgtatataaatatatcgaaccgaatcgagagaaccgagcaagaagcgagagaatatgttaaatgttataaatttatgcaatttattattaaagtattattt

SEQ ID NO: 13137 - protein, 784 aa, DROSOPHILA
MTDAAGNALAEKGLPEMKGWLLKWTNYIKGYQRRWFVLSKGVLSYYRNQSEINHTCRGTISLHGALIHTVDSCTFVISNGGTQTFHIKAGTEVERQSWVTALELAKAKAIRAIECEEEEETETAHVVPSQEISSVVRDLTDRLESMRTCYDLITKHGAALQRALNDLETNEEESLGSRTKIVNERATLFRITSNAMINAGNDYLHTAEAQGHKWSKMLHHEREQRQRLEEIIEQMAKQQSQMEQAAVLVRQNKPVSSTSGAGTAGSLVTSDEEMEFFDAEEHGYSGSGRSPESSDCERGTFILKMHKRRSSSEDQVEGHLEGSSSESDEQKRTVQTVQQVCLVSAPRVASGGQGDDDDDVDKALPAKESTDSIYGRNWNPDLIKKRRDRVPDKPNHPISLWGIMKNCIGKDLSKIPMPINFNEPLSMLQRLVEDYEYTEILDYAATCQDECEQLAYIAAFTVSAYATTTNRTGKPFNPLLGETYECDRMDDYGWRCLAEQVSHHPPVAALHCESKNWTCWQEFSMTSKFRGKYVQINPLGGVYVQFPNSGRRYSWRKVTTTVNNIIVGKLWVDQHGEMEIRGSQAAEGHKCILNFIPYSYFSRDVQRSVKGVVMNKDNEVKWVVRGTWDMKIEIAPVLKTSGSVSSPTYTTGEFKLAWRRRPAPPDSDKFYNFTTLACQLNEEEEGVAPTDSRLRPDQRLMEQGDWDESNKEKLRLEEKQRTERRRRENEAEEAAAEGRPYPAYEPMWFKREKEEGSEEYVHVFKNTYWEAKAAQNFEGCPDIY

SEQ ID NO: 13138 - DNA, 2964 bp, DROSOPHILA
ggcgttccttagttccttctgcgccttgtttgccagcttttggcaaatgtagagcgagaacttttcgattccggtgcgatggcaaccgactagtggaaagattttgaagaatctttccacagaggccaaatcatcggctttgactgcctcatcgaagcgcttggcaatcagcacgcgggtcttctcggtggcatcctccagcgtcttgaccgcatcgctaaccgacgttatggagccctgaacgtcgtcggcggtgcgccgcagcaattgctgatccatcgccaggaagcgggcaatgtgggtggcactcttctcgtagtcctcctcgccgatggccttcaccacgccctggctacacagatgcaggtcgatcagatcgtgcacccgctgctggcactcggaggcacggcacctggccaaatccaaacggcgcaccttggcgctcaccgattcggccaactgggcagtgtttacgatctggtcgttcagcttgttggaatcgctgtccaccgtgtgaagcaggctgagtgatcgcccaatgccactcattttggcctcaatctggcattgtttggccagcagcgactccagtttctcgttaacttttgcctaaaacggaggaaacacataagactcaaccggagttttattgacatgggactccacctcttcgtcggcaatccgctgcagcgtttcgtccacctgctcatttgtaccgatatctagagcacccagctgttccagaacactcattccgctgccgtcggtccggatttccggatctttgttaaatttcttgatctctttttccaattggatgaattatctgatacgtggaatgaaaaatttgttttgctttgaaatagcgatgggagtttgcggctctggaccaaatgtatcggaatgtggtatatcgatacatgagggcaacgataagacggtgaaaatacttttaagttcgatctgctgtttaattaaaagttaatgattttacaaatacaaataatgtattttcttagttaaaatacaatcgttcaaaagcgacaagtttaaaagcaaatgttacattaacaccatacgtcactaaaaatacgggcaccctcgattttccaaacagctgatgcagaattcaaagcccaacaaaagtattgatttgcaatttaagtagaattagcattagcgtagcattccgatagataagtgtaggcctagtcatggatttcacgggctttgaagtgcgaaaggcaagttaataacacccaagtgtctcgagtgaagtcctcgttatccttgcttatcctttccagtgcccaccgactgtcatgtacattccgaacttcatcacttccgaggaggagcagcgcatcctgagccacatcgagcgcactccgaagcctcgatggacgcagctgctgaaccgccggctggtcaactacggcggtgtgccgcatcccaacggaatgattgccgaggagattccggagtggctgcagacctatgtggacaaggtcaacaatctgggggtgttcgagtcgcagaacgctaaccatgttttggtcaacgagtatctgccgggtcagggaattctgccgcacacagatggaccactgttccatcccatcatctccaccatttccacgggtgctcataccgtgctggagtttgtcaagcgtgaggacaccacaactgaaacagaagctggagatcagacgacccgtgaagtgctcttcaagctgctgctggaaccgcgcagcctgctcatcctcaaggacacgctgtacaccgactatctgcacgccatctccgagactagcgaggatgtgctctgcgatcgcatctccaactacgatctgtgcgagaatacctacaagatcggggatcacttagtacgccgatcgccgcgcatctccctcaccatccgtaatgtgcccaagaccagcaagatgaagctcaagttctgctaggttcattccgccattcgatgttctttggcattaaagattacagattacacagatgttgactagctgcacgttaaacgaacccactgaagagatccctgggatccaaaaagaactatgataatctgcaacctgaatcttccgctagatgttaaagcactccgcactagcagcacacttgttcgcaagcaaatccatgttggcccacacaaaagtgctttatttataccgctagcattgtgtacatatatataaatgtttgtattacgtattacggagcaataagttgtcctgatcggcggacaggctcgagctgtatcctcagattccacctgaccgccggcggcctttagatttagttgtgcgagcagttgttgcaggaatccatggcctagatttgtgaaatatgtggttaactttgtatatgggcatgtgcgacaactgattttgattatgattgtcctaatgctttgtacaatagaatctacacagaatttatgtaaaatctttctgattgaaaatgttccttacgttaactactaagcaaatcaattgcagccaaagaaatcataatgatgatcagttgacgagataccccttatatgtatgttgaatggagcagccagcacactggttaccatagtcgtgtgctccatgctccggcctcctgtgtccaagtgtatttttgtaaccgttttttccaccgcgcaccgcaaaaaagagcgaagaattgccaataaacgttattgtccacctaactcatcctttaaaccatttaatccactaggcctcctcatccagccactccagccggaactcgcgctcaaagaccaggcgatcgtacagccgcacctcgctaatcctcgccgagatgtccagccgcagttcgctgaccgccaggtggaaattctgacgcaccgttcgctgtttgtccggtgtcaattgattgagaggtttgcgaaagatgctgatgatgcgctgcagatggtattccacgctggca

SEQ ID NO: 13139 - DNA, 886 bp, DROSOPHILA
aaataatgtattttcttagttaaaatacaatcgttcaaaagcgacaagtttaaaagcaaatgttacattaacaccatacgtcactaaaaatacgggcaccctcgattttccaaacagctgatgcagaattcaaagcccaacaaaagtattgatttgcaatttaagtagaattagcattagcgtagcattccgatagataagtgtaggcctagtcatggatttcacgggctttgaagtgcgaaagatgtacattccgaacttcatcacttccgaggaggagcagcgcatcctgagccacatcgagcgcactccgaagcctcgatggacgcagctgctgaaccgccggctggtcaactacggcggtgtgccgcatcccaacggaatgattgccgaggagattccggagtggctgcagacctatgtggacaaggtcaacaatctgggggtgttcgagtcgcagaacgctaaccatgttttggtcaacgagtatctgccgggtcagggaattctgccgcacacagatggaccactgttccatcccatcatctccaccatttccacgggtgctcataccgtgctggagtttgtcaagcgtgaggacaccacaactgaaacagaagctggagatcagacgacccgtgaagtgctcttcaagctgctgctggaaccgcgcagcctgctcatcctcaaggacacgctgtacaccgactatctgcacgccatctccgagactagcgaggatgtgctctgcgatcgcatctccaactacgatctgtgcgagaatacctacaagatcggggatcacttagtacgccgatcgccgcgcatctccctcaccatccgtaatgtgcccaagaccagcaagatgaagctcaagttctgctag

SEQ ID NO: 13140 - protein, 223 aa, DROSOPHILA
MDFTGFEVRKMYIPNFITSEEEQRILSHIERTPKPRWTQLLNRRLVNYGGVPHPNGMIAEEIPEWLQTYVDKVNNLGVFESQNANHVLVNEYLPGQGILPHTDGPLFHPIISTISTGAHTVLEFVKREDTTTETEAGDQTTREVLFKLLLEPRSLLILKDTLYTDYLHAISETSEDVLCDRISNYDLCENTYKIGDHLVRRSPRISLTIRNVPKTSKMKLKFC

SEQ ID NO: 13141 - DNA, 4852 bp, DROSOPHILA
gcgttgaaactggatatgtacaataactatagcatacagttttaaaagacgcgcccaagttatcgataaataatatgcggagtgttgcataccgttagcataaacacactctcacacactcttatttctgggtatacattttctgataagaatgcaataaatatcccgactggttggagtaatttcgagtttttgaattaaaaatgccttaagaaaagtttttaatgagccatgtagagttaacaccagtgccacatatcctgggaatggagcaccaatcaaaagtcatcatcaagcggcccaaatcaggccaattctagtcggaaagtcgttgcagccgcccattgccaccatgtcgaatgatgtgcaggtcgcccgggtggccaagatagctaccgatgtgccgcgtcgcagtggcaagcagcgtgactccagcggattccagggcaagcactccggcagcgcggctggcgaggatttcgagtacgtcttcggtagcatttcgccgcgcggtggaggacccggtggcaggcacttggtgggatcctccgacctggactctccggagcacacgcagcgggacaccaccgagagtgacaacaacatatccagctgctccacgctagacattgtcaacaaagtgagtaatgatgcccgcactgagagaaataactagatcttaaatcaaaaaaatcaatatattaatttgcaatgatacattggtactaaacatgatcaagttcattttaaattaatttttaaaatgatcacaaaatatttaaaaatacctcattattgtgtagtttaaaataagaaacgcagaattttcaatcattggttttcaaagtgtttcgggctttaaattcggttggcgtccagtgcgcagatgcgtgtggaaggctgagggtcaagttgcagcggcggagagcgcggatgcatccgcggtcggatgacgacgtaatcgccagtcaaaattttccactggaccatgatttcggagcaactgcttccgcgcagcttgagctgcctgtgctgcagcgatacgccatcggtgcccaacgacaagagacgcagttgggagtatacgctgatggctcatcctctggccagacggcccataaacgtgatgaccccaagaataaccacttagaaagctctaatccgcctcttttcttttgattcacctccaggttgagcaactgtcggtacaacagctagaaaaccgggtgcgggatctaacgcagcgtctgcagcaggcggaaagacagctcactgagagcaacacagagcgggaaatatgccacaagcgcttggaggttgtcagccaggcccacgagtgtcgcatcacagagatgcactgtgtcatcgccgagttaagcaagaaattgcgcagtaagcaggaccacgttatcatggaggagcaggagcccgacggcagcggtgcgtagcagtttcaaatgagggaaacaaacccctaaccgacagtcttgttttcagaactcagctttcaggagggttcagtgtacaattccgagcttaacctcaccaatcctgatgccgaatgtcaaacagaaccactggaagacttcgagggcgcctgcagtaccaccagcgtgggtaacgttgcccacaaaccgccggaactgagccataagggacaagtggaggcactgcaggaggaagttctgcacttgagagctcgaatcgccctcctccagtccgagatttccaccaaggatgctgctgtggtcgaggaacagaccaaagtcgccttcgactgcgaatcggaagtcaacgagtgcggacagcgactgaatgatttgaatggtaatataaataatcctgatgataaaagaatggttacacatttagatgctttcagtttgcacttccttgacaagtccgcaaaaacgcattccagcggtaccgaaaatggctgaacgggttaagttgcggtgcgccagcaaacatgaatccggagaagatccatcccaagatacttcattgagcaacgaggtgtgttgaccaaaactttattcagagaatacatttcaacccatacaacccataattttaagcaaattaatctggtcgaacatttggtgtcggagctaaaggagcaaaatctatatatggagaactttatggagcccctacatttgagcaaagacttggagcgactgcaacgacgtgttgaacaattggagatgcgaaacaccatgctggcactgacgctagacgaatgcaaggagcacactgagcatctgtatctgctatgcggaaagtacgagtccaatgcggttgctcttcagttggcgcttaattgcagtgatcgcgccatcgaggcctacgacgtaatgttggctctgctcgaaagcaagtaagtacaatcaccataagacgcgggttgttgtccctatttcacaattcatcacttccaggttggcactgctgggggagaaatcagtggcagcggaagagagtcgacgatcggtggaggcggtggccaggcacctgctagcccgtttggatagcgagaaaaacgtttgtgagaacagcctgggaccgtggcaacacaacatcaacctgggcccagaggatgccccaaaaactggccgcccgtggtgtgccgacgacgacaaccgcctgcgttaccacgtctccaagctgaagggacgtcgttccaatgtccagcataccattgtcagtttggaatcacccttcagcgacatatacgaaagaaagcgcctggctttggaaaaggagcacgaacttcggagcgcggacaagaagtcacccattgacttggagacagcagtgattatgcaagaaatactcgagctgcgggattcgaatttgcagctgaagacaaaaatggaagaggccgagcaggaacggcagaacgccaacgaacgagtgggcatactccacgaagccctaaagcagctacaggcaaacaaccgggtctcgtattcggaggcggagcatgcggctctcacagagcagcagttggtggaggccttaactcgagaaacggagctcaagggtcgcatacagacgctattggcaaatgtaacagcttcgcagaaggccttcgacgaaaaatacgagcaactgcatcagaacgtgcgtgaactgcagaaatccaaccagtaagattcgttttattttgactgtttcatacataatttcttcatatttcccttttagcaatctgggccaaatgttagatcacaccaagcgcaagtaccagctgcgggtgaggaagctagagcagaagattgttgacctgcggctggactacgagcaaggccataaccatgttcctgagactactctgtaggaaacgcatgacgaccttccaggaggactgagcaactgggcgtggagcgggcgcgcttgtcacatatcccgcaaaagatctttccctctcgatcatatcgcttattttacctttaatgcaatgaccacccgcccagcagtcgccgtggatccgccatgaccaagacagtatcacgaatgtgccatgcgacttaattgcagtcggctggggcttgggcggtgtccctgcctcgcagataaggctgcagtaactacatactcaaatacatacatattcagaggtgccatgagcaaggctccaccaacctatccatagatccgtgggattggagcatccgtctatgggccacaagcaattacatatacacacatacgaatagacaaactaaggagttattcaagacgcatacacgggatcctatatttatacaatgtattcgcattttgcttgttatatgattcaatatgtatttaaaactgtacaaaatataaaacgtctactaaaactcgataaaattcacgaatttgaaattggctccaataattaatcgataagctaatgaaactaacttaagcatccatcaccatttcgtgtagtgttgcaaatcaccagaatcaagtatatgagtacttgtgaaataaaaatgttttgaaaatttaacttaatttacttaaaatgagtgccacagatgcatctacagccgatagtggcgctaaacgaaaatcttctgaagatatcacacacaattgcaacgcaaattttggcgcagaaaacggcctaagaaagcgcgtaaaatcggaggagcctgtggcgtccattaaagatgaaacaaatcctgaagttcctatgaaaataaaagctgagccagtggagaatgcagatgagcccacaagcactactcctgcgatcaagattaaagccgaaccagcggacaatggaaactcacctgcagctgcgatggtaaaaaccgagcccactaatagcaatgcacaggacgccgccgacgagtctaccgtatcttcaagcagtattaggacttcttgtcgcttcggcatacgatgctacaggtgattcacactaaccaactcccatattaccaactaaaaatatacctttttccaatgacaggcgaaatccagctcatcgtagtgcagaagctcatccgggggatcaggattaccggcgaccaaactttccagcgccacccctcggaactccagcttgtcctttcggtaacgcatgctatcgccgtaacccagttcacttccaggattactcccatcctgcggattgtaagtagaaggcttggcatacttcggcttcaaattggctaaagcccattgtagtcaattccgcgcagaacattcgaaatcgtctgcgtcaacggcgagcccaacggcagaacgacgatgactcggggacggatgaggaggatgaaccctttggtggcgacaatgacagggatgcggactaccgtccaggcgcagacataaacgaagatgaggatga

SEQ ID NO: 13142 - DNA, 2492 bp, DROSOPHILA
caactgcttccgcgcagcttgagctgcctgtgctgcagcgatacgccatcggtgcccaacgacaagagacgcagttgggagtatacgctgatggctcatcctctggccagacggcccataaacgttgagcaactgtcggtacaacagctagaaaaccgggtgcgggatctaacgcagcgtctgcagcaggcggaaagacagctcactgagagcaacacagagcgggaaatatgccacaagcgcttggaggttgtcagccaggcccacgagtgtcgcatcacagagatgcactgtgtcatcgccgagttaagcaagaaattgcgcagtaagcaggaccacgttatcatggaggagcaggagcccgacggcagcgaactcagctttcaggagggttcagtgtacaattccgagcttaacctcaccaatcctgatgccgaatgtcaaacagaaccactggaagacttcgagggcgcctgcagtaccaccagcgtgggtaacgttgcccacaaaccgccggaactgagccataagggacaagtggaggcactgcaggaggaagttctgcacttgagagctcgaatcgccctcctccagtccgagatttccaccaaggatgctgctgtggtcgaggaacagaccaaagtcgccttcgactgcgaatcggaagtcaacgagtgcggacagcgactgaatgatttgaatgtttgcacttccttgacaagtccgcaaaaacgcattccagcggtaccgaaaatggctgaacgggttaagttgcggtgcgccagcaaacatgaatccggagaagatccatcccaagatacttcattgagcaacgagcaaattaatctggtcgaacatttggtgtcggagctaaaggagcaaaatctatatatggagaactttatggagcccctacatttgagcaaagacttggagcgactgcaacgacgtgttgaacaattggagatgcgaaacaccatgctggcactgacgctagacgaatgcaaggagcacactgagcatctgtatctgctatgcggaaagtacgagtccaatgcggttgctcttcagttggcgcttaattgcagtgatcgcgccatcgaggcctacgacgtaatgttggctctgctcgaaagcaagttggcactgctgggggagaaatcagtggcagcggaagagagtcgacgatcggtggaggcggtggccaggcacctgctagcccgtttggatagcgagaaaaacgtttgtgagaacagcctgggaccgtggcaacacaacatcaacctgggcccagaggatgccccaaaaactggccgcccgtggtgtgccgacgacgacaaccgcctgcgttaccacgtctccaagctgaagggacgtcgttccaatgtccagcataccattgtcagtttggaatcacccttcagcgacatatacgaaagaaagcgcctggctttggaaaaggagcacgaacttcggagcgcggacaagaagtcacccattgacttggagacagcagtgattatgcaagaaatactcgagctgcgggattcgaatttgcagctgaagacaaaaatggaagaggccgagcaggaacggcagaacgccaacgaacgagtgggcatactccacgaagccctaaagcagctacaggcaaacaaccgggtctcgtattcggaggcggagcatgcggctctcacagagcagcagttggtggaggccttaactcgagaaacggagctcaagggtcgcatacagacgctattggcaaatgtaacagcttcgcagaaggccttcgacgaaaaatacgagcaactgcatcagaacgtgcgtgaactgcagaaatccaaccacaatctgggccaaatgttagatcacaccaagcgcaagtaccagctgcgggtgaggaagctagagcagaagattgttgacctgcggctggactacgagcaaggccataaccatgttcctgagactactctgtaggaaacgcatgacgaccttccaggaggactgagcaactgggcgtggagcgggcgcgcttgtcacatatcccgcaaaagatctttccctctcgatcatatcgcttattttacctttaatgcaatgaccacccgcccagcagtcgccgtggatccgccatgaccaagacagtatcacgaatgtgccatgcgacttaattgcagtcggctggggcttgggcggtgtccctgcctcgcagataaggctgcagtaactacatactcaaatacatacatattcagaggtgccatgagcaaggctccaccaacctatccatagatccgtgggattggagcatccgtctatgggccacaagcaattacatatacacacatacgaatagacaaactaaggagttattcaagacgcatacacgggatcctatatttatacaatgtattcgcattttgcttgttatatgattcaatatgtatttaaaactgtacaaaatataaaacgtctactaaaactcg

SEQ ID NO: 13143 - protein, 630 aa, DROSOPHILA
MAHPLARRPINVEQLSVQQLENRVRDLTQRLQQAERQLTESNTEREICHKRLEVVSQAHECRITEMHCVIAELSKKLRSKQDHVIMEEQEPDGSELSFQEGSVYNSELNLTNPDAECQTEPLEDFEGACSTTSVGNVAHKPPELSHKGQVEALQEEVLHLRARIALLQSEISTKDAAVVEEQTKVAFDCESEVNECGQRLNDLNVCTSLTSPQKRIPAVPKMAERVKLRCASKHESGEDPSQDTSLSNEQINLVEHLVSELKEQNLYMENFMEPLHLSKDLERLQRRVEQLEMRNTMLALTLDECKEHTEHLYLLCGKYESNAVALQLALNCSDRAIEAYDVMLALLESKLALLGEKSVAAEESRRSVEAVARHLLARLDSEKNVCENSLGPWQHNINLGPEDAPKTGRPWCADDDNRLRYHVSKLKGRRSNVQHTIVSLESPFSDIYERKRLALEKEHELRSADKKSPIDLETAVIMQEILELRDSNLQLKTKMEEAEQERQNANERVGILHEALKQLQANNRVSYSEAEHAALTEQQLVEALTRETELKGRIQTLLANVTASQKAFDEKYEQLHQNVRELQKSNHNLGQMLDHTKRKYQLRVRKLEQKIVDLRLDYEQGHNHVPETTL

SEQ ID NO: 13144 - DNA, 11227 bp, DROSOPHILA
caagtggaaaggcgccgaggaaaagcgtgaaaattgataataaacgcacttcgcacgtacgcacactttcgcacgagcatttagagggtgtggtcgcataggacacttctagtcacatttattgccagcttttattttatgcttttgatttatcgtgcggcttttacacttaagaaatctttggaaagaaaagttttcggtcagctacagaattgaaatcattcaccattctgcagacaatgaacgatgacatacttttaggcccagtccataaataattcgcaatccaaagcaatataaagatgtacttgatcataatctgatgaccatattcaatccgttacattttctaacttagaatcctttggtgattttatgattaatgtgcaccactcccttctgcactccatccatcttctcagttagctctctggacattgaccaattgccgagccattaattccccttctataaaagcacttgtcgtcttaagtgtccttgcggattgctactgttccggccattccaccctcttcttatctagttaattgcatttttatttgcctgttgcgcgaaaacaaaaccaaaaaaaagaaacacaagtggaatggattttgtggcgctttaagtaaataatacagtttttattacctccatcgaattgtacagataacgcgagtcagcttaagtacttagcactcgacgcaattagtcgtatgttttgtaataataaaaacttaagagctaagcgtaagctgtaatttttttttttgttcacaagaatcaacagaataggtctagcttaagcaaacattgcgatcggaatcaattaacatttaacatttcaaccaagcgacttaaagtgtatatagtacaacagagtatttttcctacataattaagcctaccaaattgcacactagcacacaagccctaaaaactacgactacaactagtctaattggccacgctaacaaacagtgattgggtttggctgccattacgcatcgtagatctgaagattgtcaaagtcatcgagcgtgtcctccgaccccgaagtggtcaagtccgacagctcatcaaggcacttctgccgcttgcggacattccagtgcagaccctcggccagggagtcaaaccaatcggagatttggtcctgggagcaaatgctgggcacgggatagattgaggtggtcactcgcaggctgtccccatggttcagctcctggtcgttgcgtccgtcgaaggaaacgcgtgaggtgttgcggctatcaggtgaaattgatatctgcaaggtcaagggaaatctgttagttgtcgtgctattaatcgcgatctagacagccaaagtccgcataaactttgttgtcataaaaagttgcttaattgaaatataaaatttgtaaagtggcggatttaattataagcaaactcacctttagctccactccggcgggcaccacaatgggcctgaagctcagcgagtgcgggcaaatgggcgtcaccaaaatggccggcacggagggatggatcatggaggcaccggctgctgccgcatatgctgtacttcccgtgggcgtcgatacgatcaggccatcgccctgcaccgacgtaatgtatttgccctccaagaagatatcaatgttgctcaggtacggcgagggtcctcggttgatgaccacctcgttaagcaccaggatgctattgttgtggccattgttattattgctgccagcttttcctgtttgtccgttgttaagctccacgtagttgagctgcctttggaaactcggtatcaggagattaccacccaccgagtgcagaagcgattccttgcggcgttcgcccttgcggtggatggagcagcgcaggcgactacgtagcgttagggcagcatgaccctccaggacattggtcacctgttcctggaagttgtcgcactggaagggcgtaagaaacccaagggagcccagatagaaggccatcaccggtgggacagattgctggaacagctgtgaggcgtacagcagagtgccatcgcctcccaggcagacgataaagtcaatccgatcggtcaggtcatcgcggccatctctgcggattcggaaagggaatttataagcttaattcttcctagaaaactactctcatttgctggtgcaatgaaaagtaacttaaaaaactctcattagctacgtaattgtactcacttaaaggtcactagcttttcacggagatccaggaaacgcgctcttactccggcgtactgttgatgcactttttggaacttggagctctcctgctccagcttaacatcatcccgtagcagcttgtcctctaagacggctgactccacccagacgaccatgtgcttctcctgcaccagccactccaccagctgaacgaagggcggcaggacctgtgagtccttctttttgatcacgagtacggtgagaggtggcttgtaccaggtcaaacgctgactggccggatcctgaatctgcatcaccatggcggagttcttcataatgcgaccacatggcccgaaatgctggaatggcgacggagcattcagacttctagtgcgcctggaaatattaaaagagaagaatcacattagagatcagatacacaaagaagttttgccattacgagtacacctcaaaatacgcggatcgggcgccactggggtcacctgttgctcctcagtttcggaaatctggcgctgcatggccgaagctagtcttaacttttggtgctgcataacgccaaattcttagctaatttcgatggtcacgccctttttattatcggtttatagacaggtacgtagtgctcaacacacaaacttgttgggaattccgatgcgagcgcgactgctgctcgttcgaaggttacaaaatcactgacaggccaatttggtgttcgaaaacacaaaataaaggtatgtgtataacgaatttatatttttgttttcattacaacaacacgtagcagcgcaaataaacttgttgattctgcggcccaaacaaacaggaattgcacatgccaacagagagcggaagagcgcgaaagagaacccaaagagagcggaaatggaagtggtggagcaagagcaatgctcagattctgctattgaactttgtgcgtgcgagtgtgtgagtgtgagtgtgtgggggtgctgctaacgggtttgattgatgtgctaattcacagtgactcagcacaaagagactcaaagatatcagagagagtagagtaaaccaatgagcggtgagatagagatagactgacaggaactggaccactgcaccatgggcgctgtggatgctgaacagtgggatgcatcgggttccgaaatttaattaattaatatttgtatttatgcaaattggaagagataattgctctagctacacttaatatattgtgcaaatgtatataatcgctggtttccatcacggcattagttattaacattaaaatatatgaataaaataaaatcgatactgaatttctttttccataaatcatgcgttctgatctttagaaagcatcaaaaagcaccaaacagtaaggtaagataacgcaaagtgctaatactatattttaaacacgttttaatatattgatacagtccacatcatttttcatcaataacataatttaatcgcattgcacttttttcatcaatcaatcacggacatagtgccattgtgattataaaaatacgaactgactcacttaaagacaaagcacaaccgacaaaaaacttgggcgaaaggagcccgtcaaggaaattacgttaagatgacgcatacgttctgaggcaggaggatgtgatgacagaaggtgatcttgtttctccaacgactcaatcatgataacgacttctgaggaaatgcacattcatttcttaacttacgcgacttgcttcgcagtaaatgctcgttaaacgcacgcgttcttttgctactagacacagactaaacttaatttccaggtgagagtatcgatcggcacaagaagaaacctaattgcccatggaacgtcagcatgacaatgttttaaatttcgttaaatcactggcatatcgcaagcgctaagtccggttcattttcaatttcccgagggctttaatgaggggtctactacatgtacatacatatgtatgtataatcgatttaccgtccagacaagccatgcaaatgcggttaaagccacctgacctgcacacctttggatttcggcacggcgaatcggtcacgagcgactgtcaatccgatttcgtatgtttgtctgtctgtctacctgttgctcttggtttatgaccggcgccgagcacaaactggcaccgatttcgaatctaactggcatctcaagttcttcgaaacaaactgtaaaaaaatagtagctgtcaaagagaaaaaaaacctacacataaattaacagacggcgccaacgtagtaccaatgattgaggtgttaacaaactcgtttttaagtggccaaaaaaatggaaatatgaaaacacgcagcagcaaacgctgaactatgcagaaaggtcaaggacttgtttacctgaatgaattaactaaaaaataaaaaaaaattcagcccaaaggagcttatttactgataacttgcttgcttaatcatgctgatggcgaaatatcagttgtgaaattgatacaaagttcgatgtgtactattaaccgatttgatctgtgtaaacaataaacgcctaaatgcacaccacacttctcacacctgataagcaccaacaaaatggtaaacacttgattacggagctacacttcttatcgcggacatgccgctaacaaatgctgccacgacctgataactttcagacaaaccccactgagcaaaaatacgtcatctatgattaattatttataattttttgttctttttcttattattggttgctttctgactttcaataatttgtttatatcgaaaataatttgttgactgagagttatttctagaactcaaggtctagttgttagtaattaaatgtatatattttaagacttcattatgaaaatatataaaaaattcaaggtcatggagtaaaacaaaatatcttgggtgaatattacttggcttttaagttagctcataccaataaaaaaagtttcactttgttaaacaaatattcttggtggattgcaaacattcttttagctttcatacgtttctattcttaagctaatttggcttttgggcatgagcattcaaagtccatcacttttttatttaaattgtgaatcattttcccatagttttatctagttcataactattctttctgtcttttgcttatcaggattttttcggggttgccgtgaactgtgattagttgggattacttacggccaagtgccactacgcgtgcgtcgtgtcgtggaatcgaagtagccgtcatccggatcctgttcggatttggcctgaatgtttcctggactggtggccacacaatcatcagtggatgcttgatccttggcccttgtgctggccctattggccgtgtgttggatgattctctgtcgctttagcgacgcattgtggcgcacgaggagatcattgtactgggtctgctgatggccagtgccactccaagccagcttgtagctgaagatctcctccaggcgatgctggtgcagggtggccaggtcaatgtccgacaggcacgtcatgttcaagtcttttgattgctaattatgaaatatcactcaaaatgttcacaggtgattcgcgttgctaaaacattttgccactataaatttggattggaaaattcagcttaacatttcgcttggcatttcttggaagctcacacccttgaaatggccctgattttgagccaatggtaaaatagacgagttaaccttgctcccttttgctggaggtgttaacaaagctaacattttttgtaacaaaagaatgcaatacatttttgtgggatataaaaacggtaactgctttggcgcgtggtaaaagtttataaacaaaaacgatcagttttttttgtattttggggggaattttcgtatttgaaccggttttgtgtttcttgtgaaatttgtgcaaaataaatttgttataagcaatcgaatagtttgttttggttgcttttttatttttgtccaacctaacggaccagcaacgtagttccggctttgacgaaagagccatacaaatcgagggagatgcgagtcattaggagatggctagaaaggagcgacacaaggcctcatatgcgtcattagtcagcttccgtcagcggggaatttggggtggtttagcggtatttggacttggccaacttttatcgcctgctttagccagcaccacgacataacgatgtcaagtataaatcaattggcaagaaatccgctggcaaagcggcacgaaaaaataactcggacgtactaaacacagttagctttataacgagaaatataattaaatctttttcgttcgtgatcgcgtttgcgttttggtcaacaacctttgagcaagccaaaaatcgaaaaaaaaacgtccacttggaccacaattaaacagtcttctctgcagctcttttgaaaacaacaacccacttgggcataacagtatcgccagccattaatctagaaatcgtgacctgtgtgtgcgatcagcttgaagttccccatcatttcggtttctttccgaaagtgccccatcagcagttcattaacagaggtcgtcccaagattctgttgagtggcctgataagatggaggccttaacagactggggaagtacctgtggaggaggtcttcttgaagcttggatccttgctgaattagcaggagtacagagagaacatgggaaatagattcttcaactgattttatcaagaattgcaactattatttgaggggcgtatttgttattaagctgcacaacaatccaatcatctcttcccagtcgtttcaatcgagtgatcactcgcttttggaattctaattaactatatagttattatattgcataaccaaaatgttagcatcgcgtgatccaaagcccgcccgctcttctatttttacccagatcaggaagcaacaagtaagcacaagtcattgaaacgcttctgtaaatcaaacaaacaaacaaaggaaggcacaagccaccagtcgctatatagccagttacatccgtagtaatcggactatgacaatagagcgaattgtaaatgacttatggacatgagttatacaaagaaaactgaaacaaaataggcggcgagcacaaattaattaatcaataaacggacgaagcgagcagcgctaaatgcgcagcggcatcgactaagtgcagcgattatcattgaatggatcggcaagtggacaagggaactgcacctacgaatttgtgtaaccacttggccacaacgtgcccacatgtcagcacgggttttgccatgatatacataattcaaatgacgcctttcgttatgaattcataggttccaaagttgcaaatgcaggtactaacgctgaactttcatagtacacgtgcaacctttgtttttattattaaaatgtaatcagtgggaaattgctttgcatagattattaaacaattaacaagcaattttcactttaaaaataatacatcgagctatggaccgggcttagtccatggctatcttaagtagtaataaactacaatattgacgctttgatttatataatttatatattccaaaaatgtactatatttataactaatttgtttgaattattttatgaagcgcccagctaatacagtgaatacattgctttactttcagttgtgtgttcaaactttgtgctagtttagtttgaataaataattaaccccctttgggtttatttattctggccagcaacattgctttattgtttatttaagtgagtcaaagaatgtgacagtccaactaggttactaaattctttatgatctgtagtagattggactctttagaataaagaattatgatcttttacacaaatttggctttaattaagttcaagcataagtttttaaataagtgcacgattcaaggtagcaacatttaacgatagcaacttattagaggtgataagctcttattaagcaactaaactgagaacccgacttgtataatttgacctccagttcttgagtggattctacagattgagctgagtttaatgcagaaccatctagcaaagtctgcaagaagttggagtgtatctgcaatatctagtctctgtagttagatggattgctagccagctggctgcagaccgtagaaggaaatcgaaagtgggcttgcggctcggagcccagaaatgccaagtcatgtgtgcgctagaaaacagcgttaacgttaacgttaacgttaactagtggcatgccaacaaagtgctctaattacacgttatataatctgttttattttctccttagcactagctcgagccaaggcgaagcttccagcattccggcggcttaaacatttaaactgaccagcgatcgacggcaagcgggtaaggtaggtaaacgaccgagtcgaaaagcgagcaacaaaacaacgttccacgatcgacaggtgagtttcagtttgagagcgaacacgaccgtgctgtccggtgaatatgcgataactgagctgcgacgccgaaaaggtgattaagttggacgatttgtgcgcgattccgattcgaaaataaaagtacgcgagccgagcgattgtaaacaatgaacggccagatcgtttggcgggtttttgccggacatcgctggttggaaatcagctgagcgcagccacgcgtcatgcatatgtatgtatgctttagagcaacaggtgctctcactgttatgtaaatgtaatcagcggccagtggctgtttaattgctgctatcaaaatcccacaaaaatatgattgatgcatgcagtcagcgggtaattccgttttatagcgccataagaacaatctaagcacgaaattattacttttcgaaaagctggcataacaaaatgtacagccctgttaacagaggctttaagcctataatttccgacactcaaaggaaaaaatcggaaattaagtgcagaaaatcgattttagtggcctgcatctggcacatgtcacacattcgtcacacgtgttaacagtagttaaaattcgcagaaaattacgaacccaaacaacatgtgtgggccactcgagaggcaagcattttcccgccagctctaattgattgccaacaattcactatatactgtatgtacatagtgtacgtaggtggtacatttcctttgctgtgaaaaacagggctgtacttatttgataacaattcaaatttcgtctccgttcgtacttaagttttgttttttttaaaccaaacctctaatctcgagacaggttaaaaggaatgtctgaaatgaaatgtgatggttcagcaactggaaaagaattgtattccatttatgtttaagacattatgtttcttatatagttgtcaaaacaaatgattttaaagaactagcaataactaaaacatctgttataataaccgttttttagacggatcgataaagcaaatgcaaatataaactgcaacagcctaacagctgatcacgaaacagctgatcctcagctagcaaaaaaaaggccagatctggcgtgaaaccgcaatcaggtgttgtcatcactttgaaccgcccacttaccaccacatacgcatctggaggtcatcgctggcagtgccgttattcaggtcaggacccggtgctgatgatgctgcagtgcctccttgtccctgtcgtatgctgttcacatggagcagctgattgtcgtggtcgtcgtagtaggatccattgcactgggaggccgacttcggcaccgtttgcgcggccgacggggtggtcgttggggctgggttaaccgttatggagctagaggacttcattgttttggccacctgcttgtagctgtatgtgtgtatatctgtgactgcgcacctatgtgtgcgccaatgtgagtgatgtgttgtgttggcctcaacttgacccactaacgcgttgcacctgccgacgacacccactttcgatggacaacttcccgattttgggctaggcggcgactagctcctgatttgcaatttcacgaacgcgagtttcaatgggtccatgttatttgtttttttcctgcaccaattcacgtctgtgtggcagttgtgcgcgtagcaaaaaatacccatatcagcagttatcaccgtatggtcacactaaggcgcgagagtttaaattggtctttcgcttattatcagatttgtttataaaaaataaacagcaagtgttgttgggttttcaagtttactggcttatatgtttaaataataggtataccaatgatttgcttggcaaccgaaataaaaccatctaggttcgtacaattaaagtatttgagttacactgaatataaaaaaatgaaaagcttcctaaaactatatacaaaacttaatttttcttgttcattagcacttcataaaagtattcttaagttattttaaaaactttttttcatttaaagacattacacctctactcaagtttaaaattgaaaaatgcctggcacttcaaggacatttttcgctacaacttaccgaaactgagttcgcttttccagcaaactgattggcagtgctttccttagcggagctggcgaactcccaggcgtagaggcgtctccattggccatttcacgcgcccgctgcatatcttcgggattcatttcgaacttaattacaaccgttcgctggcaacgttcgccatcaactacgctcagattttatgcagttcacacgaccagataggcacgcatcgcacacctgccgcacgcacacgcaaaaaaaaaaaaaaacggcgagcacaccttgagttcggcgggcaaaaaaggcgaaaacatgcggctaaaacacgatcgcgcgcattaacacaatggcacaagattttagccgcgtaatgaacatggctcgtaccgcctgagggcgcaaaacatatagcctcagcatcggcgatagcaacatacactttcgattcgcacccaaatcgatgcaaactaatgctttctgacaggcccaagtgcgtggcaaccacgtgaatccaatccaatccaatccgattccgattcgattggatccaa

SEQ ID NO: 13145 - DNA, 1798 bp, DROSOPHILA
aaaaacaaataacatggacccattgaaactcgcgttcgtgaaattgcaaatcaggagctagtcgccgcctagcccaaaatcgggaagttgtccatcgaaagtgggtgtcgtcggcaggtgcaacgcgttagtgggtcaagttgaggccaacacaacacatcactcacattggcgcacacataggtgcgcagtcacagatatacacacatacagctacaagcaggtggccaaaacaatgaagtcctctagctccataacggttaacccagccccaacgaccaccccgtcggccgcgcaaacggtgccgaagtcggcctcccagtgcaatggatcctactacgacgaccacgacaatcagctgctccatgtgaacagcatacgacagggacaaggaggcactgcagcatcatcagcaccgggtcctgacctgaataacggcactgccagcgatgacctccagatgcgtatgtggtggcgcactagaagtctgaatgctccgtcgccattccagcatttcgggccatgtggtcgcattatgaagaactccgccatggtgatgcagattcaggatccggccagtcagcgtttgacctggtacaagccacctctcaccgtactcgtgatcaaaaagaaggactcacaggtcctgccgcccttcgttcagctggtggagtggctggtgcaggagaagcacatggtcgtctgggtggagtcagccgtcttagaggacaagctgctacgggatgatgttaagctggagcaggagagctccaagttccaaaaagtgcatcaacagtacgccggagtaagagcgcgtttcctggatctccgtgaaaagctagtgacctttaaagatggccgcgatgacctgaccgatcggattgactttatcgtctgcctgggaggcgatggcactctgctgtacgcctcacagctgttccagcaatctgtcccaccggtgatggccttctatctgggctcccttgggtttcttacgcccttccagtgcgacaacttccaggaacaggtgaccaatgtcctggagggtcatgctgccctaacgctacgtagtcgcctgcgctgctccatccaccgcaagggcgaacgccgcaaggaatcgcttctgcactcggtgggtggtaatctcctgataccgagtttccaaaggcagctcaactacgtggagcttaacaacggacaaacaggaaaagctggcagcaataataacaatggccacaacaatagcatcctggtgcttaacgaggtggtcatcaaccgaggaccctcgccgtacctgagcaacattgatatcttcttggagggcaaatacattacgtcggtgcagggcgatggcctgatcgtatcgacgcccacgggaagtacagcatatgcggcagcagccggtgcctccatgatccatccctccgtgccggccattttggtgacgcccatttgcccgcactcgctgagcttcaggcccattgtggtgcccgccggagtggagctaaagatatcaatttcacctgatagccgcaacacctcacgcgtttccttcgacggacgcaacgaccaggagctgaaccatggggacagcctgcgagtgaccacctcaatctatcccgtgcccagcatttgctcccaggaccaaatctccgattggtttgactccctggccgagggtctgcactggaatgtccgcaagcggcagaagtgccttgatgagctgtcggacttgaccacttcggggtcggaggacacgctcgatgactttgacaatcttcagatctacgatgcgtaa

SEQ ID NO: 13146 - protein, 520 aa, DROSOPHILA
MKSSSSITVNPAPTTTPSAAQTVPKSASQCNGSYYDDHDNQLLHVNSIRQGQGGTAASSAPGPDLNNGTASDDLQMRMWWRTRSLNAPSPFQHFGPCGRIMKNSAMVMQIQDPASQRLTWYKPPLTVLVIKKKDSQVLPPFVQLVEWLVQEKHMVVWVESAVLEDKLLRDDVKLEQESSKFQKVHQQYAGVRARFLDLREKLVTFKDGRDDLTDRIDFIVCLGGDGTLLYASQLFQQSVPPVMAFYLGSLGFLTPFQCDNFQEQVTNVLEGHAALTLRSRLRCSIHRKGERRKESLLHSVGGNLLIPSFQRQLNYVELNNGQTGKAGSNNNNGHNNSILVLNEVVINRGPSPYLSNIDIFLEGKYITSVQGDGLIVSTPTGSTAYAAAAGASMIHPSVPAILVTPICPHSLSFRPIVVPAGVELKISISPDSRNTSRVSFDGRNDQELNHGDSLRVTTSIYPVPSICSQDQISDWFDSLAEGLHWNVRKRQKCLDELSDLTTSGSEDTLDDFDNLQIYDA

SEQ ID NO: 13147 - DNA, 5465 bp, DROSOPHILA
gtcacctccaacttgatctgaaatgcagtggagtcgtctatttcgatgggcctccggtgaaactcgtcctgggccgtgccccacttctccagggattcgcttatgcgcaaagtctctccaaagcagggctcgcaaatgcagtaattttcccccaggatagcagcctaaaatacgtgggtttctttgcatttgacatccattggactcactttcagaacttacatcaattttgtaccaatcgaaaagtctttgcagcagtttattggccgatttgaatttgggcttctcgagatcgatctcaattgctcggttatccttgcatagtttgcaaatttccgcttctgtcattttgctgatattttcgaggaggtccaaaaaccaagttaataaaaggcaagtaatcaatgatttcttcgatgtctgctaatcgatactatcgatagatgtttaatttatcgatacaatgcagagctgcttaatgtcgataggcaattgaattaatcgatttttaatttacggacttagaaatttatgcaaatctaaaaataaattaattttgattgatttgaatagagatagttgttcagatttaggagttaggtgaacgatctgagatcgaagtgaattttctaaagatgccgcctgcatattgaacggtataaaagctttcaatgtacacaaatttgcctaacatttgctaagagaaccggaaaatattgtttaatatcataatcgaacaaaaaccaatttacaagtttagactgtagttttttcattacctaaaaaagtatttgtgtaattatttgaatgttcgaaacccaaaacaagaaaatacaaataattatgaaaaaagtaagaagttgactaattgcaatataaatttaaaaattaaaaaatgttgtagtgaatccaggataccaggaaactagttccattcgcctccgataacttccgagtatcgataggctctatcggccatcagaatcgcgatctagttcggttcgcgtgcagcagaacgcaaagtacaacaggatttttttcgttccgtgtgacgtgaaaagtgcaaatagtaattgttcgaattagtttaagcctagctaactaactaaataaatagccatggtaggtagttgttgattgactgagataaaatgctgacgcagtgagcggtgtcagtgtgtatgcatgtgagccgcgcgttaactggtgtgtgtgtttttgtcgtggcaatgtgtgcgtgttaaaaaaagcggccgccgcgtcacaatacaaaattgtgcttcgatttttcctaattgcatttcgatttctccctatttccgtctatttcccggatcagtcgtttgcggaaaagataacgggtctgctggcacggccgaatcaacaagatccaattggaccggagcagccgtggtatctcaaatatggaagtcgattgctgggcattgtggccgccttctgtaagttgtaggatatataataaattatctactagcttaacacattaaaaagttgggaaaaacatccgtgacattgggcggcccaaaaatatgttgcatcgatttttgtgtaccaccctttgttgttgttgctgttatctattcgtaggtgtaggtgtgcagttgtgttcgtgtgtgtacgcacgctctctgacattgataaaggaaaaacaagagagggtgagtgagaggtgagaggcagtgagagcggagaaaggaaacatggaaaagacaacacaaaaaggatacacaaattcacacactgaaaaaaatactagttatgtatgtagctaaagtttatttttacatcaaaatcaaagaaatgtagggtaaagtgtgagatttccaaatgaattaagaatgaaacgtataattttaaggtaaaacaaagtccaaaaaaggtttttttttgttttgttattgaaatataaaataatacattcacccacttaactaagtgggcttcctgcacttaatatctcttatctaaccatttcgtttgataactttttatttcgtgtgtaggaaattgcaagtatgtataggagcttttctgtgtcaagtttggcgctctgctttttctttccgcatcgaatgtaattctctgtgcccattcaatcgaaattcgcactgccttttgttgtatcagcagcttccctctttccatctctatttttaactttgttttacccgtttgcgtatttgcttttttatctggactcagttaaccttaacccttaggctgccacacgtgttataagtgcaatatcgtaataagtctatgcgtatcttaaattcaattggggcatcttttttgtaatttcatcatcaccttctgaatgcataaaaaaatgcagttcaataaacttttaagtagtcgtgatctactttgattaagtccaagtcaatctttttaatcgcagttggggttttgattatgctattgggtttcgtgtcgttagaatacttacaaaaattattttaaaaatcaatctaaaccatacatatgtatataaatgaaaattccacagaaacaatatgcctcattgacatattattcctggaatttttagagatcaaccaaaggaatatttatttattcaaaacgtttttaacatcttttttttctctgtacaaaagcatcttttgttgttggatattctggcaatgattctcacttagtgaaatgcagaaattgcccaacaaatgaacaccatccacttaaaatcaatataaatagctgaatacctcaattaagggatcacaactcactcgtccggcttccacaatgaaccggttttgtttgcgtaaaataaaaccaaagtctatgattaataaataattttataagccgttccgtggagcacaacgacttcttccccaggttgggtcagtttgcctggctttaagaaccgcaataacctcaaaacccagatccgatttcgcaaaaggaaaaacctaacttgcgaagctaaatattaaaagtggcctaaatcgtgaaatcttttttattttattattcatgtatttagaattttagaattcaacctttcctcgtgatcttttgctgcatttataccagccacttttatccaattatcacgccccaggcatttgtttatctgcgaattatagtcgtatgtgctgtttactctttgtttatgcttttatcatagaccaaaagcagctgataaaatattttaatgtaattcacttgtacgcccctctagcgatatcgaatggaatttagtgaattctacctgtgaactgaactacttactatcaactaacaatttgcccaactgtttttcatgctgtttgtcacgcttctgtggctcgtttttgtttaaaaaatttttaaataaaagagaaggccataaaaagttagaaattggcacaatatgagtcagcgttgtagattagattgcgtttcctcgtttttaccatacggggcggttggcccgacataatgggtctagtgggagtatgatattggtatttttggtcagtgtttagcgataaagatatacgccttttattggaaattacaaaaatagcttgacctctgcatacattaaatacaacatatgataggaatgtaatttttttaaataataaaaaatcaatagaagttagcagtaagcagtaacttgagctacatggaaacagtagattgaggagcaaattcataatagccaaggaaaatattcattattagtagattataacattgcataactaacatcttttatcccatgttttccttccagttgccattcttttcggcctgtggaatgtgttctccatcatcacgctcagcgtatcctgcctggtggctggcatccttcaaatggtggcaggatttgtggtgatgctcttggaggctccctgctgtttcgtctgctttgggcaggtgaacgagatcgcggaaaaggtggaatctaagcccttgtacttccgtgccgggctctacattgcgtgagtaaccaaagaaatttgtcacaaattgtaatatttcctaaagattatgttttccatttcagcatggccattccgcccattattctgtgctttggactggccagcttattcggcagtgggctgatctttggcactggcgtggtttacggcatgatggcgttaggcaagaagtgagtatggggcacctcggaaaatcgcagttaaattcagaaaattgcagctatgccgcagaatttttaaaagaaatagctggattcaaatcaaactgcattgattaggcactcatgtgttcctaaaacattaatctgaatttaaaaaacaagctttatggtgaatttctgaatttaaagacgacttcgattattgggttagtttagttgctaagcgaacggaggagcgagcgatttagttagttttgctaagccatttttgctaatcgaaacaaaatgttttctctatattcccacgatgtgcttgccactgtgaaaacgcttaaataactataaactaacacgtagagcttctcgagaggacatggccgccgctgccacatcgcccacacagatggccggcagtcaggcgggcggtcagatgcagatgggcggcgatcagcatatcacactcatggaagaccccgatgtctggcgccccacataaattcctagccgcgccattagtaactgccaaaaaaccacactcagatacagataaagacacagatactcagatacacagattcacacacaaaatactccactagaaatgcgaacgatgcaagaattgatcgagtaacaaatattttacggcgcctagtttttagtgttcgttccgaggataaatgcaactaagtgaaaaggaaaatcactacaaagcagcattgtagggcatcagagaactagtatacagaacaccccaccaaatacaaaagaaaatttaacgaaattctcattactgttgaaaccgagagtgttagtaatcaaagtatattttgggcaaatgcatttccgtcattcgaccccccgttttgcatggcattcgtactatattcgtattcaaattttttaatatctttcgtcgagcggttggtgttgttaagaactacagttaaatatatataatatgcatagaacaactactgataacaataacgtaactcacatgtcaaactctgcagcaagcatatatttttagtgagaaactatatttgaaagctaaccgaatgcaagaggaaccggaacctataagttaaccacagcttccacacactcacacacagctaatgctaatggaaagccactgatgatatggacaagtgaatgtcgagaacctagagcaatatgtacaactcagaaataattaactttatatgctttgcttcgatgtaaaccataaaattaaatgttaaacgttatttgagaatcgatttgctcgcgggatagtcacaatttgaaattgaacataatcaagcatacagatagaatatat

SEQ ID NO: 13148 - DNA, 698 bp, DROSOPHILA
ttcgcgtgcagcagaacgcaaagtacaacaggatttttttcgttccgtgtgacgtgaaaagtgcaaatagtaattgttcgaattagtttaagcctagctaactaactaaataaatagccatgtcgtttgcggaaaagataacgggtctgctggcacggccgaatcaacaagatccaattggaccggagcagccgtggtatctcaaatatggaagtcgattgctgggcattgtggccgccttctttgccattcttttcggcctgtggaatgtgttctccatcatcacgctcagcgtatcctgcctggtggctggcatccttcaaatggtggcaggatttgtggtgatgctcttggaggctccctgctgtttcgtctgctttgggcaggtgaacgagatcgcggaaaaggtggaatctaagcccttgtacttccgtgccgggctctacattgccatggccattccgcccattattctgtgctttggactggccagcttattcggcagtgggctgatctttggcactggcgtggtttacggcatgatggcgttaggcaagaaagcttctcgagaggacatggccgccgctgccacatcgcccacacagatggccggcagtcaggcgggcggtcagatgcagatgggcggcgatcagcatatcacactcatggaagaccccgatgtctggcgccccacataa

SEQ ID NO: 13149 - protein, 192 aa, DROSOPHILA
MSFAEKITGLLARPNQQDPIGPEQPWYLKYGSRLLGIVAAFFAILFGLWNVFSIITLSVSCLVAGILQMVAGFVVMLLEAPCCFVCFGQVNEIAEKVESKPLYFRAGLYIAMAIPPIILCFGLASLFGSGLIFGTGVVYGMMALGKKASREDMAAAATSPTQMAGSQAGGQMQMGGDQHITLMEDPDVWRPT

SEQ ID NO: 13150 - DNA, 6340 bp, DROSOPHILA
ctctacaataaaaaatactcggtttaaaaaaaggcacacaaatcccttttgactcaccttccattttacaactgcatgtctgcagacgccttagtatcagtattaattccttgaccagcgatgccgcttcttcgcccgtttctaaatctggtgcaaaaaccagctccattagaggaagtccagcacgattaaggtcaaccaggctccttttgagataatcatcgtgcagagatttaccactatcctgttccaattgcaactgcagtagtttggcggtcttgtagtaaacttttttgcctggtgttatcacggggaaagtcatttttccatcattggccaaagcggcgcgctgctgcgtgatttggtagccattctggggaggagaagtttattacttataaggcttagcgtggtgtaaactgaaatttgaatcttacaggcaaatctgcatagaagtagtgcttgcggtcaaacatggacacttcgttcacccgacatcccaaagcaagtgatgtcttaatgccggattccacacattttctgttgagaacctaaaagcagaggatacaatgtaatgatggcgtcttaagtgagagtacctattctcactggcaatgttcccggtatggaggcatcaaaatacgccaccgaagagttaagtggtgctccaaaggatgtgccactgccggaaaacagtttggacgcactggcaatctgtgcgtgcacctccaaacccacaacgcttttccatttcctgaaattcagagcgttggaatgaatccttataatattaattcacataattaccttttgggaacgttggctagctttggcgccgttaccagttttcggattattgagtaatgcattattttacatcgattataacattcgcaccggaattggcaaaaagttgcgccaaaacagctgatgttgttttgattgcggccaaagctgccggacattcgccagcggcgttgccagacaaaaccatcgattggctggcgataacagcgcaagaggaatatcacaaaaaaataaccttttcattttcaagacaaacatgtaaaaaaatatgagtttagcagaggtaagcattttaaatgtgcactccacaaccgaaacaatagtgcagtgcatcgaacgcagtgggaatttcaatgccaacccttgttctccagttcacagcgaccaagacgagaaaaagcacacgcagctctgcaaaagacaaccacgacgacgagtgagtggagtagaaggaccaggagcggagtagcaggagcaggaacagtcgaccgagggcgggcggaaaaatcaatcatagcgacaggaaaccaataaagccgccgtcatggtgattgagaagatcattggtgacctggagtccaacatgacgctggagaacgaggaggccaagcgcaagcttgtggagttgctatcccagagtgagtcctcgccagtttcagttaatatgccacctattccaacataccatttccccacagacaaggagcagtgggtggtaaagttcatgctggactacttctttacaactggatctcagcgcattttggaggtactggtcaaagcccaggcacctcacgatgggtacatctttgacaagctggacgactgcctaaagcagtcgcagcaccgagtgcagagcctccaggtgttctgcttcattgtgcgccatcaccctacttggctgtacaagatcgagaaacaccggctgatcaaaagtgtttttaagcttatgacggtgagtttatgggtgtttacaattttgtccgagttcagcatcacttccatttctctgacagcacgagaaggagatagttccgctgatgagcgccctgttgtgcataattactctgctgccgatcataccgaattctgtgcccaactttcttaacgatctgtttgaggtgttcgggcatttggcctcgtggaagctgcagaatagcaataaactgccggacgagaagctcgtccacctgcagttgggtctacagatgctatttcaccgcctgtacggcatgtatccgtgcagctttattgcctatttagtggagttcatcaagcgaggcaacggcgggggcatcttccagcatacaatcaagccgctgttgaacactgtgcgagtgcatcccatgctggtgacggccacgccagagactgaggtaaacaatacgcgatggaaggagatggagccgcatgacgtggttatggagtgcgccaacctatcgctgcccgtcctcttgcccgagacgagcaacgaagacggcagctatgcgtatcccatgacgccaggatacagtcgcatgacttcaaatacctcgaatacggactacagctatcagctgagggagtttcagcaatcgagaaatgtctacacccgcttcgattcgtttgcctcgggtgatgatgtgggtccgatctggagtccgcataacgagattgccacgaccagtagcggcataccgcttacacccaccacatcgtttattttgccactacaaccggctatgaactctcagcttatggttggcatgactggctcctcaccgcccgaagcagctgtggaggccacaccggaaaccacccccttaaaggatatgagggatatcaagcagccgggacgtgcggtcaattcgcatgctgtgagagctatcttcgccgtaagccagccttcttcacccatgcgcaaggaccagcagagtcagttcagtttcccggatgtctctcgcgaggcggaggagagcagccactcatatctggaggtcaacagaggaactgcctatgaccgtcgcctgtcgcaggtcatccaggacaggcataacgtggagcgatctgtaaacacaccttgtccaagcagcctgccagaaattaactccgatttatcccttgttggtggttccgtctatccatctgtcacgcaggaggtcgctgcagtttgtggcgagtgcaacgagacggataggaacctctgcagtgtgggtggacttcatatgcccaccagccgatccatgcaccagctggcaaagaagcgccgcaatcgtatggcaagctacagtggaaatggttcctgtgcggacagcagaagttcggcggcaaagaaggcaagttggagtactgaggcagagaacccaatgcgacgaaccaaatcctgctcggccctttccggaatgcggcagcagcatctggaggagaatgatgacgaggccgattgttcgagccaaagacaaagaggggagaatggaaatacgcaaaagactggcagccgcctgcagaggagcggccggaacctggccatttcggcgcccaaggatacggctagaagctgcacccatgcctccacccagacggtggaaggactggacagtgctccagcgcagtacgagaattggcttattgaactcctgctggagtgcaaggagcaaagaatcgactatgaaaggaaccttctgtacccgcaagatattctagacgaatacattaagcatgcgatcaaggccaatgagtcctttgacgccgagcagggtcaactgatgtgcctacagctggaatacgaaagctaccgtcgatccattcacgcagagcgcaatcgacgactcatggggcgaagcagggacaagcgcagcctggaaatggagcgggatcggttaagggagcagcttaagaacttcgatgcgaagaacaaggatctggcaaacaaaatggatcaggccattcggttggccaacgagcgccagaacatccaccaggaggagctgggcgaaatgagggctaagtaccagcacgaactggaggaaaagaagtgcctgcggcaggcaaacgatgacctgcagacgcgactcaccagcgagttggcgcgccacaaggagatgaactatgaactggagtctctgcgaggtcaggtcttcagtttgggaaccgagcttcaacacacccagcagcaggcggacattgggctgcagtgcaagcaggagctggcacgactggaggccgagtttattatcatgggtgaggtgcaagtgcgttgccgcgaccgtctggctgagatcgataacttcagggcccgcgacgaggaactgcagatgctacaagagagcagcaacctggaactgaagggtgcctattcattgtttatatgatacggatgtttaatcattcagtttatttattaagatctgaggcacagcctggacgagaagacatcacagctggaaagcatgaagcacaagatcagcgacctgcaggcccagctagccaacagcgagaaggccatgacggagcaaaagcgacttctaagcaccgtcaaggatgagtacgaagaaaagtttaaggtagggctgatatttaaaatcgtatacttatctgaaatagttcggacttttaagaaatagtctgtgtttaccagtaacttcatttcaattaagagtaataagccttaaaaatcgtcgtccttgcagtccgtgaacaagaagtatgacgtgcaaaagaagataattatgcagatggaggagaagctgatgatgatgatgcagcagccgcaaggaacaacaggtcataacacctgttccccggacacggacagaactggtgagtgcaagagctgcttcgcagctaaagaatacttactattgcattctcccacagacatagcttcatccattgaacgcaactcaccgctatccacgtcgctggcctcgagcgagagcttatccgccagcctacgctccacggagctgaagaacctgcaccagctagtggacacgcccactattccggatgtgctgaacagcatggccggtggcgctcagttcgaggacgaagtgcgtccgccggccgtggatctggcctcctcggcaagcaccgccagtgccatcaacatcgtgccgcacgccttggacttgccgtcgacctccggcggcatcggtcacacgctcacccacccacatccgcatccgcacctgcacctgcagcaacagcaacaggatcaactgcagtagtagcagcagacgcagtttgtaaaaacaaataagaactagctttccttcgctaaacaaatgtctattgggaaaacccgcacagaaaatttacaaaaaaaagttattggttcttcatattttcatattcagttcaaaactgtaactaaggtttaataaatcgctgactccacgcaataattataaaggttataaaaaatattaatgtttgaaattttaacttgtttagcacattgcaatttgttgtaaaaaagtggttttgatacgaggcaataagtaagacgcgcattcatattataataaacatttgattaagatcagcaaacataaaagcattgttttattttatttaattgtaaacatactatttgttatataacaaccgccaaacatttaaattttagctaagagagcaaacaaaaacgtaaacaaaccgagcgacattgccagctgaaagaaagtgagaagtgtggcaaccttaaacgaaacagctgagcggaagcaacaataatatagaaagaagaagcagaaaagaaacgcctattaaatcagatcatttaaatacgaaaacttaataatacattaaaatgctatcccaatacatggaggagtttgaacaggtgggctcaaaggtcacgtaggcccgattatggcttatatttattaatcataaccaacaggaaccctttgaggtgggcgagttcatagagcgtctgacttggcgcaccaacaatgaactccagaacagcgaggactttcatcctgtggccctccacgataccttcatccagaccattaaggacctaaagatcctgcaggagaagcaacaaagcaagtgcgaacggctagaggagtcactgcgccaggagaaggagtcgcacgccaaaaagattgccaagctccaagaacgccaccaaacggccattgatgtgttcggccagctggacgaaaaaatcaattcggtggccggcaagatcatgcacctgggcgaacagttggagaatgtgaacactccacgcagtcgttcagtggaggcccagaagttactcaattttatgtccgagtttttagccgctggccctgtgattgtcaacgatatttttgcggatgccgcaagattaagtgaggccgcagatgtgatacaaaagctctacgctatctcgcaggatctgccgcccggaaactttgcggaatccaaaagaaaaatcgaaaagaaatacgatgaagtcgagcggcggttgatcgaagagtttgccaccgcccagaagagcgaggacatcgagcgcatgaagacactggcccagatcttgtcccagttcaagggttac

SEQ ID NO: 13151 - DNA, 3888 bp, DROSOPHILA
gctggcgataacagcgcaagaggaatatcacaaaaaaataaccttttcattttcaagacaaacatgtaaaaaaatatgagtttagcagagttcacagcgaccaagacgagaaaaagcacacgcagctctgcaaaagacaaccacgacgacgagtgagtggagtagaaggaccaggagcggagtagcaggagcaggaacagtcgaccgagggcgggcggaaaaatcaatcatagcgacaggaaaccaataaagccgccgtcatggtgattgagaagatcattggtgacctggagtccaacatgacgctggagaacgaggaggccaagcgcaagcttgtggagttgctatcccagaacaaggagcagtgggtggtaaagttcatgctggactacttctttacaactggatctcagcgcattttggaggtactggtcaaagcccaggcacctcacgatgggtacatctttgacaagctggacgactgcctaaagcagtcgcagcaccgagtgcagagcctccaggtgttctgcttcattgtgcgccatcaccctacttggctgtacaagatcgagaaacaccggctgatcaaaagtgtttttaagcttatgacgcacgagaaggagatagttccgctgatgagcgccctgttgtgcataattactctgctgccgatcataccgaattctgtgcccaactttcttaacgatctgtttgaggtgttcgggcatttggcctcgtggaagctgcagaatagcaataaactgccggacgagaagctcgtccacctgcagttgggtctacagatgctatttcaccgcctgtacggcatgtatccgtgcagctttattgcctatttagtggagttcatcaagcgaggcaacggcgggggcatcttccagcatacaatcaagccgctgttgaacactgtgcgagtgcatcccatgctggtgacggccacgccagagactgaggtaaacaatacgcgatggaaggagatggagccgcatgacgtggttatggagtgcgccaacctatcgctgcccgtcctcttgcccgagacgagcaacgaagacggcagctatgcgtatcccatgacgccaggatacagtcgcatgacttcaaatacctcgaatacggactacagctatcagctgagggagtttcagcaatcgagaaatgtctacacccgcttcgattcgtttgcctcgggtgatgatgtgggtccgatctggagtccgcataacgagattgccacgaccagtagcggcataccgcttacacccaccacatcgtttattttgccactacaaccggctatgaactctcagcttatggttggcatgactggctcctcaccgcccgaagcagctgtggaggccacaccggaaaccacccccttaaaggatatgagggatatcaagcagccgggacgtgcggtcaattcgcatgctgtgagagctatcttcgccgtaagccagccttcttcacccatgcgcaaggaccagcagagtcagttcagtttcccggatgtctctcgcgaggcggaggagagcagccactcatatctggaggtcaacagaggaactgcctatgaccgtcgcctgtcgcaggtcatccaggacaggcataacgtggagcgatctgtaaacacaccttgtccaagcagcctgccagaaattaactccgatttatcccttgttggtggttccgtctatccatctgtcacgcaggaggtcgctgcagtttgtggcgagtgcaacgagacggataggaacctctgcagtgtgggtggacttcatatgcccaccagccgatccatgcaccagctggcaaagaagcgccgcaatcgtatggcaagctacagtggaaatggttcctgtgcggacagcagaagttcggcggcaaagaaggcaagttggagtactgaggcagagaacccaatgcgacgaaccaaatcctgctcggccctttccggaatgcggcagcagcatctggaggagaatgatgacgaggccgattgttcgagccaaagacaaagaggggagaatggaaatacgcaaaagactggcagccgcctgcagaggagcggccggaacctggccatttcggcgcccaaggatacggctagaagctgcacccatgcctccacccagacggtggaaggactggacagtgctccagcgcagtacgagaattggcttattgaactcctgctggagtgcaaggagcaaagaatcgactatgaaaggaaccttctgtacccgcaagatattctagacgaatacattaagcatgcgatcaaggccaatgagtcctttgacgccgagcagggtcaactgatgtgcctacagctggaatacgaaagctaccgtcgatccattcacgcagagcgcaatcgacgactcatggggcgaagcagggacaagcgcagcctggaaatggagcgggatcggttaagggagcagcttaagaacttcgatgcgaagaacaaggatctggcaaacaaaatggatcaggccattcggttggccaacgagcgccagaacatccaccaggaggagctgggcgaaatgagggctaagtaccagcacgaactggaggaaaagaagtgcctgcggcaggcaaacgatgacctgcagacgcgactcaccagcgagttggcgcgccacaaggagatgaactatgaactggagtctctgcgaggtcaggtcttcagtttgggaaccgagcttcaacacacccagcagcaggcggacattgggctgcagtgcaagcaggagctggcacgactggaggccgagtttattatcatgggtgaggtgcaagtgcgttgccgcgaccgtctggctgagatcgataacttcagggcccgcgacgaggaactgcagatgctacaagagagcagcaacctggaactgaaggatctgaggcacagcctggacgagaagacatcacagctggaaagcatgaagcacaagatcagcgacctgcaggcccagctagccaacagcgagaaggccatgacggagcaaaagcgacttctaagcaccgtcaaggatgagtacgaagaaaagtttaagtccgtgaacaagaagtatgacgtgcaaaagaagataattatgcagatggaggagaagctgatgatgatgatgcagcagccgcaaggaacaacaggtcataacacctgttccccggacacggacagaactgacatagcttcatccattgaacgcaactcaccgctatccacgtcgctggcctcgagcgagagcttatccgccagcctacgctccacggagctgaagaacctgcaccagctagtggacacgcccactattccggatgtgctgaacagcatggccggtggcgctcagttcgaggacgaagtgcgtccgccggccgtggatctggcctcctcggcaagcaccgccagtgccatcaacatcgtgccgcacgccttggacttgccgtcgacctccggcggcatcggtcacacgctcacccacccacatccgcatccgcacctgcacctgcagcaacagcaacaggatcaactgcagtagtagcagcagacgcagtttgtaaaaacaaataagaactagctttccttcgctaaacaaatgtctattgggaaaacccgcacagaaaatttacaaaaaaaagttattggttcttcatattttcatattcagttcaaaactgtaactaaggtttaataaatcgctgactccacgcaataattataaaggttataaaaaatattaatgtttgaaattttaacttgtttagcacattgcaatttgttgtaaaaaagtggttttgatacgaggcaataagtaagacgcgcattcatattataataaacatttgattaagatcagcaaacat

SEQ ID NO: 13152 - protein, 1100 aa, DROSOPHILA
MVIEKIIGDLESNMTLENEEAKRKLVELLSQNKEQWVVKFMLDYFFTTGSQRILEVLVKAQAPHDGYIFDKLDDCLKQSQHRVQSLQVFCFIVRHHPTWLYKIEKHRLIKSVFKLMTHEKEIVPLMSALLCIITLLPIIPNSVPNFLNDLFEVFGHLASWKLQNSNKLPDEKLVHLQLGLQMLFHRLYGMYPCSFIAYLVEFIKRGNGGGIFQHTIKPLLNTVRVHPMLVTATPETEVNNTRWKEMEPHDVVMECANLSLPVLLPETSNEDGSYAYPMTPGYSRMTSNTSNTDYSYQLREFQQSRNVYTRFDSFASGDDVGPIWSPHNEIATTSSGIPLTPTTSFILPLQPAMNSQLMVGMTGSSPPEAAVEATPETTPLKDMRDIKQPGRAVNSHAVRAIFAVSQPSSPMRKDQQSQFSFPDVSREAEESSHSYLEVNRGTAYDRRLSQVIQDRHNVERSVNTPCPSSLPEINSDLSLVGGSVYPSVTQEVAAVCGECNETDRNLCSVGGLHMPTSRSMHQLAKKRRNRMASYSGNGSCADSRSSAAKKASWSTEAENPMRRTKSCSALSGMRQQHLEENDDEADCSSQRQRGENGNTQKTGSRLQRSGRNLAISAPKDTARSCTHASTQTVEGLDSAPAQYENWLIELLLECKEQRIDYERNLLYPQDILDEYIKHAIKANESFDAEQGQLMCLQLEYESYRRSIHAERNRRLMGRSRDKRSLEMERDRLREQLKNFDAKNKDLANKMDQAIRLANERQNIHQEELGEMRAKYQHELEEKKCLRQANDDLQTRLTSELARHKEMNYELESLRGQVFSLGTELQHTQQQADIGLQCKQELARLEAEFIIMGEVQVRCRDRLAEIDNFRARDEELQMLQESSNLELKDLRHSLDEKTSQLESMKHKISDLQAQLANSEKAMTEQKRLLSTVKDEYEEKFKSVNKKYDVQKKIIMQMEEKLMMMMQQPQGTTGHNTCSPDTDRTDIASSIERNSPLSTSLASSESLSASLRSTELKNLHQLVDTPTIPDVLNSMAGGAQFEDEVRPPAVDLASSASTASAINIVPHALDLPSTSGGIGHTLTHPHPHPHLHLQQQQQDQLQ

SEQ ID NO: 13153 - DNA, 2975 bp, DROSOPHILA
gctcggtgtcctccagtttgtccaccatcaccagttgcggatagaagatacgctcgcaaatgaactgggcgatgcggtcgccatgcttcacctcgaaatcaacatctgagtgattgaacaggacgacgccgagattgccgcgataatcctcgtccaccacaccggcgcccacatcaatgaagttcttcaccgccagcccggatcgtggggctacgcgtccgtaggagccctccggaacctgcacttgcagatcggtcttgacaatggcctttccgcgtgccggcaccacaacgtcgtaggcgctgcgcaggtcaactcccgccgctttggcggatcccctcaccggctccaaagcattctcggtgagtttggcgaatcgcaggacgcacgtgtcgatcttcatcttcttggcagctggaatgtcggcgaaatcggttgatggcatttggagcaaattgagttattacaggaatgcttcgaaagtacagagacttttttcagcttacttgcagaattctggtctgaaaataacgcggtttaacacagcgtcggaaaattggcggacttccagtgttgcaagataccaaaagtacaaatcgccgaaaatctaccaaaaaatcttaagtcagctttgcatttctaaaaaacatatatacaactatgccttgagtttaattaaacaaataataaataaaacaataatttaggcattaataaataaatcaaattgattttattaagtaaaacgaccaatcacaaccaaccctgataagcaaccctatcgatatatcgatactattgtagttgattaacacacctctatttagcacgttgttttgaaaaattcacttgatgcgttaatgttaatgtgttgataactgcaactttaaatcatggcgaacacttatttcgatgagtatgaaaacttggaggtaaataagattatagatcttcttgtgaaactgtactcatagtgaccaaactacagatccacgagctcatgctgaaggatcgtcctcggcaagaagcctactacaatgcgatattggggaataaggatctgttcaaggacaagatcgtaatggatgttggtgccggcacagggattctgtccgccttttgtgcgaaagcaggagcccgtttggtctacgccgtagaagcatccaatgtggccaccaaagttgcgctggatttgattgaggataacggcctgacgaacgtggtgaaggtgatccagtcgcgtgttgaggaattcgtactgcctgccgaggcggaaaaggtggacatcattgtgtccgagtggatgggcttctacctgctgcacgagggcatgttggactcggttctcctggcccgggacaagttcctcaaggagggtggactcctgttccccagcgagtgcacaattttcgtggcaccctgctcggtaccatcgctcttcgatgattggcacaacgtggacggcatcaaaatggacacgtttgccagaaaactcagaacccaaaagtcatcccgaccggagattacacagctgaatccgcaagatcttctgcacgagggcgtcgtctttcactggatgaatctgctggatgtggaagccagcgatttggacagcattcagttcaaggaggtaataacagcccagaaggcgggcaatcaccagggcttctgcatttggttcgatgtacagtttcctggcgaagattttgttctaagcacatcgccgctatccccgccaacgcattggaagcagtgtgtagtcgtcctgcccgaggaatcctgcgaaaatctggaggagaagtcacccattgcatttcaaatcacaatgaagcgcagtgctgccgatatgcgtaaatacaatctggaggtggatttgctagaccccaacacagaggagcatccagtgccttgctcctgtcacatgacgaagtgcattctgacggaagctcatctaaaaatgatggacacctcatgagttacatgccatctcggaatccgaacaacgatctgtggggaaatcaatttatttaacatgtttaatacaaatacaatatatatctcagtcaaacttaacgtctagtccagcactttcaaaaatttaattaaaataacgcaggccgacggctttaaatcaacaaccgctgcagctgactctgaagttccttgagtgaatgttgaagacgattagtgtcgggcttttggtagcaaatattcaggcagccggccactatgtcttgagccttgccaacaattcgtcgtctgcaagttaaatgtgaatgtaagtaaatcgtatcggctagcattttacttttgcacttactttgaccggtaccaaatagattgtgcgttgtctgccagaagcgagaccactcgtatgacggattgtattaaatgccactcattaccctcgttggcccacactcgttcgttcattgaaatcattctgaaagtttttaaaagtttagcctttaaacaattttatctctgcgaaaacccttcaatacgtacctcgaatagtattccaggagcagttcaatgtccaaattcatactcaccagtttttccggcactatgccctcgggaaatcgcagttggcaggctttaacttccagttcccttatgagaaaggcaaagggaaagcaaactccagactcgccatactcccttaccaagatttcgattttcgtgaataacctattgcagcgctcactagttgtgcccggcttatccacaacgctgttgataatctggccccaaacggactcgatcagtagggggtcgttgtgatgcgagcagttgagtatggacaattggcactcccaaaggtcgaagggctccgcaaagtgctggtatagctgagttatgtcgtacaacgcatagtttagttccttaacagccgtagctgcctccagcttatcgctagccaactctgtcatcgcggcaagcactgatttttgaactcgtgcgatgtccag

SEQ ID NO: 13154 - DNA, 975 bp, DROSOPHILA
atgctgaaggatcgtcctcggcaagaagcctactacaatgcgatattggggaataaggatctgttcaaggacaagatcgtaatggatgttggtgccggcacagggattctgtccgccttttgtgcgaaagcaggagcccgtttggtctacgccgtagaagcatccaatgtggccaccaaagttgcgctggatttgattgaggataacggcctgacgaacgtggtgaaggtgatccagtcgcgtgttgaggaattcgtactgcctgccgaggcggaaaaggtggacatcattgtgtccgagtggatgggcttctacctgctgcacgagggcatgttggactcggttctcctggcccgggacaagttcctcaaggagggtggactcctgttccccagcgagtgcacaattttcgtggcaccctgctcggtaccatcgctcttcgatgattggcacaacgtggacggcatcaaaatggacacgtttgccagaaaactcagaacccaaaagtcatcccgaccggagattacacagctgaatccgcaagatcttctgcacgagggcgtcgtctttcactggatgaatctgctggatgtggaagccagcgatttggacagcattcagttcaaggaggtaataacagcccagaaggcgggcaatcaccagggcttctgcatttggttcgatgtacagtttcctggcgaagattttgttctaagcacatcgccgctatccccgccaacgcattggaagcagtgtgtagtcgtcctgcccgaggaatcctgcgaaaatctggaggagaagtcacccattgcatttcaaatcacaatgaagcgcagtgctgccgatatgcgtaaatacaatctggaggtggatttgctagaccccaacacagaggagcatccagtgccttgctcctgtcacatgacgaagtgcattctgacggaagctcatctaaaaatgatggacacctcatga

SEQ ID NO: 13155 - protein, 324 aa, DROSOPHILA
MLKDRPRQEAYYNAILGNKDLFKDKIVMDVGAGTGILSAFCAKAGARLVYAVEASNVATKVALDLIEDNGLTNVVKVIQSRVEEFVLPAEAEKVDIIVSEWMGFYLLHEGMLDSVLLARDKFLKEGGLLFPSECTIFVAPCSVPSLFDDWHNVDGIKMDTFARKLRTQKSSRPEITQLNPQDLLHEGVVFHWMNLLDVEASDLDSIQFKEVITAQKAGNHQGFCIWFDVQFPGEDFVLSTSPLSPPTHWKQCVVVLPEESCENLEEKSPIAFQITMKRSAADMRKYNLEVDLLDPNTEEHPVPCSCHMTKCILTEAHLKMMDTS

SEQ ID NO: 13156 - DNA, 3221 bp, DROSOPHILA
ctcctgctcccaaggcgtccacgatgcgtttgggcttgtgcggcttgacgtgggtgaagttaccattgagatccaagatgccggcaccctgatcgccccaaaggacgaccacatatggtcgcttgagattaaggccccaacgcattcgcaatcgctcgtccagctgcatgcaggcatcctccagagaaacccaaccattcggttgggccaacttcttagagaatacggcatagtcacagtaatccatcagaggccacatgtcatccaggttgttatcgaactccatcgatagtacgatcttctcctttctgttcgcattatatgcctctatgtccttgaccatcggcaatgacttatcaaagtatagtgcccgaatgtgaatccatccatattggttaaggttcagctttcggaaatcatcaatgctaacgtacgggaagttattattgcaatagacaatgttccgcgtcttagtcgccttggtgagtatcacggatgagaagggtgcaccctggtcacaggttggacagttgtcgataatgatgccacgactcttcaagtcatcgaccagaacttgaaacacactccaactgctcagcattcctaggaactccactttgacgcccagattggccaaaacagtacagttgttcgaggccttgccaccgcgaatccagtatcctccaatgaccttctgatgtgagttctcctcgggaaaacgttttatggtcgagacaaagtcaatggtcgttgtgccgatgcacaacaccgtctttttgccaacagcccagctcagtttgtggccatattgagtcatattgaatattgcttttaaaatttaaaattttttaaaatcagttttccaaaaagtacgtggctgatatgatatagaaatttggattaaaaatgctttccactccataatagagatctacaagtccatacctaacgattcaatcatttgtcaagagttattcaaaatcaaaaaaacaaattatgatcgatttaaattaagggcagagaatcgaagaaagaagtagaggaggatctggatacgaaatcagagctttagacaatcgccaggatgacgcaatggtgtgctatcagtgtaatgaaggccgtgctctgcgtcggctgcacggaggtggactacgtgaccaccatggataaggtcgacttccagtgcgacaggtgcagcacccagaatggaatgcttcagcgcagcggaagatcctcgaatgttagtacggccctgcgtctgttgggcgccaatgtggagttgttcggtgtgctcacccgtaatcccacctatcgcatgattctggatgatctcgagcagcggggcattgatattagccattgtacattcacggacgcaagtcctcccttttccacaattgtccaagatcgctggacgcgtcgttgcacggtggtgtattgcgacaagtcatttccatatgttacggcagcggatttccgcaaattggatctcgatcaatacggctgggtgaattttgaggcacggagtccacgtgaaacttgcgatatgatacgcctaatcctcgatcacaacaacgggcgggatgaacgggatcggatagtggtatcgttgcagattttcaattccttcgaacaggtcgtgcatctgattgccatgtgcgactatgtgttcgtcaccaagtatatagccgagtccagaggctggaagtcaccgctggaagcctgcgagggtgtcaatgcgctactgcgcatgccaaggaacattagaattcgcagaccctgcatcattgtgccgtggagcagcctgggagcaggatgtatgaccacggaaggggagtacttcgaagtgccagcacacaagccgaaaaagatcatcgatcgggtgggcgatagtgattgcttcacggcgggcttcatttatgccgcttttgtgcggcaaaggcgattggccgaagccgtggacttcgccaatgctgtggccagctataagttgggctatgtgggtttcgattgcctgggtcatttgccaatcgatgcggttaagctgcccgttagaatgaggtgtggcagtgaggtgtcctccgacgatgaggataacggcgatcagttgaatagctgcaagaagcacctgttacgcccgattgagttcctgccggaaaagtcctccattgcacccactgagaaggaagttccgatcgagacttcgcaactttctagctagaaaagcactgaccatctgaaatattctgcaaatttaaaacatttaatgtatggtttataaatctaagtgtatcacctaacaaagagttagctttgaaattaattagtttctacacttgcacttttttccactaaatttcatttttcaacgctatgagaacatttagttgagcatttatttcatttcatttttcaacgctatgagaacatttagttgatcgtttatccaaaaagtatggatcgattttaggacgtagtgttggcatacctgatttaatccatgctactttatttagatacataaataagcgggctgtaaaggcatggcataatttctgacacaatgatttagttgagtttcccactgggtggcaattcgacgatgtcgcagatagcccttagaggaaatggccaaaggagcctcatagtgtatgtgtgtgtgcaaatggatgctgtggaagaactgttgccacagcataattgccacatgattaattcttgagtcaggcgaaacttgtccgggtccgagaccaagataaatgctaatagatatacatttatgtagacgttgggcgtttggacaaatgttgtgaatggcggagaacgggggtcttctcggtcatttatcatttgggacaacaggcaggcaggcaggcaacaacaattaccacgaatataagtgacaattttcatgcatttcccgggccacgcggcgtatgagcgatgaagataatttcggtgcgaagcagcacagattaccagagatggcgatgccaaggcagctcaaataatccttggccagcaaatcgataaatgtccaaccatttgacgtggttggagctgggagcgctttcatcctccaaaaaattgctgcatctggatatggcactcgctcataaaaacatggagcgcaggaacttatttcctttttggggctgctgtgtcgccgccatacgaatattaaccggaattatgagtcgcaagattgcagctgccaactt

SEQ ID NO: 13157 - DNA, 1221 bp, DROSOPHILA
tcgatttaaattaagggcagagaatcgaagaaagaagtagaggaggatctggatacgaaatcagagctttagacaatcgccaggatgacgcaatggtgtgctatcagtgtaatgaaggccgtgctctgcgtcggctgcacggaggtggactacgtgaccaccatggataaggtcgacttccagtgcgacaggtgcagcacccagaatggaatgcttcagcgcagcggaagatcctcgaatgttagtacggccctgcgtctgttgggcgccaatgtggagttgttcggtgtgctcacccgtaatcccacctatcgcatgattctggatgatctcgagcagcggggcattgatattagccattgtacattcacggacgcaagtcctcccttttccacaattgtccaagatcgctggacgcgtcgttgcacggtggtgtattgcgacaagtcatttccatatgttacggcagcggatttccgcaaattggatctcgatcaatacggctgggtgaattttgaggcacggagtccacgtgaaacttgcgatatgatacgcctaatcctcgatcacaacaacgggcgggatgaacgggatcggatagtggtatcgttgcagattttcaattccttcgaacaggtcgtgcatctgattgccatgtgcgactatgtgttcgtcaccaagtatatagccgagtccagaggctggaagtcaccgctggaagcctgcgagggtgtcaatgcgctactgcgcatgccaaggaacattagaattcgcagaccctgcatcattgtgccgtggagcagcctgggagcaggatgtatgaccacggaaggggagtacttcgaagtgccagcacacaagccgaaaaagatcatcgatcgggtgggcgatagtgattgcttcacggcgggcttcatttatgccgcttttgtgcggcaaaggcgattggccgaagccgtggacttcgccaatgctgtggccagctataagttgggctatgtgggtttcgattgcctgggtcatttgccaatcgatgcggttaagctgcccgttagaatgaggtgtggcagtgaggtgtcctccgacgatgaggataacggcgatcagttgaatagctgcaagaagcacctgttacgcccgattgagttcctgccggaaaagtcctccattgcacccactgagaaggaagttccgatcgagacttcgcaactttctagctag

SEQ ID NO: 13158 - protein, 369 aa, DROSOPHILA
MKAVLCVGCTEVDYVTTMDKVDFQCDRCSTQNGMLQRSGRSSNVSTALRLLGANVELFGVLTRNPTYRMILDDLEQRGIDISHCTFTDASPPFSTIVQDRWTRRCTVVYCDKSFPYVTAADFRKLDLDQYGWVNFEARSPRETCDMIRLILDHNNGRDERDRIVVSLQIFNSFEQVVHLIAMCDYVFVTKYIAESRGWKSPLEACEGVNALLRMPRNIRIRRPCIIVPWSSLGAGCMTTEGEYFEVPAHKPKKIIDRVGDSDCFTAGFIYAAFVRQRRLAEAVDFANAVASYKLGYVGFDCLGHLPIDAVKLPVRMRCGSEVSSDDEDNGDQLNSCKKHLLRPIEFLPEKSSIAPTEKEVPIETSQLSS

SEQ ID NO: 13159 - DNA, 5051 bp, DROSOPHILA
ttccaatgcgatttaaggtaattgactataagtacccatgacgaacttctggacagttccccagtggaaaaaaaaaactggatttatttcttatcgcaaaacttgcgataaccaatttgtatatgttcattcagggagcgtgccgattttttagtttgcgaaattgagttgttatgttttctgagtcattgtcgagcgggttttggtagccggggattaaatctgctgtatcatcttggtccagcgtttatttctatttgcttttaatttcacaatcaaaacagcaataataaaaccgtgccttatcttacggacatatctccccaagcgtcgtctcgctctaatttggatttttcctctctctctcgctcttttcttgcagctggcgcccgacggtgggaatttcatcagctgttgttgttgttcatttcacagcagcagtcggcctaataaaaatgcaatttttatggttaagaaaatagtgcgcgaacgccgttgtgttgcacattggaaattgtgcagaagccagaagaaaatgtgtcttggaaaatggaaaagcacgagcagcagtagcaccagcagcagctataacattgagccagtgatgtaatacagagcaaaagtgaagcggcggcaattggcattgcaaaaaagaaacagattatacaatttgtgttgctgccgcactgaactaggacaacagcagcaacaacagcagcagcaacaacaaccactagtgataaagaccggctggcaacagtgcagcggccacttgcagcaacataatttcaaagtcggagcgtgggaatcgcaaatcacggcagtggcagcaacaacagcaactgcagcaacactcgagcactcgtggctctccggatcgctcatttcgctcgccgttctcgcgctggcgtttctccgtttcgctcgcacccgcctgtggagcagtcgcgtatatttggaggcgttggggcgaacgctcacgacagttgtgcttggaacgcttcggagtgaagatcgtgctcgtccgatcggtgcgcgtgataaatacacggcgaacaaaattgagtcaagagtcagacggtcgcaagacaattgacaagacacgaaaaatcataataaacacaagtggaaaagcaactgcttgagagcaaaaaagaaattgttttttacaaatctcgcacgtaaattagcaagcgttcgcaagaaacaaaccgcatacaatactgaacacaaaaaaaagggtattcaacaaaaaaccaaaaatatttggctgcaaatgtgaagagacgagagacagcggatatactaccgagtgaaatttgtgtcataagcagagccaaaacaaaaccgaaaagccaaattcaataaaaggccataagtgactgtgaaactgtaaagtgatgtgtggtaatcgaaaaacagcataaagaatggccatagacctcctgatcctggccctgctgctcgtctcgttcctgatcaacctgctggcgctgtgtgccttttggataacgcctggcttgaggaccaccgccaatcgctttacgatcaacctgctggccatcaatctcattggttgctgcatcttggcccccactttgttcctgggactgccgggaaagtctgcggaggcatccacttccaacgccgagaccctggagttcttctcgaagccgggaaaccatcaggtgatacttcgtcgcaatggccagctggtggaacaggacggcgtggtggtgcgaaggaacatcagcgaaaacggcgatacggtggagaccttcttcaagtgcaatgccacctactgtcgcgagttgaccatcgatgagcgcggagatggtggctttgtcatcacggaaaccgagacacacgaagagaatctctcggcctttgagagcttacccacggaggctcccattttgccgcccgtccaactgagatgttggtccatagacatgactgctgcgctgggagctctggcagtactgctcgtggtgggggacacctggtgtgccgttacggatcccctgcgctaccacagtcgcatttcgggcgtgaaaacctggatcttcatagcactcacctgggtggtgggcatactctttggagccctttccgccttccgagttttggactttgaggcggacgccctgttcagcagacaacgccgcctggcagtcacgtacttcaacatcagcagcaccaatagtattttcggagtggtgtacgccagtgtctacttcatcgtgatcatcctcctgcccttcggcttcgtgtgcggaatgtactggaggatattcagtgaggcgcgcggaaatgggctgcgcatgcgccagaatggctcttcgccgctgctgcagagcgccttgaatctgacggctggccagcaggcggctcaagccaaccagttctccaatagcttgtgtgttcatcggcattccatatcctcggccagttcgcatggcggcaacagcagcttgggcttgggcggtctgcaaatgcaaattgatcagcgccaacagccgaggagttcgcccagttgtctccgtcgggactcggccgcgaaagtacttttgcccaccatctcggatgatggtggctcagatgcggaaagtggagccggagttcaactgatgcccgtacaggagcactcactgtcagatagaaatcagaacattatgcttactctgcaaacagccagtggtgaaataaagaggaactactccgccagacagctgcccctgttgggcacttcttcgcaggatctgagggagactaatcgtctgcagggcatacgccaggtgcacagttcgcccaatctccacaagtacacggaactgcgccaggactcgctcagtgaggagtgtggttctccgcatcttttgggtcacgcccagcggcagcagcagcagcaattgcacctgcaacatcagcagcaacagcatcatcaccaccagcaacatcatccgcacttcagttcgccgcgccaccagcaacacggccacgccctccagatacccgccattcatgcctcccccaaggctctgagttacatgagctccttgcgacaccgtttgagcaacgccagttcgctattcaaataccgtgaggagtcgagagcagcccgcatcagcatcctggtggtggtgatgtttgtggtctcgtacctgcccttcggactgctggtactcctgcaatcgcgactgtcggctgctaactttggcggatcctcccagctggccatcttcatgatcctgctggccaatctcagttcgccattcatcttcgcctacaggaacaagagggtgaggcgaggagtcaagcggctgtttggtctggattcgtcgtcgggcctgcagcgcaactgcagcagcagtgtaaagaccaatggcaccgcaggtcctgctgcaagtggtgcacaattgcagcgcaacagcagcaagttgtcgcagtacagcagcaacagctgcaagtatctcaccccccagagttccctggtcagtcaagtgccggtgcatacgaccttgacgttaaggcccaacagcagctgcagcaccatcatcaatttcggtggcgccaggggctcagcggactccgatgagcagccaccggcaacaccaccacctactgtggcagttgctccaccgcccacacgaccgcagcgccccaagctgcagaggggcatcaccatcgttgagcacatagctataacaccaaccatgccccaaaagttccagaatcggcgcgccaggctcttcgacatgttcttccgcagctccaagaaactgcaggcgggctgccagagccagagtttgcccactgaggtctaaacggggggttatgataactatacatataggaaggtaaacaaacactaaacttgcttgctgaagaattctaagaacagtattcgtaatttgtaagtctagcaattaacaaagacaactgtttgaatttgagttttaagaccagatcatgctgtcctagaagcttctcatgccaaaaaacaaaaccacaaagaaagtcaaactagaaagtttgagatgctttaaattaacaaaaaaagaaaagaaaaaaacaaaaaacaaaacaaagtaccttttaaaaaatagaaaactgtgtacaagtcaaattaacaaagattgagagtgatgggagttataatcttagggtggatatcaaactgaaaagtggaaccaagccaagccaagttgagatcgtaatcaatgtacctaagcaacttgcatatgaacatttaatgtttttactcagatgaaatcacaggaaaatagcaaagacagcacagcttattcgaacttccccaactagtttattatttattgaaacaattgtaaatatttattagacatccacgccgcaaagctttaactccaaaaacattctggctaaacaagaagagacgcatacattcgattcataagttaattaagtcaatgtgcaaagcatatgtgtattctagagtttaagttgtagagccgagtagtcttacaccgagcacctagtgccgagcagtgctttttcacctgcccaactggagcgtctgttgcaggcggcattttcatattgaaaatgcattttggccagtgcacagttggttttccagttggccagaatgtcagtcagcagttagttagcctttggttagccaacggctattgggccattaagtcaatttgctttttagaacaccgcgggcattgcgtgcagctaaatacctcattagttataatttgaagtgcgagatggatggcggcaataggtcaaaggtcggagccatcggcacggcccatgcataatgcatggaaaatgttcgattgcccctggcatttgtatcatttgctttactatgctgcaggccagaaagctttataccttaagttctcctgctttgatttcccttggctgcacaaaaaggcaacaaaagcaacacacactcacacaacacaaaaaaacctcgaatttatatttctaaagtttatattttataaagagtgtgtgcataggaaatatctataaatattcatgcatgtgtg

SEQ ID NO: 13160 - DNA, 3051 bp, DROSOPHILA
cttcggagtgaagatcgtgctcgtccgatcggtgcgcgtgataaatacacggcgaacaaaattgagtcaagagtcagacggtcgcaagacaattgacaagacacgaaaaatcataataaacacaagtggaaaagcaactgcttgagagcaaaaaagaaattgttttttacaaatctcgcacgtaaattagcaagcgttcgcaagaaacaaaccgcatacaatactgaacacaaaaaaaagggtattcaacaaaaaaccaaaaatatttggctgcaaatgtgaagagacgagagacagcggatatactaccgagtgaaatttgtgtcataagcagagccaaaacaaaaccgaaaagccaaattcaataaaaggccataagtgactgtgaaactgtaaagtgatgtgtggtaatcgaaaaacagcataaagaatggccatagacctcctgatcctggccctgctgctcgtctcgttcctgatcaacctgctggcgctgtgtgccttttggataacgcctggcttgaggaccaccgccaatcgctttacgatcaacctgctggccatcaatctcattggttgctgcatcttggcccccactttgttcctgggactgccgggaaagtctgcggaggcatccacttccaacgccgagaccctggagttcttctcgaagccgggaaaccatcaggtgatacttcgtcgcaatggccagctggtggaacaggacggcgtggtggtgcgaaggaacatcagcgaaaacggcgatacggtggagaccttcttcaagtgcaatgccacctactgtcgcgagttgaccatcgatgagcgcggagatggtggctttgtcatcacggaaaccgagacacacgaagagaatctctcggcctttgagagcttacccacggaggctcccattttgccgcccgtccaactgagatgttggtccatagacatgactgctgcgctgggagctctggcagtactgctcgtggtgggggacacctggtgtgccgttacggatcccctgcgctaccacagtcgcatttcgggcgtgaaaacctggatcttcatagcactcacctgggtggtgggcatactctttggagccctttccgccttccgagttttggactttgaggcggacgccctgttcagcagacaacgccgcctggcagtcacgtacttcaacatcagcagcaccaatagtattttcggagtggtgtacgccagtgtctacttcatcgtgatcatcctcctgcccttcggcttcgtgtgcggaatgtactggaggatattcagtgaggcgcgcggaaatgggctgcgcatgcgccagaatggctcttcgccgctgctgcagagcgccttgaatctgacggctggccagcaggcggctcaagccaaccagttctccaatagcttgtgtgttcatcggcattccatatcctcggccagttcgcatggcggcaacagcagcttgggcttgggcggtctgcaaatgcaaattgatcagcgccaacagccgaggagttcgcccagttgtctccgtcgggactcggccgcgaaagtacttttgcccaccatctcggatgatggtggctcagatgcggaaagtggagccggagttcaactgatgcccgtacaggagcactcactgtcagatagaaatcagaacattatgcttactctgcaaacagccagtggtgaaataaagaggaactactccgccagacagctgcccctgttgggcacttcttcgcaggatctgagggagactaatcgtctgcagggcatacgccaggtgcacagttcgcccaatctccacaagtacacggaactgcgccaggactcgctcagtgaggagtgtggttctccgcatcttttgggtcacgcccagcggcagcagcagcagcaattgcacctgcaacatcagcagcaacagcatcatcaccaccagcaacatcatccgcacttcagttcgccgcgccaccagcaacacggccacgccctccagatacccgccattcatgcctcccccaaggctctgagttacatgagctccttgcgacaccgtttgagcaacgccagttcgctattcaaataccgtgaggagtcgagagcagcccgcatcagcatcctggtggtggtgatgtttgtggtctcgtacctgcccttcggactgctggtactcctgcaatcgcgactgtcggctgctaactttggcggatcctcccagctggccatcttcatgatcctgctggccaatctcagttcgccattcatcttcgcctacaggaacaagagggtgaggcgaggagtcaagcggctgtttggtctggattcgtcgtcgggcctgcagcgcaactgcagcagcagtgtaaagaccaatggcaccgcaggtcctgctgcaagtggtgcacaattgcagcgcaacagcagcaagttgtcgcagtacagcagcaacagctgcaagtatctcaccccccagagttccctggtcagtcaagtgccggtgcatacgaccttgacgttaaggcccaacagcagctgcagcaccatcatcaatttcggtggcgccaggggctcagcggactccgatgagcagccaccggcaacaccaccacctactgtggcagttgctccaccgcccacacgaccgcagcgccccaagctgcagaggggcatcaccatcgttgagcacatagctataacaccaaccatgccccaaaagttccagaatcggcgcgccaggctcttcgacatgttcttccgcagctccaagaaactgcaggcgggctgccagagccagagtttgcccactgaggtctaaacggggggttatgataactatacatataggaaggtaaacaaacactaaacttgcttgctgaagaattctaagaacagtattcgtaatttgtaagtctagcaattaacaaagacaactgtttgaatttgagttttaagaccagatcatgctgtcctagaagcttctcatgccaaaaaacaaaaccacaaagaaagtcaaactagaaagtttgagatgctttaaat

SEQ ID NO: 13161 - protein, 798 aa, DROSOPHILA
MAIDLLILALLLVSFLINLLALCAFWITPGLRTTANRFTINLLAINLIGCCILAPTLFLGLPGKSAEASTSNAETLEFFSKPGNHQVILRRNGQLVEQDGVVVRRNISENGDTVETFFKCNATYCRELTIDERGDGGFVITETETHEENLSAFESLPTEAPILPPVQLRCWSIDMTAALGALAVLLVVGDTWCAVTDPLRYHSRISGVKTWIFIALTWVVGILFGALSAFRVLDFEADALFSRQRRLAVTYFNISSTNSIFGVVYASVYFIVIILLPFGFVCGMYWRIFSEARGNGLRMRQNGSSPLLQSALNLTAGQQAAQANQFSNSLCVHRHSISSASSHGGNSSLGLGGLQMQIDQRQQPRSSPSCLRRDSAAKVLLPTISDDGGSDAESGAGVQLMPVQEHSLSDRNQNIMLTLQTASGEIKRNYSARQLPLLGTSSQDLRETNRLQGIRQVHSSPNLHKYTELRQDSLSEECGSPHLLGHAQRQQQQQLHLQHQQQQHHHHQQHHPHFSSPRHQQHGHALQIPAIHASPKALSYMSSLRHRLSNASSLFKYREESRAARISILVVVMFVVSYLPFGLLVLLQSRLSAANFGGSSQLAIFMILLANLSSPFIFAYRNKRVRRGVKRLFGLDSSSGLQRNCSSSVKTNGTAGPAASGAQLQRNSSKLSQYSSNSCKYLTPQSSLVSQVPVHTTLTLRPNSSCSTIINFGGARGSADSDEQPPATPPPTVAVAPPPTRPQRPKLQRGITIVEHIAITPTMPQKFQNRRARLFDMFFRSSKKLQAGCQSQSLPTEV

SEQ ID NO: 13162 - DNA, 7614 bp, DROSOPHILA
atgaactactatgttttttaaatattttttttgaaaatatgtaagctaactagactaatgcaaatattcgagtcagccgaatactttataaattaattaatttgcaaaaccttttaatcaaaaaaaataatataaatatattttaaagaaatatttaacgaatctatttttttatatataattttgcgccctgcacgtcgcctaatggcccagagtttggccgcttaatttaagtcacaatgtttaataaaatctatcatttaggggcctgtgtctaataaacagtagttacatcatgctccgaatcggaatcaaatgcaaatgtgttgccagctgcctcatggaaatccatgagggatgtggagagaattgctataagtgaaaacatatggaaaacagatcgggagtcaaagatcagatgctacattcgacggccagatggaaatgggagaaactcagctatgtagcttctatagttttgtattttttctgtaccatactatactatgcaatataacctttttgctgaagcaaaatctggttttaaactccttaagccaatgatttagtccacagactcctgagatttgtgtccactgccacagaaccatttcgtttttccagccttgggttttgtgtgaacttattagcataatgagtagaaatattgcccgagcagcactcgcttcgctctggtttatttgacaacttttcctagttcttggttcactgcctgcgttggccatttggccttatgtccctttcatctccttggtcattatgttaataagcgaaaagaaaaatgctgtcgccgctgggcgagcactcttgaaacccgtgctggagctggagtacaaccgaatgcccaagtgtcctgatggggcgataggacaatatccaccgatggccccataaagtttactcttggcgaaaaatgtcgatttgttttaatgccacccggaactgagcggacggaaggtggaatgccagggatgctgagatgcttggatgctgggatgtcggccatcaagagggtattacttgccgatggcaaccgagaaagggtgtaatgaccaccggagatgacgaacagcttggccatacaaatgaacataataattttggcagagcccatcaaaaggtcacatttgttctagcagtgttttcagttagcaaagagccagttcttaaataaattacactgtttgtataacaagaagataagttgctgtatttctaagtttgatgtatttctatatatttaatacatgttattcactgtattgttagaaagtacgtttggtttagtcctttacatttatatgtatgtgctttattatgtgtacttttttatggaataggtccaaaaataaaccccgggaacctgcaagtttttaaggactgtacactgaaagccggcaaacggtggggtaaagtggaatgaatacgtaaatggcgcccaacgtgccgccttaatgacagcgattaaagtgcagtggtaggcggcagttgccagatgtatgttctacacttagagaaatccccgtcttcattatattttatatagctaattcagaagcatcttgaatatgagttccaattatgaaacatagaaaaaaatttctaaaaaaaaaaacaattaaattgaaatatgattttttaaatgtttaaggctaatatttttgtgctagtgaaatggtggacgagttggaggatgggtcggtgacacattgtgcgatacatgaaaaactcgtaaagcaaaaaaggaaacaattacaaatgctcgcacacacacacacacacacacacgcgtacacaagagtgcccacctacgtgtgtattcaaatacaggaccaaaggatgctgtgtgttttggtgggctgggtgctcacatagcgaagtgaagtgagcggttcgcagatgtttgaaggatttctattacatttttgttttgttcctgcgatgtcgtggctgctttacttgtatttttgtatttccctttttggttttctccgctgttctgaagagtgaaattgcttccgccgcacttaacggtgcgcagcacaacgctgccaccatcacggattttccatccatctggccccgcagcagctacagtccttcttcatttgatgccaaacatttccgcagctcgtcgcataatttaatgcaaatactcttacttcgccccattccacagatacgactcagtgttgccattggaaaacgtagcttagaaccgaagaaaacttggacaaaacgaaagtagcttattaaaattataaataagctctaaaaaaaagttttccataactagctataacgagctatatgctatttattaatattgccataaagcatttcaaactgtgtatcttaatctgagtatgtgctacttgaaagctgttttctttttgtttctaagccagtacaacatagttaacgaaagtagtggtatttacatataataaatataactttataaaaactaagaaaatcttagttccttttccttagctagaaaatagctaggctattatccccgattcagagcatgtccctttgtaggattttccttgtatccttctcgtttctggcatcactgcgtgcggcactaaatatcgattttaataggaaagctggatttttgtgcatcttgctggttgtttgtccttgggctgacctttgcgagctgcatcctgtagccggcttctggccaggtccttgaagggctgctggaaagctccttggacggcgatgattctcagtgccaaactaatttaagctgcatgccaatttgccttgagacatcgaatgtttattaaatgtctgaaagtaaatacaaaaatgtatgcaatagttatagtgaaaatttccaacattttttatgtatttattatgccgagctttaattttaataatatcctgttgttccatgctggattattaaagtgccttccttttagagtaaataaaatttacgtaagcttttcaccaataggaggcattgaatattggggatttatttacatgccacaaatgcgtatgcacataatttgcatgaatgttactacaaaatgatgtcctgactgcggaattaggcgacatgtgccgaggggaaaaaaaccgaaattcaaatatttccaaccgaaatttaagtatgcgagctcgaatgcaaaaaaggataagtcgaattcgctaaaaaataaaaaaaagaaaacagaaacaaggaaaaagggcttatggcggatttatttggcaacacacgtgtctatgtagtcggcaaatcccacagtctggaaagcatttgccttcccgatcaaaacccaacatcatacaactgaaaagcaaacacaggttcacgcaattcaaatattaccgtgagctctcttaaaagatacaaatttgcaaaatacacacacaacaaaaatcgtaggtggggtttttatgaaacatgaggaaaaggtaaacgaagaggaaaattcaaaaaacacatcaagttatccaataaaatgtatattttccgatgattgtatgaaaagtattataatgaacatatgcacatgtttgttatattttagttatctgctgcagacactaaacgagtggaagtaagttttgtcacatctttctttcttttatttgtagtttaaatattaatcatcctttatattcgacatatatgtacattttctcaagcataagtgtgtttggccatacaagtggatcagccaagttgctcccacaaccgatggcatagcagccatcgtgtaatttcccagcctacttttccgccaaaacgttttgcgtctaatgagttttctacttgcggtttcggggaaaatttgcgcaaaaatgcgactctttacatttaagtgccgaaggggaatggaaaatgggtggttgggttgttatggggcatcgtggtttttaccttggtggtgagaagtgaacaacaggaccgtatgcgctgtaaatgttttagtggttaccgcgtttaagtcattagagaaaattcttggcgaccagaaaagggttgggtgaactttgcttccagaatttgaatctcaaagtcgctgagctaaatgtacgtacatatattatgcggcagtttttggctggctttggaaatttcaatagaggcggcaaatgctttggatttagtgtttacaaagcttgtgaacagtgaaaagatgatccaacattaattatgtacgaaactgaaactgtgaggggaaacaaaataaggaactttaacaatttctttaggtattccctttgaaagtttctaagaacatgcttgataacctttaaaatctagagtggaatatgtggagtatgtatacgtccttgaaatatatatagtgtgttttttatacgaaaataaaaatgtgtctgtaaaattaattaaccaacttaagttgatttaaacatggttttcttattcttatattaaacaaagtgataaaactcaatagattatttatagtgtaattacactcaatacacctacaaactcagagttcatacaagtgctaactaaacagtctgcaacattcggtcctaaagggattgatacatttatttgactgccaaatattgtacacccgtttttatgtgcgaaaatatcggccagaaatgtctgcctatatttaaataactctgtcgcaatgaccgtagcgaaacgtgtccgacaacggttttaaaaaattaacaacattgctccaattagtctgggcagtgcggatcataattgtatgggcacacatcgttcttatatagtatatacatatgtatatttcgcaggcattcgaatatccaaatttgcgtcacggcactgagtttttgcgactcctttcgtttttaaatccatttggttatcaccatggacagacgcttaaattgaatttataaatagtaacagaccactatttaactaatagactcaaattcgaacagcaaagacttactaatcaaacagatgtcgacttacttaagagctagtttttatcgataagtgagctggatttattaaaaaactaaaaaaaacccagctaaaagtccttgaaatttttacttttattttgcactgctaataagatataattttgggcttcctagttgattcagtattccgagatataatgtatatttataattatttactaatatttgttaaatataactaataattatcaggtcactgttaaacaaatagttttacctattctcgctttcgccgtcagatggctgaatcgaatttggcaaaaaggtaatttaactatttacgaatggttttcgtcggacatatggtggtgatgggcctgactaattatccactgagatctgcacggccgacaaaggaaaacaaacaaatatttacggaacacacatccatttgattgcctgcggttggtggacccttcctcttcattttcatcgcaacatctggtcctgaaattgaaggacctctgaccaaacgaatcagctgtgtccaaggtcgcacccctgtagttttaacggcaaactccccatttccatttgagtcaatactcatcgccttttacctttcggttccgcagtgggtcaataattaaactaacgatgaaattgatacgttgtatatccaaactcacatttatctataagttttagatacggtatttatgtgtttccttcaaatagttgtttgagtagattacaaaactagaaacatggttgaaattgttatttatttgtttcaatggaacctatttaaactttctcacccaacttggtaaaaattagagcttattttgcatcactattctagcgaatccgtttcggtcataggctatttccctatgccggatcgatttgcaccacattagcatagctccatcgacaaatgcgttagtatctatccggaaatggagcgacttaatttgtcgaacagggctcgcctgtttttccacctgtcggccaccgttcacctgggctatgccatttactttgactgtcggtatgcccagttgccacaagtggcggtgaccctgcgcctggagccaccgattggtggcaagtttaagtacatgacgtttctgtgcggccttttgcagttggggtactatacactggcgctgacctttgacctcctccgattgagatctctaaggaagctgcgagactacatcttcgccacctttgccgtacctctggcccttacggtgggtctcaccttttggacactcttcgccatcgatcgggaagtgatatatccggtgcttttggacctggtctatcccaattggctgaaccacaccatgcacaccttcgtcgtaatctatgcctttgtggagttgggtattacacgacatcaatatccgaaacgcagtcgaggattcactggactgggtgccttcatgttgggatatctggtgtggatacatatcgtttggttccggaccgacatctgggtgtatccctttctgggcggcatcgcctggcagctgagagtaattttctttgtccttatcatggtcctcggattcatttactatctcttcggcgagcgagttaataacgtcttgtggcagcgatctactggtgtccacagatggatcgattcccattgaaatgcacatttgatagtttaaggataggaacataaataaagtatataggatatgcttcttattaaattaaatatgactactgtggaagtcaagctatgcaactattcaaatcgtacaaaaggcgcagtaataaaactaatatacatttttgtagaaaccataaaattcaattcgaaagtaataaaacatgtttccggtacaaagatcaattgcaatataaaagtcgaaatcatctaatttttcaacacacataacggaaccggaaatcgctctgaatatattattttggttttcaaatgcgtttatcatcgaaaaaccagctgctaagaagcggaatccatatggattcgaacatattctcattcaactatatgatagtcacgtgcggaaattacagctgccagctgattctggaaaaccgatccattgttttactcaatcctttcagcgggaggttccggtttggctaggatgtgggctccgatttcgaatatttcaggacaccacttgtgccaatatttcgaaagtgatctccggacagccgaaactcagagaagaaaggcacagtttttcattgtttgctgcaaaggcagatgggtaacagcccatttctgtcaatcactcatttgtgttttcttaaggcggtctggttgtaaacatttctattcttccggttgtatgccattattagcaaataactaaattattgctttcttacttgcttgttaaaacagtgttgcctgaatcgtaaaaatgcatgaaattagacttaaaaatgttaatatagatgttacttcaacaaaaatcaactagaaattcacttaatgaataagcgtttgattggaactttggtaatctctacctaaagcgcagatcattttgatgattcaattctagaccagcaacatatgaaaaggttatttggactacgaatttattaaaaaggttataaacctttatacaataatattaactgagtccgaacagaagccgcattgtt

SEQ ID NO: 13163 - DNA, 885 bp, DROSOPHILA
atgcttggatgctgggatgtcggccatcaagagggtattacttgccgatggcaaccgagaaagggtgtaatgaccaccggagatgacgaacagcttggccatacaaatgaacataataattttggcagagcccatcaaaagcatagctccatcgacaaatgcgttagtatctatccggaaatggagcgacttaatttgtcgaacagggctcgcctgtttttccacctgtcggccaccgttcacctgggctatgccatttactttgactgtcggtatgcccagttgccacaagtggcggtgaccctgcgcctggagccaccgattggtggcaagtttaagtacatgacgtttctgtgcggccttttgcagttggggtactatacactggcgctgacctttgacctcctccgattgagatctctaaggaagctgcgagactacatcttcgccacctttgccgtacctctggcccttacggtgggtctcaccttttggacactcttcgccatcgatcgggaagtgatatatccggtgcttttggacctggtctatcccaattggctgaaccacaccatgcacaccttcgtcgtaatctatgcctttgtggagttgggtattacacgacatcaatatccgaaacgcagtcgaggattcactggactgggtgccttcatgttgggatatctggtgtggatacatatcgtttggttccggaccgacatctgggtgtatccctttctgggcggcatcgcctggcagctgagagtaattttctttgtccttatcatggtcctcggattcatttactatctcttcggcgagcgagttaataacgtcttgtggcagcgatctactggtgtccacagatggatcgattcccattga

SEQ ID NO: 13164 - protein, 294 aa, DROSOPHILA
MLGCWDVGHQEGITCRWQPRKGVMTTGDDEQLGHTNEHNNFGRAHQKHSSIDKCVSIYPEMERLNLSNRARLFFHLSATVHLGYAIYFDCRYAQLPQVAVTLRLEPPIGGKFKYMTFLCGLLQLGYYTLALTFDLLRLRSLRKLRDYIFATFAVPLALTVGLTFWTLFAIDREVIYPVLLDLVYPNWLNHTMHTFVVIYAFVELGITRHQYPKRSRGFTGLGAFMLGYLVWIHIVWFRTDIWVYPFLGGIAWQLRVIFFVLIMVLGFIYYLFGERVNNVLWQRSTGVHRWIDSH

SEQ ID NO: 13165 - DNA, 2382 bp, DROSOPHILA
ggaatcgaatcgatttgactgtggccgtggctgctcttgcccattaaaaaggggcagtccgataaaggcgtgtccaaagcagtgccgcaacaaggggggcatatgctggggaactgaaaaaacagtggcagttgttagtccatgttgctgcagtgcagcagctgaagcaacagcagcagctgctgcggaaacaggttggccccctgttgaagagagctacgtggaattcaatcagggccaatctataatagaaatctcatgtggcgcgagcttcgttttgcccaaaggggagtttgcagcagcaccaccagcagcagcagcagcagcagcagcagggggcgtggcagtggatatcagctcggcgaaggaaaaggagaatgaggagagtgggaggaaaatgaggtgcccactctcagcccactttcgatcgatcgtgcgttgcaaatatgaaaatgctactgcagcgagtgcggcagccaagtcaggcagctttggctaaaatcgtttttcattaacaattttaaaagccgcgcattaatcacaagttcacagacacacacacactcataaagaatacagaatgcaatacaggatgccctgtgcccacgacttatcgtggatagcacagtggatcaaaataacaaaaataacaaagttattttgataaatatgcatacataagtataagtacatgactaatcgtatgatagccaatatctgatattcagatgatgtactgattaatttattttagtattttaaacaatgtaaagattttagaagtatatttaaaaagggaattaaatgatacagtctatttttccaaccactaaccactgtgcaagtggccatggccaccataaatctaccgactcttccgtagacaccccactaattcttctctttggctctcttctcgttgcagtcgtttcgtgatcagtccatcgatggcactggcctgccgctcttaaccgaggatcacctggttaactcgctgggcatgaagctggggccggctctcaagctgcgctccatattggcgaagaaattgggcgggccgtgtccgtgtgttgcatgcgttgcgcaggcgcaacaaatgctggcactgcaaacgggtggggcagcagcagcaacgggagcaacagcaggagcaggaacggttacgggagcggtagcgggagcgggagcaacatcggccacaactagttgcagcatcaagtcggagatcttcaatggcggcagcaacggtagcagcagcggcagcagcagcaaccagggcagcgatgttgcagctccgccggcggcaacagccagctcgcccagcagcaacatgttgctgccagtgttgccgtgcagcggactgcaggacgccagctagttagcagcgatcctgtccacatacgtatttatgctaactaaattgcatttcacctgctaaaatgctgaaccaaatgagctttcaacacaattaagaaaggaataagagaataaaaaatagacaggcagacaggcgcctcggattgggagagaaatacctattgtataaattaaacgataaatttgtaatttaatggctagctaaagttgtaaactttaagtgagaaacaacaataatcgcaaagtcttccatttgcaaacacacacacacacgaacacacaaatcataattgtataacattaatcaatttattagtcaatttaatgagagagttttcgtttacgtacttaagtgcaaagcgcaaatttgcattcattttatttatttctatgacttttttcgtttttaactgctagtcagtaaatgtatatttaatagaattccgaaatatgtgaagcaaacttaaaaattcaattttattgttttgcaaatcgaagtaaaaggctatttattttaatatatatatcctacgatacggcagacttgttggacccgcccccattgctttgttcaaattttattaatttatatttactttatctgcggccatgcacagaggaattcaaaattcaacttttagaactatgcatccttttaagagctccaagacttgaaaccaacacacatacacaacactatacacgagttaaaaaaaaaaattacaagaaaccacacgaaacaagcaaatagaaaacgtagtttatagctcccattgtacatattgtttatttaattagttgtaagtcatttagaaagagagacagaaaaacatgttctaacacctaggccgtatgcaatgatgaacttaaagaaacagaagcatatttctacaaaataggcatgatgagaatgaacttgatttattttatacatttaatgaactatagctatttttcacaagctgaagcaaataaattataccagttatcatacaaacccaaacg

SEQ ID NO: 13166 - DNA, 382 bp, DROSOPHILA
atgaagctggggccggctctcaagctgcgctccatattggcgaagaaattgggcgggccgtgtccgtgtgttgcatgcgttgcgcaggcgcaacaaatgctggcactgcaaacgggtggggcagcagcagcaacgggagcaacagcaggagcaggaacggttacgggagcggtagcgggagcgggagcaacatcggccacaactagttgcagcatcaagtcggagatcttcaatggcggcagcaacggtagcagcagcggcagcagcagcaaccagggcagcgatgttgcagctccgccggcggcaacagccagctcgcccagcagcaacatgttgctgccagtgttgccgtgcagcggactgcaggacgccagctagttag

SEQ ID NO: 13167 - protein, 125 aa, DROSOPHILA
MKLGPALKLRSILAKKLGGPCPCVACVAQAQQMLALQTGGAAAATGATAGAGTVTGAVAGAGATSATTSCSIKSEIFNGGSNGSSSGSSSNQGSDVAAPPAATASSPSSNMLLPVLPCSGLQDAS

SEQ ID NO: 13168 - DNA, 2868 bp, DROSOPHILA
gtggtgccgtcaccagcggccacatcctgggcacgcgacagctccaccagcatcttggcagccgggtgcagtacattcatctgcttcaggatggtggcgccatcgttggtgatggacacctcgccgttgccggcctggatcatcttgtccatgccgcgggggcccaaactggtgcggatagcatcggaaacggctggaaaacagaattatttcaataggttataaatgtattttaatatttcgttaaaacttaatgagaaactcagataagtggaattcgtgtggttagttttacacagcagcatgactaatttacatacatacatacaaaaagacatatggtgttttatgtgttaattcaaaaaatctactgtaacttatcttaagagataaacaataaaatccttgtagcggataaaagggtattgggaatagagtattaaaaatcctcaatttttaggttgtttcaattcatcacatgagtaatgcgcgctcttcttcttcttccgcccaagaagtttccagacagccggcatccaactgctttttcaataggccatttggccggaaattctgatgcaccactgctcggaattcagtcacctcggttcttagctcaataaatagcacatacgccaacattttgatacaaaaatgtgtttaattttgttaatttcctcgctttttctcacctttggccgcctggatgttggacaaacgcacatcggtgggcttcgacttgtccttgaaggccttggccgttggcttgatgttgacagctgctgccttgggcgccattgtagggttaagttatagttttttaacaaaacacagttattctacaataaattcacagcgatttacacagaacacgttgctgcgaaatgttaaggaaagtgtggccgcactcgctgagctcaaatataccgccaacttatcggcatcgataacatcatcccttgtgaatggcaaattggtgtgaccgtattttgcgttgtgactcggctgctttatttacattgaatttttgttcgatttttgaatttaaaataaaaataatgccgcacggacactctcacgatcacggcggctgcagccacgaggcctcggacgtggaccacgccctagaaatgggcatcgagtacagcttgtacaccaaaatcgatctggacaatgtggagtgcctgaacgaggagacggatggccagggaaaaagtgtctttaagccgtacgagaagcgccaggatctgtccaagtacgtggagagcgatgcggatgaagagctcctcttcaacattcccttcaccggcaacatcaagctcaagggcatcatcataagtggggccaatgatgactcccatccaaacatggtcaaaatgtaaggaacaaaagtcaaggctgctttaatattactatattcatcatatatcttatttttcagcttcaagaaccgacccaggatgacctttgatgatgccagagcaaagcccgaccaggagttccagctgacccgcgatgcccgcggagaaatcgagtactcacccaaagtggtcaccttctcctccgtgcaccatctctccctctactttcccagcaattttggcgaagacataacacgcatttactatataggtaagctcacaacaatctatgttttatctgtgttcccaactaaaaccaagtcactattcaaaggtcttcgaggagagttcacagaagctcattaccatggcgtaaccatatgcaactacgaatcccgtgccaatgcagcggatcacaaggaaaaggctttcgatggagtcggcagagccatccaatagggttatagagattaaaatttacaatttaattgagtatctctgtagtgtatatattttgtgatcatttaaggcaagaaatgtttttgtattcgcttaacttattgagcatttgtattgcacagatattgtgggctaaatcatactaagtatattgtgtgggtggaatcacatcgggtcctattttcatgcccatattgggcactttatccgaatggatttcagccgtgacctcggtgaacagcttgtcccactgccagagatcgtccttctcgttgaggctctcctgtggaaccaggcaatcggtgaggattgagagatcaaagccatccacagctgaaaaggcgtactgggaaagcaaatcggaattggcctccttcaaaacagcagatcgtgaggtgccaatactacaaattacaacttattatcgtagtgaagagaaatatagcagcttctgcttacgttggcggttctacaatctcattgagcatgatttcgtccttgacatcatccatgtctgggatgacgggaatgtcatccgttggtatggaatttgtagccgactttgtttgtttaaagcgctcactaaaatgaattttatcattataacagtcggtggaaagtgaagttattgtgataaacttgtactcactcatcaaaggagtttttcttggacctaaaaagatatagagcaatcagtaatgtgcctaattcgagcctaatcatacccactttaatcctttgagtccagaatccgcccagccacctgaaatgcgacgaatgggtggtcgatgtgactcgaattcattgttgtatgtggacgaggtggccgtgtccgaggtggtcggtggggtgcccgcctggacattcagcgtaatgtcgatggaaatgtccttggagcccccagccgcctggacatcctcctccttcagaacatcgcgactcttggagcgccgacccttcctggccgtcgtctagggtggcaaataaatcgaaacttcaatttgcatccatttaaacagggttacttacctttcttatggtcatcttg

SEQ ID NO: 13169 - DNA, 742 bp, DROSOPHILA
ctcggctgctttatttacattgaatttttgttcgatttttgaatttaaaataaaaataatgccgcacggacactctcacgatcacggcggctgcagccacgaggcctcggacgtggaccacgccctagaaatgggcatcgagtacagcttgtacaccaaaatcgatctggacaatgtggagtgcctgaacgaggagacggatggccagggaaaaagtgtctttaagccgtacgagaagcgccaggatctgtccaagtacgtggagagcgatgcggatgaagagctcctcttcaacattcccttcaccggcaacatcaagctcaagggcatcatcataagtggggccaatgatgactcccatccaaacatggtcaaaatcttcaagaaccgacccaggatgacctttgatgatgccagagcaaagcccgaccaggagttccagctgacccgcgatgcccgcggagaaatcgagtactcacccaaagtggtcaccttctcctccgtgcaccatctctccctctactttcccagcaattttggcgaagacataacacgcatttactatataggtcttcgaggagagttcacagaagctcattaccatggcgtaaccatatgcaactacgaatcccgtgccaatgcagcggatcacaaggaaaaggctttcgatggagtcggcagagccatccaatagggttatagagattaaaatttacaatttaattgagtatctctgtagtgt

SEQ ID NO: 13170 - protein, 211 aa, DROSOPHILA
MPHGHSHDHGGCSHEASDVDHALEMGIEYSLYTKIDLDNVECLNEETDGQGKSVFKPYEKRQDLSKYVESDADEELLFNIPFTGNIKLKGIIISGANDDSHPNMVKIFKNRPRMTFDDARAKPDQEFQLTRDARGEIEYSPKVVTFSSVHHLSLYFPSNFGEDITRIYYIGLRGEFTEAHYHGVTICNYESRANAADHKEKAFDGVGRAIQ

SEQ ID NO: 13171 - DNA, 4846 bp, DROSOPHILA
aaactggatatgtacaataactatagcatacagttttaaaagacgcgcccaagttatcgataaataatatgcggagtgttgcataccgttagcataaacacactctcacacactcttatttctgggtatacattttctgataagaatgcaataaatatcccgactggttggagtaatttcgagtttttgaattaaaaatgccttaagaaaagtttttaatgagccatgtagagttaacaccagtgccacatatcctgggaatggagcaccaatcaaaagtcatcatcaagcggcccaaatcaggccaattctagtcggaaagtcgttgcagccgcccattgccaccatgtcgaatgatgtgcaggtcgcccgggtggccaagatagctaccgatgtgccgcgtcgcagtggcaagcagcgtgactccagcggattccagggcaagcactccggcagcgcggctggcgaggatttcgagtacgtcttcggtagcatttcgccgcgcggtggaggacccggtggcaggcacttggtgggatcctccgacctggactctccggagcacacgcagcgggacaccaccgagagtgacaacaacatatccagctgctccacgctagacattgtcaacaaagtgagtaatgatgcccgcactgagagaaataactagatcttaaatcaaaaaaatcaatatattaatttgcaatgatacattggtactaaacatgatcaagttcattttaaattaatttttaaaatgatcacaaaatatttaaaaatacctcattattgtgtagtttaaaataagaaacgcagaattttcaatcattggttttcaaagtgtttcgggctttaaattcggttggcgtccagtgcgcagatgcgtgtggaaggctgagggtcaagttgcagcggcggagagcgcggatgcatccgcggtcggatgacgacgtaatcgccagtcaaaattttccactggaccatgatttcggagcaactgcttccgcgcagcttgagctgcctgtgctgcagcgatacgccatcggtgcccaacgacaagagacgcagttgggagtatacgctgatggctcatcctctggccagacggcccataaacgtgatgaccccaagaataaccacttagaaagctctaatccgcctcttttcttttgattcacctccaggttgagcaactgtcggtacaacagctagaaaaccgggtgcgggatctaacgcagcgtctgcagcaggcggaaagacagctcactgagagcaacacagagcgggaaatatgccacaagcgcttggaggttgtcagccaggcccacgagtgtcgcatcacagagatgcactgtgtcatcgccgagttaagcaagaaattgcgcagtaagcaggaccacgttatcatggaggagcaggagcccgacggcagcggtgcgtagcagtttcaaatgagggaaacaaacccctaaccgacagtcttgttttcagaactcagctttcaggagggttcagtgtacaattccgagcttaacctcaccaatcctgatgccgaatgtcaaacagaaccactggaagacttcgagggcgcctgcagtaccaccagcgtgggtaacgttgcccacaaaccgccggaactgagccataagggacaagtggaggcactgcaggaggaagttctgcacttgagagctcgaatcgccctcctccagtccgagatttccaccaaggatgctgctgtggtcgaggaacagaccaaagtcgccttcgactgcgaatcggaagtcaacgagtgcggacagcgactgaatgatttgaatggtaatataaataatcctgatgataaaagaatggttacacatttagatgctttcagtttgcacttccttgacaagtccgcaaaaacgcattccagcggtaccgaaaatggctgaacgggttaagttgcggtgcgccagcaaacatgaatccggagaagatccatcccaagatacttcattgagcaacgaggtgtgttgaccaaaactttattcagagaatacatttcaacccatacaacccataattttaagcaaattaatctggtcgaacatttggtgtcggagctaaaggagcaaaatctatatatggagaactttatggagcccctacatttgagcaaagacttggagcgactgcaacgacgtgttgaacaattggagatgcgaaacaccatgctggcactgacgctagacgaatgcaaggagcacactgagcatctgtatctgctatgcggaaagtacgagtccaatgcggttgctcttcagttggcgcttaattgcagtgatcgcgccatcgaggcctacgacgtaatgttggctctgctcgaaagcaagtaagtacaatcaccataagacgcgggttgttgtccctatttcacaattcatcacttccaggttggcactgctgggggagaaatcagtggcagcggaagagagtcgacgatcggtggaggcggtggccaggcacctgctagcccgtttggatagcgagaaaaacgtttgtgagaacagcctgggaccgtggcaacacaacatcaacctgggcccagaggatgccccaaaaactggccgcccgtggtgtgccgacgacgacaaccgcctgcgttaccacgtctccaagctgaagggacgtcgttccaatgtccagcataccattgtcagtttggaatcacccttcagcgacatatacgaaagaaagcgcctggctttggaaaaggagcacgaacttcggagcgcggacaagaagtcacccattgacttggagacagcagtgattatgcaagaaatactcgagctgcgggattcgaatttgcagctgaagacaaaaatggaagaggccgagcaggaacggcagaacgccaacgaacgagtgggcatactccacgaagccctaaagcagctacaggcaaacaaccgggtctcgtattcggaggcggagcatgcggctctcacagagcagcagttggtggaggccttaactcgagaaacggagctcaagggtcgcatacagacgctattggcaaatgtaacagcttcgcagaaggccttcgacgaaaaatacgagcaactgcatcagaacgtgcgtgaactgcagaaatccaaccagtaagattcgttttattttgactgtttcatacataatttcttcatatttcccttttagcaatctgggccaaatgttagatcacaccaagcgcaagtaccagctgcgggtgaggaagctagagcagaagattgttgacctgcggctggactacgagcaaggccataaccatgttcctgagactactctgtaggaaacgcatgacgaccttccaggaggactgagcaactgggcgtggagcgggcgcgcttgtcacatatcccgcaaaagatctttccctctcgatcatatcgcttattttacctttaatgcaatgaccacccgcccagcagtcgccgtggatccgccatgaccaagacagtatcacgaatgtgccatgcgacttaattgcagtcggctggggcttgggcggtgtccctgcctcgcagataaggctgcagtaactacatactcaaatacatacatattcagaggtgccatgagcaaggctccaccaacctatccatagatccgtgggattggagcatccgtctatgggccacaagcaattacatatacacacatacgaatagacaaactaaggagttattcaagacgcatacacgggatcctatatttatacaatgtattcgcattttgcttgttatatgattcaatatgtatttaaaactgtacaaaatataaaacgtctactaaaactcgataaaattcacgaatttgaaattggctccaataattaatcgataagctaatgaaactaacttaagcatccatcaccatttcgtgtagtgttgcaaatcaccagaatcaagtatatgagtacttgtgaaataaaaatgttttgaaaatttaacttaatttacttaaaatgagtgccacagatgcatctacagccgatagtggcgctaaacgaaaatcttctgaagatatcacacacaattgcaacgcaaattttggcgcagaaaacggcctaagaaagcgcgtaaaatcggaggagcctgtggcgtccattaaagatgaaacaaatcctgaagttcctatgaaaataaaagctgagccagtggagaatgcagatgagcccacaagcactactcctgcgatcaagattaaagccgaaccagcggacaatggaaactcacctgcagctgcgatggtaaaaaccgagcccactaatagcaatgcacaggacgccgccgacgagtctaccgtatcttcaagcagtattaggacttcttgtcgcttcggcatacgatgctacaggtgattcacactaaccaactcccatattaccaactaaaaatatacctttttccaatgacaggcgaaatccagctcatcgtagtgcagaagctcatccgggggatcaggattaccggcgaccaaactttccagcgccacccctcggaactccagcttgtcctttcggtaacgcatgctatcgccgtaacccagttcacttccaggattactcccatcctgcggattgtaagtagaaggcttggcatacttcggcttcaaattggctaaagcccattgtagtcaattccgcgcagaacattcgaaatcgtctgcgtcaacggcgagcccaacggcagaacgacgatgactcggggacggatgaggaggatgaaccctttggtggcgacaatgacagggatgcggactaccgtccaggcgcagacataaacgaagatgaggatga

SEQ ID NO: 13172 - DNA, 2553 bp, DROSOPHILA
cttccgcgcagcttgagctgcctgtgctgcagcgatacgccatcggtgcccaacgacaagagacgcagttgggagtatacgctgatggctcatcctctggccagacggcccataaacgtgatgaccccaagaataaccacttagaaagctctaatccgcctcttttcttttgattcacctccaggttgagcaactgtcggtacaacagctagaaaaccgggtgcgggatctaacgcagcgtctgcagcaggcggaaagacagctcactgagagcaacacagagcgggaaatatgccacaagcgcttggaggttgtcagccaggcccacgagtgtcgcatcacagagatgcactgtgtcatcgccgagttaagcaagaaattgcgcagtaagcaggaccacgttatcatggaggagcaggagcccgacggcagcgaactcagctttcaggagggttcagtgtacaattccgagcttaacctcaccaatcctgatgccgaatgtcaaacagaaccactggaagacttcgagggcgcctgcagtaccaccagcgtgggtaacgttgcccacaaaccgccggaactgagccataagggacaagtggaggcactgcaggaggaagttctgcacttgagagctcgaatcgccctcctccagtccgagatttccaccaaggatgctgctgtggtcgaggaacagaccaaagtcgccttcgactgcgaatcggaagtcaacgagtgcggacagcgactgaatgatttgaatgtttgcacttccttgacaagtccgcaaaaacgcattccagcggtaccgaaaatggctgaacgggttaagttgcggtgcgccagcaaacatgaatccggagaagatccatcccaagatacttcattgagcaacgagcaaattaatctggtcgaacatttggtgtcggagctaaaggagcaaaatctatatatggagaactttatggagcccctacatttgagcaaagacttggagcgactgcaacgacgtgttgaacaattggagatgcgaaacaccatgctggcactgacgctagacgaatgcaaggagcacactgagcatctgtatctgctatgcggaaagtacgagtccaatgcggttgctcttcagttggcgcttaattgcagtgatcgcgccatcgaggcctacgacgtaatgttggctctgctcgaaagcaagttggcactgctgggggagaaatcagtggcagcggaagagagtcgacgatcggtggaggcggtggccaggcacctgctagcccgtttggatagcgagaaaaacgtttgtgagaacagcctgggaccgtggcaacacaacatcaacctgggcccagaggatgccccaaaaactggccgcccgtggtgtgccgacgacgacaaccgcctgcgttaccacgtctccaagctgaagggacgtcgttccaatgtccagcataccattgtcagtttggaatcacccttcagcgacatatacgaaagaaagcgcctggctttggaaaaggagcacgaacttcggagcgcggacaagaagtcacccattgacttggagacagcagtgattatgcaagaaatactcgagctgcgggattcgaatttgcagctgaagacaaaaatggaagaggccgagcaggaacggcagaacgccaacgaacgagtgggcatactccacgaagccctaaagcagctacaggcaaacaaccgggtctcgtattcggaggcggagcatgcggctctcacagagcagcagttggtggaggccttaactcgagaaacggagctcaagggtcgcatacagacgctattggcaaatgtaacagcttcgcagaaggccttcgacgaaaaatacgagcaactgcatcagaacgtgcgtgaactgcagaaatccaaccacaatctgggccaaatgttagatcacaccaagcgcaagtaccagctgcgggtgaggaagctagagcagaagattgttgacctgcggctggactacgagcaaggccataaccatgttcctgagactactctgtaggaaacgcatgacgaccttccaggaggactgagcaactgggcgtggagcgggcgcgcttgtcacatatcccgcaaaagatctttccctctcgatcatatcgcttattttacctttaatgcaatgaccacccgcccagcagtcgccgtggatccgccatgaccaagacagtatcacgaatgtgccatgcgacttaattgcagtcggctggggcttgggcggtgtccctgcctcgcagataaggctgcagtaactacatactcaaatacatacatattcagaggtgccatgagcaaggctccaccaacctatccatagatccgtgggattggagcatccgtctatgggccacaagcaattacatatacacacatacgaatagacaaactaaggagttattcaagacgcatacacgggatcctatatttatacaatgtattcgcattttgcttgttatatgattcaatatgtatttaaaactgtacaaaatataaaacgtctactaaaactcg

SEQ ID NO: 13173 - protein, 565 aa, DROSOPHILA
MHCVIAELSKKLRSKQDHVIMEEQEPDGSELSFQEGSVYNSELNLTNPDAECQTEPLEDFEGACSTTSVGNVAHKPPELSHKGQVEALQEEVLHLRARIALLQSEISTKDAAVVEEQTKVAFDCESEVNECGQRLNDLNVCTSLTSPQKRIPAVPKMAERVKLRCASKHESGEDPSQDTSLSNEQINLVEHLVSELKEQNLYMENFMEPLHLSKDLERLQRRVEQLEMRNTMLALTLDECKEHTEHLYLLCGKYESNAVALQLALNCSDRAIEAYDVMLALLESKLALLGEKSVAAEESRRSVEAVARHLLARLDSEKNVCENSLGPWQHNINLGPEDAPKTGRPWCADDDNRLRYHVSKLKGRRSNVQHTIVSLESPFSDIYERKRLALEKEHELRSADKKSPIDLETAVIMQEILELRDSNLQLKTKMEEAEQERQNANERVGILHEALKQLQANNRVSYSEAEHAALTEQQLVEALTRETELKGRIQTLLANVTASQKAFDEKYEQLHQNVRELQKSNHNLGQMLDHTKRKYQLRVRKLEQKIVDLRLDYEQGHNHVPETTL

SEQ ID NO: 13174 - DNA, 7738 bp, DROSOPHILA
aggcaacatttaatggccactggctatggggctatatggctatatggctaaaaagctatagggctcatcctgaataaacaggggttggtgtgtgtgggtgtgtgcgactaggtgtgtgtgtgtgtgtgttggtgtgcgagaagttgacgttcgtttgtgaaaacgaagaaagtgattaaatcagcacgatattttgtaggtgtgcgctagctcacccattaaatttctcccatccgcattcgtgtatgtgtgtgtgtgagcccgcacacacacctacacatttgagctactgttctaaattgacttttcgcctggacaaaactaaaaatgacgacatcgcgttttttttcgctttcatagaaaagctttgcctctaaacatgcccatcatgcgcgtgtttataaacaacacagatctcttaccaacctgtatataacatttatatgtatatatatatagaaaggtgtgctgggcctccgattacactcccacatgcatgttcgcacacatgtatgcagttaccaaatatgggaacacacgttaatgtaattaagccttaaggctggataaatgccaactcgagtcgtatattatttgcgatattgcaggcagttataaattaacttctttatgactgctgctaatttggattttcaattcgagtgcttgttattttgggtgttattttaaaagaacttaaacagcttgaagataaggtttcaaaaacgttaagccattatcattatcccaggactgcctcatttttggtggaagcgatttcttacattttgttacaatttaaatctgtattggtttttcacgcaatatctttagtttaacgaatatcatatatcctatcttgaacttcagcatttcgaaaacggtttcgagtggctttgaaaaaccagtaagttccgtgcaaatacccctaatgaagttcaatcggcgcgaatcagtggttcgcgcgcttatcgataggcaatgttttggttttgcttgctttcggcataaaaacgtaattttcatgcggtttttgcggcaatttagggacgtttttcgtttggcaagtggtgtttgtgttatgaattaaagtaacatttaactcattcaattgaatcatcgcataaagcagagtgtttttgtgtttgaaactgaaatctgcgcacgtgttgactaacttgttgttattattatagcgttgcttagatattctagtaaattggccgcaaatcaaaaactataaacaattctcgtggctgttgaaaatggagagttccaaactcttgagaaatgcacaaacccagcatggagatgcctcatccgtggacgtggaaaacatattcctgcaccgccatatgctatacacaaatcccacttcggatggcaatctccatgatcgggaagattcccccgaatgcgtgtggtgtccagacgacaaggatggtagtccagctgaaagcaaagatccaccggtgagtagtgataagataagacattctattaagtacatagatccggttactattatatatcaagatatcatacaatatataattacatatgatccgcattgtttgctgagtataccttgtgtatttataaaaaagaaaactaaatttttaaaattatatactgtatagttataattttttaacattacagaaatgttagaaatatattgtatattcaggaatatatttatgtgtaaaatccagctgaacttgattaaatgccgttttgttcatgcacttgaatgcatatttgtttaccctggcgtgtcgccctccattattaattcccatttatttacccgctttatagcgaggaatccgcggctggcgaccacttctccaactttgaccgattcgcagctagtaaaagagcatatttatcttgggggaatcgaatgcccaaaacaatttagtccggtctgctcgcaaattgtgtggattcggattcctgtcctcacttatgcagtattattggtgtcgagggaaatttcaatgcagcagctccaatcgcacacttaaaacttaattaaaaagctaatcagggagtagcaaatgcaatttgctgcattaatttaaacaattaattaggtacaatttcaattgttgtaatgctcttcatatctaagctcattcatactgtagtagtttaattctaaattgacgtaataaactagaggcaaattaggtttttgattgaagcttaaagtgttgttttgtatttattcttcagaaaaagtttcgaagtaagttgcaaactaattaataacaataatgaaagaaagctcaaacagcattgcgtgacacccacacatgtgagtgaaagaaatgggtttatttcagttttattctattaccttaaagtttcgagagtcataaaattgtatataaacatgcggtggagccaggaggagtagctgcaccctggtacctggagatttaagccatttttacgagactttgagtcacaaatgccccaataaacgagactgcagtcagtgcctgcagtggaagagtcaacgttctggccgccatagaaatttaaagccacccctaggcgtcagtagattcttaaaaatttagggctttgctaagatgtgcaacaaaaaccagattttagacaaaacccttaatggcccacaaaaaccggtacaggcatgctagtttcgtggctttttgtttgctggttcctccacctcaacgtacgtgacagtgtcaaatggccttaaatatttagccagagtgtacacttaaagcgccagacccattcctaattctctctcgctaattaaactaatcaataaactaaaaaccggagtgtatacaaacgcatatacattatatacatgtatatatatgtatatagggaaatagctcgaggttgtcgtctgcaaggagttaagttatgtgtggggaccaactggacgcacgaatggacggacacgtttcacttgccttcgtagatattttaccacggatttgtcataattagttcttttttgggtggggtttcagtgggtttctagtgtcccggcatctcgcgcggtggctgcctaacgagctacttttgtcaagttggtctgttggtcgtgatgtttccgcaattattagtgtcagtgcctcgtgcttacgggcgggtgggtatcctaagtgcggtcctcattgtttccgcgatgcgccttttgggccagtcgtttttataattcttacaataccatgtaaacacgcattacgaaaaccgccgcggatggcggttactggtttgcaggaagaggaaaatccctctaagacttggtcgcctgcactccttttccattttccattccactgacactggcttgcgccatcaaactgaggaattaaaagggaagataggctgcctgtggactaagtggctttgcggatcaggcacactttgcgcaattaactaaataaataaatgtatagaaaagtggttgttaagaaaacataagccttgtcattcgaacatatcaaatattcccaaatcttgccactttaaaaactcttgttgggctttttgcacagacacaatacctattttttttaataaggtttgattgcatcccctctgttaattataattaacaggtaatattaatgattttaactttctttttgtggcataataatggtggcatattgacttggaacaatcaaaagcattatttatgttgactttaatagccaaggacaaacaaaaaattatgaaataaataaaaataacaattgcattaatatgtaaaatctgtgtagtatatatattaattaagaccataaagggaacaaaacccatagagatggcactttcgaatgtgttgagatatctgcgaggcgccaaattgaattgatctggcaacgctaagttgaatttgttatcaatgtaggttaatgtgaagaaaaagaaaaatcgtgggtttgtttacaaaaaagcgcgataaaaatagaatgcgaattggcggcaagtgaggggagccgccgatgatatccaatttgtatgataattatgcgcacaggtgtggacggattggaaatgtgccatcaagagcatgtggaaacagaaacatgagccaatgaaggcgacggaagaagagcatgtcattatcctccagttggataagttccaagatgctgatccggatgaaatcagggtgtatcaagaagcagtacccaagggagttagctcctctagtcttaaaaacaccgcctaacaatataaaaaccttatcgaaacccattgttagctgataacagctttagaataatctctgcaggatcagaggtcactgcaattcttaaggtaattgcaattcttaaggtaattgctgtagagcttcgtgaaactacgaggaccgacgcagaatcaatgatgtctatggcacttgagatgtggagaagggagggcagcacaaaaatgataaaaaatgtttgtattttatagttttaaactttgcataacccttaaacaactcaagagacctgttttattatggacttttgtctatgtttgcttcctggctagaacatattggctggtagaccagtaaccaacaaaatactactggttcgcagccaattttgtagtttttgttttccttttagtgtgcaacaaggaaaaaacaaacagtctgtctgaaaattatgcttgggctgcagaatgaaaacgaggaattgtttgcacacaaacaccggaaacaaggctccaatgtgttaagagctgataagctgataaggatacatatatgatgactttggcacggtaggctttcgtattttctgtatcttcaagagtgaagttcctcaaatctaaacgaattttctaaatagtaagcaattgttcagtttaaagcaagaactaaaggtgtttttgctcaaaaataaaaagaagacattcaatgaagctgaaaatattttaaaaaactattaccacccgtcgtggtttatcttacagatatccatatcagaggaaaagtctgaaacgcaatcaaaagaagttttgtcggaaaagcgaaaagctagcagcacagatgacgaagggcatgtgaaaaaagtaaaattagaggccaatagtctaaaaacgaagcgtcctggattcagcgatgaaagatacgacgaaacatcgtattattttgagaatggtatggccaacatattaataaaccaacttagaagatattctgttataaaattgcaatctataggtctgcggaaggtgtatccttattttttcacattcaccacgttcgccaaaggacgttgggttgatgagaaaattctggatgtatttgtccgcgaatttcgagccgcaccgccggaggaatatgaacgcagcctggaagcgggaaaattgactgttaactctgagaaagtgcccaaggactataaaatcaagcacaatgatctgctggccaatgtggtgcataggtaagcatcagcaggaaatctcatttgaatatgcacacatttgcattctagacacgaagtccctgttacttcacagcccatcaagattgtgtacatggacaaggatattgtggttgtgaataagccggcatcgataccggtaggtatactaatttggaaggaatttgatttaataacaatcgtatgttgtaggtacatccttgtggaagatatagacacaacacggtagttttcatcctggccaaggagcacaatctgaagaacctgcgaaccattcacagattggatcgtctcacatctggcctacttttgtttggacggactgctgaaaaagcccgcgaattggagctgcaaatccgaactcgccaagtgcaaaaggaatacgtttgccgcgttgaaggacgctttccagagtaagtccaaaatgcatctaatcttttatatatctgcttatttttcatatctttcgtagtggcatagttgaatgcaatgagaaaatcgacgtcgtgagctacaaaataggtgtttgtaaggtttcaccgaagggcaaggactgtaagaccacatttaaaagaatcggcgaggtgggcagtgatagtattgttttgtgcaaaccactaacaggacgaatgcaccaaatacgagtgcatttacaattcttgggtaagtgacaaccagataattccattcaattataacactcgtatttcacaggctatcccatttcaaatgatcctttgtacaaccatgaagttttcggtccattgaaaggaagaggaggagatatcggtggaataaccgaggaacagttgatcagtaacctaattagcattcataatgcagaaaactggttgggcttggaaggagatcaaatcgtatcaggggaaataaaagacgtagcagcaagtacttcagtagtagaggctccctcagtagttcaggctcctattaatagtgaaactgaaaagcctgtgatttcaaaaaaccttgaaccaagtaacgatgtaagtaacttaaaatagttgtacaagtctggagaacacaatgcttataggctactgcacagattgccacccaaacgtgctatgaggaaccagacaggtcctttgattccaagaagacaacttcggatccgcaatgttctgaatgcaagataaactacagagaccccggcacaaaggatctcataatgtacttgcatgcatggaaatacaaggtcagtttcaaactatacatttttaaagatttaatttcaaattaaatcttattttcagggcgttggttgggagtacgaaaccgaattgccggaatgggcgtgtaattcgaatattgattacgataaagtataaaggaaaaattgattgcaaacacgacgctttagtaaaaagaaatatttttacagagtttaacaaattgtgtttccattttatcttcatttgtagcattgttttattactttgccgaattactttatcattttgcggtgcaaggggatgtcctcgtggagtattatttatcgtcgtgcagtggatgtcctaggatgccaactatcctggataatactttgcaagaacttcacctgaacactctgctcacagtggtttcagttaactgcagttctgcgaatttttaaaatttaaaaccacaatcagttggcgggaagggaatgcccctaattctatcgattagttggttcttatcgataacggacggggcaggatatgtgtcatctctgtcggacatctggcgcaaatgaaatacaaataccgaattaaagcagcaaaacaatgatacacgatttgttattggcttgccggagccacaatccggagcagctgggtataaaggcattcaatgtaagtaaaatcgttggaaataaataatttcgaaagccttacaagcgaactttctaggaaaccacagtcattgaccagttcatacatccttgcgagcgggagatatttatggacattataaaaatcattaaggtttaccaagaagttgagcagtttacccattcatcgggaagaaagtccgacacacatggcgaacttccaggtataaatggaaggttgcatagtgtttttaagatttcaaatgtgtatttctatcgcagatagtttgcatggttactacttgctcaatttggccaagggcattgaaatggctctggaggagtactacgctgagatcggacgtctggagaagtattgtttgggtaacgagcgcaattcgctctcatatgtctacaatgccctgtacgccaagttcccccttctggtcttcat

SEQ ID NO: 13175 - DNA, 2002 bp, DROSOPHILA
tttcggcataaaaacgtaattttcatgcggtttttgcggcaatttagggacgtttttcgtttggcaagtggtgtttgtgttatgaattaaagtaacatttaactcattcaattgaatcatcgcataaagcagagtgtttttgtgtttgaaactgaaatctgcgcacgtgttgactaacttgttgttattattatagcgttgcttagatattctagtaaattggccgcaaatcaaaaactataaacaattctcgtggctgttgaaaatggagagttccaaactcttgagaaatgcacaaacccagcatggagatgcctcatccgtggacgtggaaaacatattcctgcaccgccatatgctatacacaaatcccacttcggatggcaatctccatgatcgggaagattcccccgaatgcgtgtggtgtccagacgacaaggatggtagtccagctgaaagcaaagatccaccggtgtggacggattggaaatgtgccatcaagagcatgtggaaacagaaacatgagccaatgaaggcgacggaagaagagcatgtcattatcctccagttggataagttccaagatgctgatccggatgaaatcagggtgtatcaagaagcagtacccaagggaatatccatatcagaggaaaagtctgaaacgcaatcaaaagaagttttgtcggaaaagcgaaaagctagcagcacagatgacgaagggcatgtgaaaaaagtaaaattagaggccaatagtctaaaaacgaagcgtcctggattcagcgatgaaagatacgacgaaacatcgtattattttgagaatggtctgcggaaggtgtatccttattttttcacattcaccacgttcgccaaaggacgttgggttgatgagaaaattctggatgtatttgtccgcgaatttcgagccgcaccgccggaggaatatgaacgcagcctggaagcgggaaaattgactgttaactctgagaaagtgcccaaggactataaaatcaagcacaatgatctgctggccaatgtggtgcatagacacgaagtccctgttacttcacagcccatcaagattgtgtacatggacaaggatattgtggttgtgaataagccggcatcgataccggtacatccttgtggaagatatagacacaacacggtagttttcatcctggccaaggagcacaatctgaagaacctgcgaaccattcacagattggatcgtctcacatctggcctacttttgtttggacggactgctgaaaaagcccgcgaattggagctgcaaatccgaactcgccaagtgcaaaaggaatacgtttgccgcgttgaaggacgctttccagatggcatagttgaatgcaatgagaaaatcgacgtcgtgagctacaaaataggtgtttgtaaggtttcaccgaagggcaaggactgtaagaccacatttaaaagaatcggcgaggtgggcagtgatagtattgttttgtgcaaaccactaacaggacgaatgcaccaaatacgagtgcatttacaattcttgggctatcccatttcaaatgatcctttgtacaaccatgaagttttcggtccattgaaaggaagaggaggagatatcggtggaataaccgaggaacagttgatcagtaacctaattagcattcataatgcagaaaactggttgggcttggaaggagatcaaatcgtatcaggggaaataaaagacgtagcagcaagtacttcagtagtagaggctccctcagtagttcaggctcctattaatagtgaaactgaaaagcctgtgatttcaaaaaaccttgaaccaagtaacgatacaacttcggatccgcaatgttctgaatgcaagataaactacagagaccccggcacaaaggatctcataatgtacttgcatgcatggaaatacaaggtcagtttcaaactatacatttttaaagatttaatttcaaattaaatcttattttcagggcgttggttggga

SEQ ID NO: 13176 - protein, 569 aa, DROSOPHILA
MESSKLLRNAQTQHGDASSVDVENIFLHRHMLYTNPTSDGNLHDREDSPECVWCPDDKDGSPAESKDPPVWTDWKCAIKSMWKQKHEPMKATEEEHVIILQLDKFQDADPDEIRVYQEAVPKGISISEEKSETQSKEVLSEKRKASSTDDEGHVKKVKLEANSLKTKRPGFSDERYDETSYYFENGLRKVYPYFFTFTTFAKGRWVDEKILDVFVREFRAAPPEEYERSLEAGKLTVNSEKVPKDYKIKHNDLLANVVHRHEVPVTSQPIKIVYMDKDIVVVNKPASIPVHPCGRYRHNTVVFILAKEHNLKNLRTIHRLDRLTSGLLLFGRTAEKARELELQIRTRQVQKEYVCRVEGRFPDGIVECNEKIDVVSYKIGVCKVSPKGKDCKTTFKRIGEVGSDSIVLCKPLTGRMHQIRVHLQFLGYPISNDPLYNHEVFGPLKGRGGDIGGITEEQLISNLISIHNAENWLGLEGDQIVSGEIKDVAASTSVVEAPSVVQAPINSETEKPVISKNLEPSNDTTSDPQCSECKINYRDPGTKDLIMYLHAWKYKVSFKLYIFKDLISN

SEQ ID NO: 13177 - DNA, 8739 bp, DROSOPHILA
aatcatggttggtactcaaaatctcaaagtattacaacccgactgggattttaaatgatgaattgatctgattcttaaatagccaactacatatagaaaaggcgagagcgtaattccagaaaatttttcttatcgccctcgttcctcaataggataatggctgatatcaccatctgatattatcgtgctaaatgccggtcacaatcgcatgtcttgccctgtcctgtcctctccttggacccaccgcataggcgccacaagtcggggctgatgttcccgctccggaagtccagagttgcagagagctgataatgataaatacaattaaatgacgcggggaatgctgacaacatcaagtgcagagcactgctggaagagaacggcccaatcccagaatccctatctgggaacgtcaatccgacgtgcctgaggaggttcgtgaggcgctacaatggcctcgcatccacactcactctcgcgcacacacaagcaaacatacacagaggctgcagcacacacacactctcactcaagtggcactcttgagagcggcagagaaagcaacaggaaagagttagagcgggatgacgtgcggcataaggactcggttcacatcgtacgtctcgctctggcgacgaatggtggttggttctctcggtggttgaataggccactcacattgttgccgtatccttgttgaaaaggacataagaagccacttagcgcgcccaacaaagccgagagtctctccagtctggctgtgtgcgtgtgtgtgtttgtgtatgtgtgtgtgtgtgtgcgactatccgagtatctgcgttatgtacccaatggcagagggatgcagatacagatatgcaccacatacatagtgatacccaaagacaccccgagcatacgacctggtacttttctgccgttggttgttgggttttggttattggctgttctgaagcgacttggactcgtgttgagttcttgatgcctcgttagttgttgatgacacttcagtttggaatgtgtagagtgcgctgctccgcggacccgtgcaactgagaaatcgagaaacgactcgcgacccttgaactatcgaactttcccggtgataaacttaaacttaagcctaaatcgaactatgtctggaatttaagttgccctaccaggatacccgcttaattcatcgcagtgctacccagtaactacacataaacatattttttttccgtgctccgaacaccgtaaaagctccaaagtggcggagaaacgcaaaagtccgcccacgccgccacccgcgtcgcagcgtagtaaatcaaacagtggttccccgatatcgcaaagcgatatgaccacgtcggcgtccttggagaggaccccctcaaagcgggatcgagatcgcgagcgggacaacagcagcggtctgggcagcgctggcagcttgcccgcatcgccccaaagcgctatcacggtgagtccgtcctccccagccacgccgaagcgcccgctgcgcacctcaacgccctcgctggagcggaagagggagcgtgaggatcgagaggaccgggaggatcgcaaggagcggcaggaacggcacgagcgagacagagatcacgagagattcgccgcagtcttcagcaccgccagcaccaccgtgcccacgaacacaagttccagttccggattggcgcccgaacagctccgcattccgacgggtgcagccgccttcagcggatttccggggctccacagcatgagtagtcttatgcttccatcgtcggcggctgtggccgccgcagcagcggccccgtttctgccctggtcgcccatcctgctgccgccgtggaaccacgccctcctaccagccgccttttatccggcggccctgcgaaacgctttgcctgggtaagcacaaggattccaatggaataattaaaacattgatacctctggagtggtgaacacaaacctatgattcatatgtcttggttacgaaaagcatattttggtgatacgttgacacaagtccattctagttcttctaattatgacctctgttttgtgggctatttataaacgcttaagcattggtaacactttgatggcatggatctggccaagatatggataataaggacatgcctcagattgaaacaaaattactgaccaccgacaatacgtttgcctttcatggctgaccactttgtaaaaaacagatatggttttcaaggttttgggttcccgattaattttctatgtctttctattaattctcctaatctaataatttggaagattgggcgttgaaagcagaatctgcagaatacgcaagaccattaattaattctcctaatctaataatttggaagattgggcgttgaaagcagaatctgcagaatacgcaagaccagccatactttgcaattgccttcgcctaagctccgacttaaaatcacaccctgcgagcctctgcctccatattagtgtttagatcccatatagctgatggacttgtccggctaatcctggtagctctttaaattaaccaagcgggcacagcgcgcaagtacaggacacagggtataattccccgcctctttgatctggcaagtactcaaggtcctggcgaatggcggttgggaaattctggcttgttgttcgaccctggcttagaaattcccgtaggtgagagccagggaaaccccaatcgggaatgacatgtgtacgacagacatgggactcagatgccttcgagatactggcgtcacactgtctggcaatgggatttccgctcaggaggacggggaatgcccgtgtagcctgtccatagcgtgggaaattcgcgagtcggggtcttcgggaaaactcgaaatgggaaaaccggaagcaagcaaacttgcgccaacatgtggcacgacctgtttcgacccgtaaagagtccctgctgacctgtgctgacctgcactgacccgaccaggtagctgcgatccttacgaggcggatttgcgtttaattgttgatggtattaggcaaatcaaaactcggggtctgaccgggactaggtgtcaataatccagcgatttgggtgcacttattcaaagttaattccgggggaaatgtgcgcgttttcggttccgaagcatgcctgcaggatgcacaccccccacctccttatcttcttaacaacggcaagtgcaaaaatctgtgaaagtcagagcgctacaggtagtgcaggtagtttcctttgcatatcccgaccaacagggacctccttttgttaaaccttccggccattcacacgattgacacaggatgtcgctgcaataagcatgaaacagggaaaaatcgttccacgtcctctaaggagccatctttatactcggggagtcattaatcactcgattatatgacaatttgccgggacaattaagaaactacacagaatctcaagaaaaactattacaactcatctttggtatgctttttgcctttttttctttaaaactgtaggcgagtgctcaattgaaatgagaaataaacatttaactcaaatttttagtgttgaagttcagttagaattaacatattgatctccttgcagcttattcgatgcaaaggtgccgtcgtcccaacgctctggcttccatatatcggacatcttgaatttggagggctctgagctgaagaatgcagcagctgccgccgctgctgccgcccaccatggcagcgatttgagtcaccactcggccagtgagtccaccagtggacatcgcggccagggatctcacacctcgccttcggcgctgtcgcccacgccagcgggcgtttccgcggacgagcaccacaatggcagcgggactgggggaggagcgggagaagcggatcaccacagcaccaccgagcatcacgcccctcctagccatccgcagcaacagcacccgcaccaccagcagcaccaccaccctcacctcctcctcccgcagcagcaccatcagcaggcggtggccccactccctttggcgcaccatcagagcggcgaagcccaaagccacgcccatgccaatgcagccgccgcccatctgctggccagccacaatgcagcggctgcggctgctgtggccgccggccaatatctgcccaacctgcccaagaacttcccggggagctttggcgacgagatgtcctcgtaccaccacatggcccaaaccatgctgcagcactcgggcaggagtgcgtggatcaaggagaacgagctatacggtgagcgaatgtttcaactcataaatggatacgcatgtatccattttcatttgctccatttccaggagatagctcctggccatatcaataaccaagttagagttggctttttgaagaagcaacacttaaatggcaggttgtaagcaagtctttggatcccaaacaaatatccttttgaatcgtgggtaggcaaaagagcaacgaattaacttggtttcaaaatagactcatcaatgaagtccgcaggaagctccctttaagaaatttacaattttcgactgcatttaacccccgattaactggccgactaatgatactgttccgtaactaaccactcactgctcccgagagccagagagttgaagcagtcgagcgatgaggcagctgtatttgcataccctgtggactcgacggattcacgtgcttccagggtgtgacaagctttgtttaattctggccctgttgtgttttattttcgttggcagttaactgcggatcgaaatgggtatataactgggaatcaaggagcaggggttgggcttcccctttaatcatgactaatagtttgtatgcgcttcacacttgaggattagccctgttgtttttctggcagttgacgtccttcgtgtccttcggccaggacattcaatcgctgcccgctcgatcgcttcttgttgttgcggcccaaacatttctcatcctggaaatttatggcacgcacttccgcctcatcccttcccacttctgttattattcctttattgtttagctacaaattatagctgctgcccacttgccgtttttttattttctcttttctgctctttttttgggagtttccacagctgtgaaggagtcgaggaagagtcattttgattatattaagttattaatttgttgagttgtcatggtgagcgcatggcttccgtggcagggcaaatgcggctagctcggtgggagctgataggcgagcattaggagctcctacgacccttgcatttgttgttttatcaatgtcccacggggacatcaccccgggcaggtgaatacacacattagaagacattttatgaaatacattgcaataggaatagaaatgcagataggacgcgttccgattctttggaatgctgccttcgcagcactatatccaaaagttcgaaagctaggaagaactaaagggcttctttttgattttctatagttacatgcctcgtttgaagttgcctgaatactggcataagcccacttctaatacctctgcaaccgcagatcccgccccagaatatcagaaatagccacacccggcgataaatcactaaatcactatctgttggaagttcggaactcttgcgaaagggggcgaaccggaagagacccggctaccattgatgtgtttgaggtctggcttttgtgtcgttgtcccattagtatcctggttgctggtttttagtacaggcccaggatcagcagtcattcagcgagagatcgaagcgatcgtttcaggtagacgacaagggaatacccacctaggcatgtatttttgtatgtatttgtgtgcgatctctgtttgtctccgcctaattggcgttgttagggtgaagctcgtaggggatgggcaggggttgatttgacgctgcggaccataaggagtgcatacatctggcatttgacatttggatcgtttccgaccacagcttcatgttgcgcctaatccaattgccgtagttgcgatactgacttcccccttttgtcccgaattctgcatgatcacttggacgatgtggaggggtgtgtcgctacattaatttacggctaaagaggtttctcaattgctgacaaattcccacccagggctcgcaccctgccattgcctttccattctgtaggaccattgtgaaaaatgcaaataaataaatggctatcccaagcaatttattcctcaattagcagcatattaagaagggagttttctcccggttttagccatatatctactacgaagaattagcacattaaccaaaaccttgatttcctctttgatttcaggtacccagcagcccgccagtccggatagcacctccccagttacctcggaagtgtcgtacacctacattggttccaactgccagacatcgcctgccctttccggcgattacaagagctacagccggtcggccgatagcgatgcactatccgtgggcgacgccctgcacaccctccatggatcctctggtaatggaagtgccggaggcgctccgacggcccatgccctacacaacaacaataataatacgacaaacaacaataaccacagcctgaaggccgaggggatcaacggagcaggcagtggtcacgacgatagcctcaacgaagatggcatcgaggaggatatcgacgacgtggacgacgccgacggcagtggcggcggggatgcaaatggatccgacggtctgccaaataagaaacggaagcgacgagtcctgttcaccaaggcgcaaacatatgagctggaacgtcggtttcgacaacaacgttacttgagtgccccggaacgcgagcacctggccagtttgatccgcctgacgccgacccaggtgaagatctggtttcaaaaccatcgctacaagacgaagcgggcgcaaaacgagaagggctacgagggtcatcctggtctactgcacggccatgccacccatccgcatcaccccagtgccctgccatcgccccgtcgggtagccgttccagttctggtgaggaacggaaagccctgcttgggcgatagttccaaactgggagccgactgcgtctccgtgtcatcagccaccgccaccgccatgcagaatgccgccgcccatcacttggttgccctaaatggagcggccgcctatcaacatgccgctgcagcggctgccggccttcacgcccacgcccatgctcatgcccacgcccacggacacggccatccacacgcccacgcccagagggccgcctggtggccctaatattgctaggaactggcattcacgggactgggggcggataggtggatagtcaggcccgtggagcgatgagccagaagaccacgcctccagattcccagtgaagccaagtaaaagaatatacaataataattgaaacacatacaaacccctactagcgctcagtctcccggacttatccttgagtcgtttctgtacatagttcatatatataatcatatatatacctaaatgacataaatttatccattcctggatatcagaccaatgcccatgacaaaagaaagctacatttccttctaaataaaaatcaatttgcataatactagtgtctcttgtcaagcgcatttaagtcgcataaaatttagaagtagattcattttttttattttttttttttagccctaagtccaatcccaaagataaaatgtgtaaatataatataaaaatgaagtaaatctgaaaaatagattatttcaaaagagaaataaataataggaaatatgcaactaaatctgtactatataccatataatcaattcaagcgtaataagtgttcaaattttttagacaaaacttattggccttttttttctatgaatacatatataatataggcacttagtcctaacacatatttttttcgtgcgtgtgtgcgtgtatagagagtaaacgatctttgaatttatagcaagtaatgagttcataaattgtaacaaacaacaaagacagtacgctgcggagacggcaaatgtatccaaattgcacaacaaagcaaatcaacactacgaactgcaaagtacatgtcagagatttaataaaaaccaattacatacattaaagcaaaacgatttcattttactgccaaaacttaaactcggataaaggaccgattaaataacaatatacatatgcatacaagaccaagatcccatgagaaccgaaagaccaatttattgatcaatgcactaaacctacttgttatgttataagagttattgccccatgcactttatgggatcgtaaatggcaccctctcccgcattccgtggggtggtggcctacgtatcgccgggcttataaacatgttggacaaacaataaatatggtcttgattatggttgttagctaccgttctgcgattggcaccgtaatccgtccagttcgcttgattacggcaccagaacagttctcggtggatcggggatcgggaatcggcgaattgggaatgagggtaatggccataaagccagtggggccgataacgggagcccggacccggctggaaatacagggtaatcatcgactcttggcccggcaggcggagcaccttgtctgggggctccgatttggaagcaattaactacccgtactcccctatagccgatggcaaatcagttgggaagatatggactgcggcacagatatctcgctctgcaccgcttgacacagttggcacataaagaactcaaagtcaagtaga

SEQ ID NO: 13178 - DNA, 2994 bp, DROSOPHILA
tgacacttcagtttggaatgtgtagagtgcgctgctccgcggacccgtgcaactgagaaatcgagaaacgactcgcgacccttgaactatcgaactttcccggtgataaacttaaacttaagcctaaatcgaactatgtctggaatttaagttgccctaccaggatacccgcttaattcatcgcagtgctacccagtaactacacataaacatattttttttccgtgctccgaacaccgtaaaagctccaaagtggcggagaaacgcaaaagtccgcccacgccgccacccgcgtcgcagcgtagtaaatcaaacagtggttccccgatatcgcaaagcgatatgaccacgtcggcgtccttggagaggaccccctcaaagcgggatcgagatcgcgagcgggacaacagcagcggtctgggcagcgctggcagcttgcccgcatcgccccaaagcgctatcacggtgagtccgtcctccccagccacgccgaagcgcccgctgcgcacctcaacgccctcgctggagcggaagagggagcgtgaggatcgagaggaccgggaggatcgcaaggagcggcaggaacggcacgagcgagacagagatcacgagagattcgccgcagtcttcagcaccgccagcaccaccgtgcccacgaacacaagttccagttccggattggcgcccgaacagctccgcattccgacgggtgcagccgccttcagcggatttccggggctccacagcatgagtagtcttatgcttccatcgtcggcggctgtggccgccgcagcagcggccccgtttctgccctggtcgcccatcctgctgccgccgtggaaccacgccctcctaccagccgccttttatccggcggccctgcgaaacgctttgcctggcttattcgatgcaaaggtgccgtcgtcccaacgctctggcttccatatatcggacatcttgaatttggagggctctgagctgaagaatgcagcagctgccgccgctgctgccgcccaccatggcagcgatttgagtcaccactcggccagtgagtccaccagtggacatcgcggccagggatctcacacctcgccttcggcgctgtcgcccacgccagcgggcgtttccgcggacgagcaccacaatggcagcgggactgggggaggagcgggagaagcggatcaccacagcaccaccgagcatcacgcccctcctagccatccgcagcaacagcacccgcaccaccagcagcaccaccaccctcacctcctcctcccgcagcagcaccatcagcaggcggtggccccactccctttggcgcaccatcagagcggcgaagcccaaagccacgcccatgccaatgcagccgccgcccatctgctggccagccacaatgcagcggctgcggctgctgtggccgccggccaatatctgcccaacctgcccaagaacttcccggggagctttggcgacgagatgtcctcgtaccaccacatggcccaaaccatgctgcagcactcgggcaggagtgcgtggatcaaggagaacgagctatacggtacccagcagcccgccagtccggatagcacctccccagttacctcggaagtgtcgtacacctacattggttccaactgccagacatcgcctgccctttccggcgattacaagagctacagccggtcggccgatagcgatgcactatccgtgggcgacgccctgcacaccctccatggatcctctggtaatggaagtgccggaggcgctccgacggcccatgccctacacaacaacaataataatacgacaaacaacaataaccacagcctgaaggccgaggggatcaacggagcaggcagtggtcacgacgatagcctcaacgaagatggcatcgaggaggatatcgacgacgtggacgacgccgacggcagtggcggcggggatgcaaatggatccgacggtctgccaaataagaaacggaagcgacgagtcctgttcaccaaggcgcaaacatatgagctggaacgtcggtttcgacaacaacgttacttgagtgccccggaacgcgagcacctggccagtttgatccgcctgacgccgacccaggtgaagatctggtttcaaaaccatcgctacaagacgaagcgggcgcaaaacgagaagggctacgagggtcatcctggtctactgcacggccatgccacccatccgcatcaccccagtgccctgccatcgccccgtcgggtagccgttccagttctggtgaggaacggaaagccctgcttgggcgatagttccaaactgggagccgactgcgtctccgtgtcatcagccaccgccaccgccatgcagaatgccgccgcccatcacttggttgccctaaatggagcggccgcctatcaacatgccgctgcagcggctgccggccttcacgcccacgcccatgctcatgcccacgcccacggacacggccatccacacgcccacgcccagagggccgcctggtggccctaatattgctaggaactggcattcacgggactgggggcggataggtggatagtcaggcccgtggagcgatgagccagaagaccacgcctccagattcccagtgaagccaagtaaaagaatatacaataataattgaaacacatacaaacccctactagcgctcagtctcccggacttatccttgagtcgtttctgtacatagttcatatatataatcatatatatacctaaatgacataaatttatccattcctggatatcagaccaatgcccatgacaaaagaaagctacatttccttctaaataaaaatcaatttgcataatactagtgtctcttgtcaagcgcatttaagtcgcataaaatttagaagtagattcattttttttattttttttttttagccctaagtccaatcccaaagataaaatgtgtaaatataatataaaaatgaagtaaatctgaaaaatagattatttcaaaag

SEQ ID NO: 13179 - protein, 723 aa, DROSOPHILA
MTTSASLERTPSKRDRDRERDNSSGLGSAGSLPASPQSAITVSPSSPATPKRPLRTSTPSLERKREREDREDREDRKERQERHERDRDHERFAAVFSTASTTVPTNTSSSSGLAPEQLRIPTGAAAFSGFPGLHSMSSLMLPSSAAVAAAAAAPFLPWSPILLPPWNHALLPAAFYPAALRNALPGLFDAKVPSSQRSGFHISDILNLEGSELKNAAAAAAAAAHHGSDLSHHSASESTSGHRGQGSHTSPSALSPTPAGVSADEHHNGSGTGGGAGEADHHSTTEHHAPPSHPQQQHPHHQQHHHPHLLLPQQHHQQAVAPLPLAHHQSGEAQSHAHANAAAAHLLASHNAAAAAAVAAGQYLPNLPKNFPGSFGDEMSSYHHMAQTMLQHSGRSAWIKENELYGTQQPASPDSTSPVTSEVSYTYIGSNCQTSPALSGDYKSYSRSADSDALSVGDALHTLHGSSGNGSAGGAPTAHALHNNNNNTTNNNNHSLKAEGINGAGSGHDDSLNEDGIEEDIDDVDDADGSGGGDANGSDGLPNKKRKRRVLFTKAQTYELERRFRQQRYLSAPEREHLASLIRLTPTQVKIWFQNHRYKTKRAQNEKGYEGHPGLLHGHATHPHHPSALPSPRRVAVPVLVRNGKPCLGDSSKLGADCVSVSSATATAMQNAAAHHLVALNGAAAYQHAAAAAAGLHAHAHAHAHAHGHGHPHAHAQRAAWWP

SEQ ID NO: 13180 - DNA, 4619 bp, DROSOPHILA
atgatgcagcagccgcaaggaacaacaggtcataacacctgttccccggacacggacagaactggtgagtgcaagagctgcttcgcagctaaagaatacttactattgcattctcccacagacatagcttcatccattgaacgcaactcaccgctatccacgtcgctggcctcgagcgagagcttatccgccagcctacgctccacggagctgaagaacctgcaccagctagtggacacgcccactattccggatgtgctgaacagcatggccggtggcgctcagttcgaggacgaagtgcgtccgccggccgtggatctggcctcctcggcaagcaccgccagtgccatcaacatcgtgccgcacgccttggacttgccgtcgacctccggcggcatcggtcacacgctcacccacccacatccgcatccgcacctgcacctgcagcaacagcaacaggatcaactgcagtagtagcagcagacgcagtttgtaaaaacaaataagaactagctttccttcgctaaacaaatgtctattgggaaaacccgcacagaaaatttacaaaaaaaagttattggttcttcatattttcatattcagttcaaaactgtaactaaggtttaataaatcgctgactccacgcaataattataaaggttataaaaaatattaatgtttgaaattttaacttgtttagcacattgcaatttgttgtaaaaaagtggttttgatacgaggcaataagtaagacgcgcattcatattataataaacatttgattaagatcagcaaacataaaagcattgttttattttatttaattgtaaacatactatttgttatataacaaccgccaaacatttaaattttagctaagagagcaaacaaaaacgtaaacaaaccgagcgacattgccagctgaaagaaagtgagaagtgtggcaaccttaaacgaaacagctgagcggaagcaacaataatatagaaagaagaagcagaaaagaaacgcctattaaatcagatcatttaaatacgaaaacttaataatacattaaaatgctatcccaatacatggaggagtttgaacaggtgggctcaaaggtcacgtaggcccgattatggcttatatttattaatcataaccaacaggaaccctttgaggtgggcgagttcatagagcgtctgacttggcgcaccaacaatgaactccagaacagcgaggactttcatcctgtggccctccacgataccttcatccagaccattaaggacctaaagatcctgcaggagaagcaacaaagcaagtgcgaacggctagaggagtcactgcgccaggagaaggagtcgcacgccaaaaagattgccaagctccaagaacgccaccaaacggccattgatgtgttcggccagctggacgaaaaaatcaattcggtggccggcaagatcatgcacctgggcgaacagttggagaatgtgaacactccacgcagtcgttcagtggaggcccagaagttactcaattttatgtccgagtttttagccgctggccctgtgattgtcaacgatatttttgcggatgccgcaagattaagtgaggccgcagatgtgatacaaaagctctacgctatctcgcaggatctgccgcccggaaactttgcggaatccaaaagaaaaatcgaaaagaaatacgatgaagtcgagcggcggttgatcgaagagtttgccaccgcccagaagagcgaggacatcgagcgcatgaagacactggcccagatcttgtcccagttcaagggttacactcagtgtgtagacgcatacatcgagcagagccaaatgcaaccgtacagtggcaaagacatatttataggcattgtaccgctatgcaagcatcactacgagataatccagaaggtgtttgccaatccgcagcaggttatgtccaagttcatacttaacatatatcaactgaagcttcaccagtacgccatgactaagttggaggacaaaaaagacgaggagaaatatcttcgcaccctttatgagttatactcgcggtgagtcattcagaagttacgttaaatgtcaaaatttgcgattactttcatttcacaaccactttgcagcacactaaaattgtcaacagatcttcaaatctacatgtccacgatcgacgacgacttgttacagaagctgacacagcagatttttataaagcatttggccggctacgccgaaatggagaccaaatgcctcacagccaagtgttccacagagctggaaaagttctatgccagcaagaaacaccaaaagactgcaactactaagggctttcggagaaacatggaggtgctgatagccacgcgggctaacataaatattgctgccatcgaggactatggcggggagacgttcctatccgaagagttggccatcaacatgctgcaggaggccaaggcgtcgcttaagcgctgtcgcctgctgtccaacgagaccgaactaccaggcaatgctataaagctaaacgatatccttcttcgtttcttgatgcacgagcacgtagattacgcactggagttgggactgcaagcagtgccactggccgagggcagggtctttccccagctctacttctttgatgtggtgcaaaagacgaacatcattgtccatctactggacaagctgtgccacacatctgtcataccctgtgtgaggtatgttaggactttgttaatttacattttatagaatgtataatgtattcttttctagtaatacacccaagtactcggactatgtgttcaaaaaacgtattctgatggagcaaatcgagacaaagctggaccagggtcttgatcgctctattagcgctgttattggctgggtcaaggtatatttgcaatatgaacaaaagaaaacggactacaagccggaaacagatgtggatacaatatcttcagcggtaagatataaatttagtaaaatcgagcttatctgtctatccttaaaaatgtttatttttcttttctaggcctgcttacaagtcgttcagaatctgcagcccgtgattgtgcagattaaaaaatgtgttgatggagagaatttgcagaatgttcttacagaatttggaactcggttgcaccgagtaatctacgatcacctgcagaccatgcagttcaacacggctggcgccatgtgtgccatctgcgacgtgaacgagtatcgcaagtgcattcgcgagctggatagtccactggtcacgcagctgtttgacatactgcatgcattgtgcaatttactacttgttaagccccaaaaccttcaagaagtttgcacgggtgacactctggtaagtgtgcggtgcctttgatgtcgagcgatagtcttacgttaccatctgtatccaccccactctatttagaattatctggacaagtcggtggtgcggcaattcattcagctgcgcactgatttcaggatcatcaagaacaccaactatctgaagggtattattgagtgaggagttcgacgtccagaatgattcacattccaaaattttccaccttcgctgtctacggattaaattgatttattaaaggggacattatctaatgatgtttaattatggcttgccatgttctttaactttcaattaaagtcaagtggctggttacttttatcaatacatcgcccgcgttacttgatttactttcgtgtatttataggcgcgactcacacgcgtgcccgccgcccaaccacccactctcagacccacacacgcctccagctacgtcacggacttcccgtttggaaatcttcaaagagattcgctgaccttatcagttggagctgaagcgaaagtcagcgttatttgctcccatcggcttccagtcaataaatcaaagtttattgcctaggcgtccgcgaattatttatttatttacgtttgcccggagagtgccagcactccaatcgaagagaggccggctacttttgttggtacccactattcttggtgtcagtcacctaatagccaccaagcaaatcgtatcgccaaaaaaaaacgttgccagcccgtgatcctgattaacgaactgctttgttattgttattaacatttcttatttgcacacctacgcaaaattcgtttggacgatattctaatcaaaccgcgatcaagatctcagtcgattaaaccatgcgcggcgccctaatggattactatctaaaaatactcttggttatttgcgctgcccacgaattggccggcggaacgatcaagtctaccagagatgctgtttacaaaaaatatctgtccctaagatctttgcccttcgaggattgcggtaagtatatctcaggatcagtgcttttcggtgggtcgattcagacaacgtataaaatcaattgatttccacaggggaaaaaaacggtaagaaaatatctcgagcagttttcttatacaccatggctttgttaaggtatgcattcgaaaagaaacctcaaaagctttatattcgaaaaaatattagaattagaaatcattctactaaaatattatcttccggtggaaaatcgacctaccgaataatactataataatacaataataaggaatta

SEQ ID NO: 13181 - DNA, 2291 bp, DROSOPHILA
aaaagaaacgcctattaaatcagatcatttaaatacgaaaacttaataatacattaaaatgctatcccaatacatggaggagtttgaacaggaaccctttgaggtgggcgagttcatagagcgtctgacttggcgcaccaacaatgaactccagaacagcgaggactttcatcctgtggccctccacgataccttcatccagaccattaaggacctaaagatcctgcaggagaagcaacaaagcaagtgcgaacggctagaggagtcactgcgccaggagaaggagtcgcacgccaaaaagattgccaagctccaagaacgccaccaaacggccattgatgtgttcggccagctggacgaaaaaatcaattcggtggccggcaagatcatgcacctgggcgaacagttggagaatgtgaacactccacgcagtcgttcagtggaggcccagaagttactcaattttatgtccgagtttttagccgctggccctgtgattgtcaacgatatttttgcggatgccgcaagattaagtgaggccgcagatgtgatacaaaagctctacgctatctcgcaggatctgccgcccggaaactttgcggaatccaaaagaaaaatcgaaaagaaatacgatgaagtcgagcggcggttgatcgaagagtttgccaccgcccagaagagcgaggacatcgagcgcatgaagacactggcccagatcttgtcccagttcaagggttacactcagtgtgtagacgcatacatcgagcagagccaaatgcaaccgtacagtggcaaagacatatttataggcattgtaccgctatgcaagcatcactacgagataatccagaaggtgtttgccaatccgcagcaggttatgtccaagttcatacttaacatatatcaactgaagcttcaccagtacgccatgactaagttggaggacaaaaaagacgaggagaaatatcttcgcaccctttatgagttatactcgcgcacactaaaattgtcaacagatcttcaaatctacatgtccacgatcgacgacgacttgttacagaagctgacacagcagatttttataaagcatttggccggctacgccgaaatggagaccaaatgcctcacagccaagtgttccacagagctggaaaagttctatgccagcaagaaacaccaaaagactgcaactactaagggctttcggagaaacatggaggtgctgatagccacgcgggctaacataaatattgctgccatcgaggactatggcggggagacgttcctatccgaagagttggccatcaacatgctgcaggaggccaaggcgtcgcttaagcgctgtcgcctgctgtccaacgagaccgaactaccaggcaatgctataaagctaaacgatatccttcttcgtttcttgatgcacgagcacgtagattacgcactggagttgggactgcaagcagtgccactggccgagggcagggtctttccccagctctacttctttgatgtggtgcaaaagacgaacatcattgtccatctactggacaagctgtgccacacatctgtcataccctgtgtgagtaatacacccaagtactcggactatgtgttcaaaaaacgtattctgatggagcaaatcgagacaaagctggaccagggtcttgatcgctctattagcgctgttattggctgggtcaaggtatatttgcaatatgaacaaaagaaaacggactacaagccggaaacagatgtggatacaatatcttcagcggcctgcttacaagtcgttcagaatctgcagcccgtgattgtgcagattaaaaaatgtgttgatggagagaatttgcagaatgttcttacagaatttggaactcggttgcaccgagtaatctacgatcacctgcagaccatgcagttcaacacggctggcgccatgtgtgccatctgcgacgtgaacgagtatcgcaagtgcattcgcgagctggatagtccactggtcacgcagctgtttgacatactgcatgcattgtgcaatttactacttgttaagccccaaaaccttcaagaagtttgcacgggtgacactctgaattatctggacaagtcggtggtgcggcaattcattcagctgcgcactgatttcaggatcatcaagaacaccaactatctgaagggtattattgagtgaggagttcgacgtccagaatgattcacattccaaaattttccaccttcgctgtctacggattaaattgatttattaaaggggacattatctaatgatgttt

SEQ ID NO: 13182 - protein, 710 aa, DROSOPHILA
MLSQYMEEFEQEPFEVGEFIERLTWRTNNELQNSEDFHPVALHDTFIQTIKDLKILQEKQQSKCERLEESLRQEKESHAKKIAKLQERHQTAIDVFGQLDEKINSVAGKIMHLGEQLENVNTPRSRSVEAQKLLNFMSEFLAAGPVIVNDIFADAARLSEAADVIQKLYAISQDLPPGNFAESKRKIEKKYDEVERRLIEEFATAQKSEDIERMKTLAQILSQFKGYTQCVDAYIEQSQMQPYSGKDIFIGIVPLCKHHYEIIQKVFANPQQVMSKFILNIYQLKLHQYAMTKLEDKKDEEKYLRTLYELYSRTLKLSTDLQIYMSTIDDDLLQKLTQQIFIKHLAGYAEMETKCLTAKCSTELEKFYASKKHQKTATTKGFRRNMEVLIATRANINIAAIEDYGGETFLSEELAINMLQEAKASLKRCRLLSNETELPGNAIKLNDILLRFLMHEHVDYALELGLQAVPLAEGRVFPQLYFFDVVQKTNIIVHLLDKLCHTSVIPCVSNTPKYSDYVFKKRILMEQIETKLDQGLDRSISAVIGWVKVYLQYEQKKTDYKPETDVDTISSAACLQVVQNLQPVIVQIKKCVDGENLQNVLTEFGTRLHRVIYDHLQTMQFNTAGAMCAICDVNEYRKCIRELDSPLVTQLFDILHALCNLLLVKPQNLQEVCTGDTLNYLDKSVVRQFIQLRTDFRIIKNTNYLKGIIE

SEQ ID NO: 13183 - DNA, 4594 bp, DROSOPHILA
aaagaaaggaactttatacatatagaatctatagaagtatgtgcaattaagtgagctaaaactataccttaaaccttgtaaaaatcgagccttcacttgaatccttcagtcgacgagagcagtggattcaggtggagttaggaacatccccaacatccatgtgccccaatcccatcagctacgattatggccgtacttttaactaagcaaatcgatggaaatttatatctcgcctcacgccccccctagcataaatggcaaacgcgcattgcaaatgaagagcgaacgatctttatatacatacatataaacacacacacacacacgcccaaacacatattataattagtgattgatataatgtgaacgcaaacatctgtgtgcgtttgtcgtggattcgcatacggaagcgggagaatgcttttaaaaggcaaaaaaaaaagttaaataaactaattacgaacccttcttcgaacgcccagccccgccccgccccgccacaacactcacatataaacttggcatattataatattgatataagcaaacaaaaaacaacaagcgaaatgataagaaacccactattttaaatcgaaagcaaagtaaatgaaaaacaaaatagcataagtgaatgtaattgcaatggaatgatgcaaatatacataaaatatatatttaattttaaaatctatgtgacactctttccatttcctcgttttgggtaattattcgcattcaaaagaagggtttttaaataactttgttttgtttttgaaattgggaaaatactatggtgaacccaagttgttcagtttacatttcccgttgctcaaacttatttaccaattattatatcatggtcaaatattcttagaacgaacggatgacttaattaatgataataataattttgaatcaaatttaaagcgctaacggttcggcgaagtgatatcgataacacgcgcggcgttgccacctcacgccacacaatttgacttttgcgctaacggaagaggaagagatcgcgagaaacgacgcgtttaaaagagactgaaattaattcgagaatcaagggaaatatataacaataaacgcctgacaaaatgctgagatcgtcggtgcccgtgcagctgacaaaactgcgaaatagcgccgaggccgtggcgtccattgcccgcgaaaagggatcccaaggtggccaaggacaaaagcaacaggtggacaaagagctatccaccatcatggatgacttgcagcgggattacgggaattacaagtacacggtataccggtgcgccagtaaatttgtggcgctgcaaaagatatttcacagtgagtcagtcgcgtaggtggtccattcgaaggagtccccaaggattaaccttcaaattgcagctggaaaaatcccctacaagctggttttggccattttggatcgccataacttgagtggtggcctggaactgatggttcctccattccagttgacctccctgctgcacgatgtatactttgcctgcgagaaactaggccatttcaaccaggatgcgaactataaactggacagggcaaccgggctgttggccaacttcttctggaatgtctacgatccgtgggttgagtttctggcatcttaagaatatgtctgatatttgattggtttcgctaggcaacgcagacactccatatccctgttagagatcaggatcaccttcatactgctgtgcaagctatatagcagcgatcacctggtgggcgacatctttggcctgctggccgatcccaagtcgcagatcatctccagatatgcattcgaacagctcctagccacgctgagcaagttactcagctatttgggcgaggccaaggcctatggcgtccacaatcttccgttggctatggagcagtgctttgcccgctgtccgcatggcgttggtggactgaccgagccgcagttccacaaactctggacgggagcgggtgtccagacgagattcctgatctatggcaatctgctggcactggtgaaacgcatcgaggacaccgagcatttgattcacagtaattcttgtgccggctgccgcaaggagcacattgtgggcatacgtttccggtgtcaggtgtgtagggatatatcgttgtgcctgccctgctttgcagtgggcttcgctggtggtcgccacgagccgggtcatcggatgtgcgaggtcttcgtggaggatcagccgccattgcgttggacccgccacctggccaggctgtgcggctggctggtgatgccgcgcaaaacacaggaggaggagcgtcgcggcttctgtaatgcgcaggagagtgggcccgccttgggtcaatccgctgccacgcccattcccgcagagacgcgcagtgtgcgcagtcagtgccaggagaaggaccgcacagttgtcctgcagcaacagcagcaggagctctgctccctgacgggtctagccagcgaggcgtccagcaggctgcagtccatcatcgatcgattgcttttgcaaaatgcgtgggtgttttcccttctttcgccacacttgttagccaagccttaaggttctcttgcatttcaggaagctggaaacccagctgcaaacagtggccaccgcatctagttcggaaatatcgcagtttctgagcgcccatcagtgctttctgctgcagattatcgaggatatgcgacagctatcagtgagttttccaaacattcggcccatttaagctgagctaactccatttatatacacttgcagcatgcctcagcggtaacttcgccgccacctgcgccagctgcccaagtggcgccttcagctgcgcccctagtcagctccacgttccttagctccagcacgcctcagcgacagatgctattcgacatgtatgcgcccgtgggtgccaatctcacgcactccagtaagaagagaaccttcaacagagccatgagacagctccactaagttaatcgtttcttgtagtaaatggcgccgacttgaatcgcagctatctggaggcaaacaaatcggattactcgctcaacgacataagcttgtggttcgaccagcgtcgctcgagtgtccagccaggacaaggacctggttccctgccggctcctctgccgctgcccatgccgctgggtgctctactggaacagcagccggcaaacggcggagatggccgcgacaccgagatggtgaactttaagctgctgctgcacaaggtcaaggagatcgtcgaggactcgtacagcgataatgccgaactgtcggcggccacgcaaaatctggagaacgttctcgatagcatcatcaagagcgaggagcagcagcggcgcatcagcacgtgaggatccggatcggataccaactcccatcgattccagccagaccaagtccacttagctttaagttgtaaagttgttctaaagtaatcgtgacaaaatgacacaaccgagtcatgcatttattatatccttcttccttttcccatgtgctttaacattcgcgtaaatgctttaatttgtaaacttacaactctgacaagaatgcaatacaacaaaatgtttttataaaaatatacaatgcaaaaaacacattgttaacaaagcatttacatacaaaatatcaactttgtagattttccaatgcaaagagaagaaaaaaaaaacgcatttacgccccattgtcatcatcatcatcggtgaatagcatagaagccaacacatcgctggccatttgtgccttgtggagctgcgtcagctgctcccggcgctgctccacactggctgccggctcactcaaaaccttccaggcgtccatctcctcgaacagactgtttagcaactccatctccatgtcggcaggcgacatgttgtgctcagcgacctctagcacattgaggttgcagtgcagctggaggagatcgcgcgtcaggcgatgcagtagcagacgcaatcgatcgtccgttctggcgtacacatgccaatgctttccgggatcgtcgcgaagcagcaaggtgtcacaccactgtgactgcggctggcgattgtagaaaatacgctggacaggatcggcggcgatgttggaagactgaaagtgagacccaggctcactgtcgtccagcaagtcggaagctgtaagggattatgagttaaaagggacaacaagtggtcttgacaaagctactcactcggctccttgtttgcttcctgggcttggatcaactgaaactgcagcgtggagacgagtagctgctcgaatgtcgtgcaatcctgggccgactggaactccaatttcagggagcaacgtgccgtgtgcgtcataataacggccaaaaagtcttggtgcagcgtggcgggcgaaaatgtgggtgccaacgattctgttttatcgagcagtttcttcacatcgaaggtaatgagatggatttgcctaggggatgcatcctcgcccatctcgtacgttgccatcaatatgagtttctctgcctcaagaagatcgaccagacgcaggctcactaccatcgcggcagatcgttccggcggtagtattctttccttctccaccggtcgccatttgag

SEQ ID NO: 13184 - DNA, 2286 bp, DROSOPHILA
gcgctaacggaagaggaagagatcgcgagaaacgacgcgtttaaaagagactgaaattaattcgagaatcaagggaaatatataacaataaacgcctgacaaaatgctgagatcgtcggtgcccgtgcagctgacaaaactgcgaaatagcgccgaggccgtggcgtccattgcccgcgaaaagggatcccaaggtggccaaggacaaaagcaacaggtggacaaagagctatccaccatcatggatgacttgcagcgggattacgggaattacaagtacacggtataccggtgcgccagtaaatttgtggcgctgcaaaagatatttcacactggaaaaatcccctacaagctggttttggccattttggatcgccataacttgagtggtggcctggaactgatggttcctccattccagttgacctccctgctgcacgatgtatactttgcctgcgagaaactaggccatttcaaccaggatgcgaactataaactggacagggcaaccgggctgttggccaacttcttctggaatgtctacgatccgcaacgcagacactccatatccctgttagagatcaggatcaccttcatactgctgtgcaagctatatagcagcgatcacctggtgggcgacatctttggcctgctggccgatcccaagtcgcagatcatctccagatatgcattcgaacagctcctagccacgctgagcaagttactcagctatttgggcgaggccaaggcctatggcgtccacaatcttccgttggctatggagcagtgctttgcccgctgtccgcatggcgttggtggactgaccgagccgcagttccacaaactctggacgggagcgggtgtccagacgagattcctgatctatggcaatctgctggcactggtgaaacgcatcgaggacaccgagcatttgattcacagtaattcttgtgccggctgccgcaaggagcacattgtgggcatacgtttccggtgtcaggtgtgtagggatatatcgttgtgcctgccctgctttgcagtgggcttcgctggtggtcgccacgagccgggtcatcggatgtgcgaggtcttcgtggaggatcagccgccattgcgttggacccgccacctggccaggctgtgcggctggctggtgatgccgcgcaaaacacaggaggaggagcgtcgcggcttctgtaatgcgcaggagagtgggcccgccttgggtcaatccgctgccacgcccattcccgcagagacgcgcagtgtgcgcagtcagtgccaggagaaggaccgcacagttgtcctgcagcaacagcagcaggagctctgctccctgacgggtctagccagcgaggcgtccagcaggctgcagtccatcatcgatcgattgcttttgcaaaatgcgaagctggaaacccagctgcaaacagtggccaccgcatctagttcggaaatatcgcagtttctgagcgcccatcagtgctttctgctgcagattatcgaggatatgcgacagctatcacatgcctcagcggtaacttcgccgccacctgcgccagctgcccaagtggcgccttcagctgcgcccctagtcagctccacgttccttagctccagcacgcctcagcgacagatgctattcgacatgtatgcgcccgtgggtgccaatctcacgcactccataaatggcgccgacttgaatcgcagctatctggaggcaaacaaatcggattactcgctcaacgacataagcttgtggttcgaccagcgtcgctcgagtgtccagccaggacaaggacctggttccctgccggctcctctgccgctgcccatgccgctgggtgctctactggaacagcagccggcaaacggcggagatggccgcgacaccgagatggtgaactttaagctgctgctgcacaaggtcaaggagatcgtcgaggactcgtacagcgataatgccgaactgtcggcggccacgcaaaatctggagaacgttctcgatagcatcatcaagagcgaggagcagcagcggcgcatcagcacgtgaggatccggatcggataccaactcccatcgattccagccagaccaagtccacttagctttaagttgtaaagttgttctaaagtaatcgtgacaaaatgacacaaccgagtcatgcatttattatatccttcttccttttcccatgtgctttaacattcgcgtaaatgctttaatttgtaaacttacaactctgacaagaatgcaatacaacaaaatgtttttataaaaatatac

SEQ ID NO: 13185 - protein, 649 aa, DROSOPHILA
MLRSSVPVQLTKLRNSAEAVASIAREKGSQGGQGQKQQVDKELSTIMDDLQRDYGNYKYTVYRCASKFVALQKIFHTGKIPYKLVLAILDRHNLSGGLELMVPPFQLTSLLHDVYFACEKLGHFNQDANYKLDRATGLLANFFWNVYDPQRRHSISLLEIRITFILLCKLYSSDHLVGDIFGLLADPKSQIISRYAFEQLLATLSKLLSYLGEAKAYGVHNLPLAMEQCFARCPHGVGGLTEPQFHKLWTGAGVQTRFLIYGNLLALVKRIEDTEHLIHSNSCAGCRKEHIVGIRFRCQVCRDISLCLPCFAVGFAGGRHEPGHRMCEVFVEDQPPLRWTRHLARLCGWLVMPRKTQEEERRGFCNAQESGPALGQSAATPIPAETRSVRSQCQEKDRTVVLQQQQQELCSLTGLASEASSRLQSIIDRLLLQNAKLETQLQTVATASSSEISQFLSAHQCFLLQIIEDMRQLSHASAVTSPPPAPAAQVAPSAAPLVSSTFLSSSTPQRQMLFDMYAPVGANLTHSINGADLNRSYLEANKSDYSLNDISLWFDQRRSSVQPGQGPGSLPAPLPLPMPLGALLEQQPANGGDGRDTEMVNFKLLLHKVKEIVEDSYSDNAELSAATQNLENVLDSIIKSEEQQRRIST

SEQ ID NO: 13186 - DNA, 9501 bp, DROSOPHILA
aagctgtaaaacttattagacagctttgagaagctttagctttcgtttgggcggtaaaaatttaaatgaaatgtgctcaaagcgtattaacataataaataatttatcttaagatctcaaacactatacgatatatattgaaatagtattgaaatgttaaaaacaataaagtgccacaaacttaatgtcgcgtcttgctggatatagtcatcccaaatcatcctcatcaagtgaactatatgtcttgccaagctttcttgcccaaaactataaaaaagcattaaaaatgaagtgttatctttgcaagtatttgtatcttttaacctgtcaacaacatttcctattctacttatgcattgaaaagagggtagaataattaatttggtgtattttaaccttaattacgagcgacctgctttacttggggcggtcaatgaatttttcgtgaccatcagcatcaggcgctccagcggcagcgcaacaaaaacgaggggtgccagaagcagcagctaggataagcgactttcacgccatgcctgacctcctgcaatgttaaaggactcaaccccctggcactggaaacagctgattgagagcgcaaactttgagaaaatatccccctattctgccatacaatctgttcgagcgaaagagaaaatcgtttcgctctttaaaatgtcctaatatgactttggcacagttttctgaatgaaaagaatgactgtggaacgggttataacatttaaaggattttagatatttcatagactatctatgcttaggtttctttagttaaagtgatacagttgctagatatatatgaaataatatgcttacctaatgaaggaaccttagccacagtgctcttcattgtcctcgctctctttgtgcctcgtggcttcgtccttcgtcctgtttcggttctcgtgcctgcctcactcgcttcccattttcgtttggggattctggttcagttttcagttcgaattcgtgcgtcggtcggtcgagttgtgtgccaaacgctcggcacctgtcgcccaacacgtgttgcgttccacttgcgctgcgcgtctccttcgcacacccgcgtacaccgcggcgtatacgctacgtactgtggtgcagccaaagcgaaataatttctgattattctagttatgtgaaccgaaagtggagtgcataagagtctgaaattcaagcaccagctgtgttttaactcatattaaattaaagaggagatacgaaaaagaggagtgaatttgtggttcagaagaatgataaattgttttcccagttttggtaagaaacgatttggttcgatttggtatactcattaaaagttgatgtagatcagattataaagtatctttcaaaaaactacagaaaaatgttcatttctaaaactaatattgatggaacccttttttttgctttacaataaatggcaagattaaagattagggcaaaatagctagaaaagtttttgatcaactatagttaggttatactatatttctatttatctagtctttttgttaaaggacatttgaaatagttttttcttaaattccatttttcttcttataagagttcacgaaaaccaaaagaatgtgtgcaacaaagaatgcaaaatagttttcccggggcttgctgagtattcagcatacataccaatatgggtttcgtatgcagatttctgccagccagagtcataatattgagcaattgatgagagcgcgtttagcttggctttgtggcacttggctcattaatatgcggaaggcgacacaaaacactcccccacgcctccacccacacatatacaaacacacgcacacacacacagggaaaagcctccccttccctaaacttgtgtctgtgttttgtctcgtcctcatctgcatttgcccaaaatgagaatgagtatcccataaccgactgaacagcatcctgcttgctgatgataatgttgattcctgccttccgcaacaatttgctttgaacctaatccgcccctttttctgccacgccccagtagctatagcttaaccaaaattcgaaattcataccagtctccggctcacatttcactagcttttgttgcggcatttataaatgcttgttaccttttcctcttttcatttttagtcttggtcggaacaaagtgtttatggtctctggcagtttgaattttgtatctttgttcaggaatccctcttgaaatgatacaaattgcgttttcctattattcgtcagcctagatttgcaaagctatttggagattgagttcaattaaatagagaacgtcattcaatggagcagtatccgatatgaaatgaaaatgtaggcattgcaaactaattactttttactcgatgggtaaacatttttgattgaaaaattgtggataaaatcttaagcatacaaattcccaaaaatagatgtttctattcgagaatacatatattggcttgttagttttaaaaacaaattcaatcggatgacaacttaaatgtctgtactaaaaaatactatgtgcgagtgctatgtccagcatgtttaaaacaaaaactgctcaataatttgacatctgctaggccattttttctcaaatttcttatggtatttcgcaacatatgtcgttttattttgggtcaaccaattcttttgagggattcatttgtttcttacgcgtgcaattggcctccactcgagcctaaattatgcatacaaaaaaagggaaataaaaacaataaaggggtgacctgaaggcgaaggtcgaggcaaatcaaacaaatggcaagaaacatgaaaatgttgtaaaataatttcaattcattcttaggccattccgcatgcccctaggttggttgtcattccattggcatttgtgcggtttgctcttgccgcttttccggtcctcggaaaaatcccattcaatttttgtgttcagtttcgcttgtttgcggacaaacaagaatgagcgaacaaacaacgatagaagcacaatacaccgacacatgtatgggacatccttgttaaagtttgatttgagccctttgtatttctaatgttattttatttcgccatatgggtcccgtttcttttaatttatgtatatatctactatatgcatatgcattgtaaaaaagtttatattttcgaatgtttaggcatggtgctcttgtatgttatatatatgtatatcaagaatagcatatcataggtattagcttatgaaagtagatatttttggtatgtaaaatttgtaaatctaccttaattaatcataacaagctagctcatattgcgcacgtatgttaacataaatactcctgctcaacgttttggaaaataatcttctaggaattaatttgggtttgttcgccacccacttagggaatttgtctggtcatgcgatcagctgctattaccaagacttttaatgatacgttttattatccttgtaaaattgaataaccataaaccagaagaaatttcagtatggcctccagcaactttggcattatgggtgggaagccttatcgcagtgggcggtggcattcttgacgagctcacaaatcccaaaacctccttgaagctccccacatttctccaaggggtggtggtgggtgcttttcgcattgactgtttgctacaattcgctagtgaatggaatttagagctgaataaaaggaagttgggggtctgattataaataacgtaaagtaagcgcacatgaatgcattttgattgtctgatgtagtttacggcacgtttcctttattttttgccgcttctgctgctggagttgtgaggcaaaatggaaatgaaagacgacaaactcgcccgccagtatctgtgggcgatgggggcgtggcgacttccttaaatggtgcactaatgtagaaaagaaaagcatttttatatttatttgcttgccactttgcatggaaattccaactgcaacgaggacatcgcatttccttactgcaattttccaacgcgcgcactccggtttcttcatagccaccccactgttttccttatttttcccatacttcctactcgtctcgctttcttttcttccctacgttcgttatttttttgaggccatacaaaataatgtttcatgttgcaataaatgtacgattcagtccgcgcacccttgtcatttcccaggaacccccatcgttcgttccggcatatccctacacccaagcctggtactcggcaaaaaatgcatatatgaaataaaggcagggcacattcattgctcatacgcagcgttgtacgcagttatccttgcgctcatttcgtcctcccctgtctgcatttgtatggtgctcacttttgagcagaatgcgatttattaagccaccagccatatttaatatttctcaatgggacttaaattagacacaacctgatgtttcagacatcaattttaaatcgtatttatcgatccttatagatctgatttgtaacagatatagtatgcaaatgtgcttctagctataaaatcaaatgtttttttttaacaattacgatctgttttatatgaagttttcattaccgttcgtgaaatattaaatggacttctacgtaatcccaggattacattgatttttactccggctcttcagttgacttttcacttgctgtaaaagagacctcttcaatttaattaaatatcccatgttgtggctcttaatttcggtttacatgccggttgttttaaggcatcaatgcttaatgaagcgccaaacgttttcgatttcgccgaaccgtcttttgtttgtcgtccttcgtcgtcctttgcttcctgttaacccaactgggtctaatttggcttccttttctctgttgttgtattaataattcgtgcgttgcgtttcagtcacgttttgcatgtcgcaaaatattcgtggcgcgttgcccttgtcaatgttgtcatttcctgctcatcgtcgagtctgttgatttttgcataatttctgtttggccagatagctttaacttcgccgcaaaagaaatatggcagagcagaaaatcgaatctctaagaaaccgaatccataatcagtaccagaaatggaaagaaagacagagcagataaggtatcgttctagttttctgtagcggaatgttttcattttgttcggaggcatcagagcatgaaaatcaacattctggttgccaatggccccctcgctctgaattcaacttatatttctatgtgacctgcagagtgcaccaccaacagttggcacatgaaaatggaaatatagggggacaaataaaaatgtaaaaatacaaaaaaaagcaagtgttaacataatcacaagaggaataaaaaatgttggtttattcagtaaactaagaggatttagaatgcttactttgcggaaaacaatttcggttagctgtattatttaagtctggtgaacttgttctgtttctattaaagctggacagttggatttaagtttctgaattttcattttattttgtttactttaatacttctccgacagaagtaattgtacttaaagtgatatattgcatttgtcaatgcaatgactttatgggtcaaacaaaaattgctttaattgaaagagagttttaagtgcgaacagctcaagtacatcttgaacctgtgggacattgccaagttggcccagaatttccatttgctcagcttgccatttcattttggccattacgttgctcgactttggtggccgagttctgtgctgagaactattaaagtagtttagcttagtttccctgtttcggggcaaaactttaatttcacttgctgggacaaagaatatataaatatttacccacttggcccgctttgccaagccgaaaggggcttcaatttcttggggaaatatttagaacttcgctctctcgattttcccctggcttcttcgcttagttctctgccacctgccaggctcaagccaaagtttatgtcgtatgcgaataaaaaactaccaaaataaaatcatacggataaagtagttctctcccagaacttttctgccgaacatcaggggaaactatttaaattttctatgatttcttttttgggggttcggtgatacgctggcttaaaaaaaagaaatggagaggaaacttttctataaataattttgcatttttattgtgcattttatgcattttgtgcgcgatttcgatttgaagttgggctctgaaataaatatgaaaagttttatttatgtttgtggggtggcaaagcccggaaaaaaggggccctggctttggtttgtgttcggggccaggagctggggatattcggtagcacagccgtgggcgttatatttatgacatttgtttgccaacaactttcaatagctcaatcacgccacccgcacatgcaataggctaagccaattcccggctttgaaacaccaggcatgagtaaaaaggactctttctaaaagcaaacaagctggctttcagatttaagaaaatgtttgtttgaaaatattattttaatgtacttattgaggcttcaagaatgtgtgacttttttttacaacttattcggttataaagtagctgtcctcaaagttgaacacaatttttgttagtcttatttaaaaatatattctattatagattaataatataaaataaaatattattttttagctagaaggccgaacaccatcaatgtgagtgctgcggagtgcgtgctcttccactagagctccgagccgctcgggggcaatgaaatcgcggaagctgccaaagggcttcgtgctttgtggcctcaactgtttgaccttcgtctacttcccgctcgtcctgccaatcctgcgatgctcggccggagcggcgtcgtcggccagcggcggtggctcaaagaccgccgacgacttcgacttccggatgcagcgcgtgcggaatgtcctgaaggaagtgcccctcatcgacggacacaacgatctgccgtggaatattcgcaagtttctgaagaaccaactgaaggacttccactttggcggcgatctgcgggaactggctccctggtcgtcgagtgcctggagtcacacagacctgcgccgcctgaaggagggcatggtctccgcccagttctggtccgcctatgccccctgctcatcccaacatctggatgcagtgcagctgacgctggagcagatcgacctgattcgtcgacttgttcagctctatccgcatcacatggcgctggtcacgactgcttctggaatcgagcagacgcaccggactggcaagatcgccagtctcattggcgtggagggcggacatgccatcggcaccagtctgagtgtcctgcgaatgttctaccaactgggcgccagatacttgactctcacacacacctgcaatacaccttggtaagtttggcttagtacttatagaggaagcaatatatattatcatgtataaatactcttttatttttgtagggcggactgctgcaaagttgacgaaccagggaagtacccgcacataggcggtctttcgcagttcggcaaggtgagatgtttccccttctgagaatcggctctgtaactctatccaattccaattcgtatcgagcagctggtggtcaaggagatgaaccgactggggatgatagtggatctgtctcacgtctcggtgcccacgatgctggatgccctggccgcctcgagggcgccgttaatattctcgcactcctcggcgcacgccatctgcaatagttcccgcaacgttcccgatcatgtcctgcaacgcattgtgagtccattatggcgacattaatctgggggcacattaatctatatataccccattccgattccacatccaatgcaggcaataaacggcggtctggttatggtggccttttatccgcatttcgtcagctgctcgggacaggcgacattgcacgatgttgtgggtaggtggtttttggcccagtggctctttcgctgggtggtggtggtgcactattaatctttaaacttgtgctttttggtccacccctcagcgcatatcaaccacataagggaggtggccggcatcgatcatgttggcattggagctggctacgacggagtcaacttgtaagtaggggaacttttggccagcactgcggcttcaattacatttcatttcatttgccaaattatggtctctctatcgttctatttctcgactttcttcgctctccgtctgctttctctgctttccacttaagagtgcccaaaggactggaggatgtgtccaaatatccgcatctttttgctgccctgctcgagtctgataaatggtcggaggaggatattgccaagttggctggcaggaatctaatacgtgtattcaaggaagtcgaagcggtgagtccacagcaaaaaacgtaccgaaattgctcacttttctctggcatttttctattgttcaccgggctgtcccctaaaggatgctcagatactctgacaaagagcgttagacactttcgaaaaaggggagagcaattagagttaaaaagaaaatcttgtctgttctttagttccattgtcgtagtcatatcatgaaagtatagtagggatattccagagctaaccagactttggctggatctgagtacgttgccagagtattaaaaattgcgtctaagaaataatatattttttttttttgatattttttcatggtattaggcgcgtacctgaccgacttaaagtcgaagccagtcccagaactaaacacacatttcgcagcaaacaaacaaagaagttgggaaaaggacattggtatggcatcctcggcctgtgcttttctctttctctccctcggctgttattgcagttggaaaattcctttcgcaaggataaaaggaataatgtggctttgcaatggaatttgcacatacttggagtggtagaggaggttaatggggaaccgggcgaaggactggcaggacattggcttgacgtcgaaaagacgcaagttgtgaaataattttaaaaggattttcaaatgcttattccgatatttatacacgagcctgaccatcgcaaccgaagcaacagcttcactctgcagtttgtttgcaggatgcggtcagcttgtttgccgtctgctctccggctggatgcagcttatggtcctgcgaatgggattgggatttggcttggctcggggatttctttcactgctccacgatgactatgtctgggcactccaagctcaagcagcattcaatttagatcaatacgggatgggccagagtccctctctaggaagttactcctcggtattgaacggcactcgagcggaggctagtaccagttcaaagacttgaaagtgggtttgtttttcagttcaatggctagatagttggatagttggaagcttggacgattcgacgcatgaatggatagatagatgtatgactaaacgatgcagacaacactccagcctgcttaaataagct

SEQ ID NO: 13187 - DNA, 1592 bp, DROSOPHILA
cggtcgagttgtgtgccaaacgctcggcacctgtcgcccaacacgtgttgcgttccacttgcgctgcgcgtctccttcgcacacccgcgtacaccgcggcgtatacgctacgtactgtggtgcagccaaagcgaaataatttctgattattctagttatgtgaaccgaaagtggagtgcataagagtctgaaattcaagcaccagctgtgttttaactcatattaaattaaagaggagatacgaaaaagaggagtgaatttgtggttcagaagaatgataaattgttttcccagttttgctagaaggccgaacaccatcaatgtgagtgctgcggagtgcgtgctcttccactagagctccgagccgctcgggggcaatgaaatcgcggaagctgccaaagggcttcgtgctttgtggcctcaactgtttgaccttcgtctacttcccgctcgtcctgccaatcctgcgatgctcggccggagcggcgtcgtcggccagcggcggtggctcaaagaccgccgacgacttcgacttccggatgcagcgcgtgcggaatgtcctgaaggaagtgcccctcatcgacggacacaacgatctgccgtggaatattcgcaagtttctgaagaaccaactgaaggacttccactttggcggcgatctgcgggaactggctccctggtcgtcgagtgcctggagtcacacagacctgcgccgcctgaaggagggcatggtctccgcccagttctggtccgcctatgccccctgctcatcccaacatctggatgcagtgcagctgacgctggagcagatcgacctgattcgtcgacttgttcagctctatccgcatcacatggcgctggtcacgactgcttctggaatcgagcagacgcaccggactggcaagatcgccagtctcattggcgtggagggcggacatgccatcggcaccagtctgagtgtcctgcgaatgttctaccaactgggcgccagatacttgactctcacacacacctgcaatacaccttgggcggactgctgcaaagttgacgaaccagggaagtacccgcacataggcggtctttcgcagttcggcaagctggtggtcaaggagatgaaccgactggggatgatagtggatctgtctcacgtctcggtgcccacgatgctggatgccctggccgcctcgagggcgccgttaatattctcgcactcctcggcgcacgccatctgcaatagttcccgcaacgttcccgatcatgtcctgcaacgcattgcaataaacggcggtctggttatggtggccttttatccgcatttcgtcagctgctcgggacaggcgacattgcacgatgttgtggcgcatatcaaccacataagggaggtggccggcatcgatcatgttggcattggagctggctacgacggagtcaacttagtgcccaaaggactggaggatgtgtccaaatatccgcatctttttgctgccctgctcgagtctgataaatggtcggaggaggatattgccaagttggctggcaggaatctaatacgtgtattcaaggaagtcgaagcggatgctcagatactctga

SEQ ID NO: 13188 - protein, 404 aa, DROSOPHILA
MKSRKLPKGFVLCGLNCLTFVYFPLVLPILRCSAGAASSASGGGSKTADDFDFRMQRVRNVLKEVPLIDGHNDLPWNIRKFLKNQLKDFHFGGDLRELAPWSSSAWSHTDLRRLKEGMVSAQFWSAYAPCSSQHLDAVQLTLEQIDLIRRLVQLYPHHMALVTTASGIEQTHRTGKIASLIGVEGGHAIGTSLSVLRMFYQLGARYLTLTHTCNTPWADCCKVDEPGKYPHIGGLSQFGKLVVKEMNRLGMIVDLSHVSVPTMLDALAASRAPLIFSHSSAHAICNSSRNVPDHVLQRIAINGGLVMVAFYPHFVSCSGQATLHDVVAHINHIREVAGIDHVGIGAGYDGVNLVPKGLEDVSKYPHLFAALLESDKWSEEDIAKLAGRNLIRVFKEVEADAQIL

SEQ ID NO: 13189 - DNA, 6154 bp, DROSOPHILA
agtatttgagttacactgaatataaaaaaatgaaaagcttcctaaaactatatacaaaacttaatttttcttgttcattagcacttcataaaagtattcttaagttattttaaaaactttttttcatttaaagacattacacctctactcaagtttaaaattgaaaaatgcctggcacttcaaggacatttttcgctacaacttaccgaaactgagttcgcttttccagcaaactgattggcagtgctttccttagcggagctggcgaactcccaggcgtagaggcgtctccattggccatttcacgcgcccgctgcatatcttcgggattcatttcgaacttaattacaaccgttcgctggcaacgttcgccatcaactacgctcagattttatgcagttcacacgaccagataggcacgcatcgcacacctgccgcacgcacacgcaaaaaaaaaaaaaaacggcgagcacaccttgagttcggcgggcaaaaaaggcgaaaacatgcggctaaaacacgatcgcgcgcattaacacaatggcacaagattttagccgcgtaatgaacatggctcgtaccgcctgagggcgcaaaacatatagcctcagcatcggcgatagcaacatacactttcgattcgcacccaaatcgatgcaaactaatgctttctgacaggcccaagtgcgtggcaaccacgtgaatccaatccaatccaatccgattccgattcgattggatccaaagacagtcgcgaggtgaacaacatgcaacaagtggcctgggagaggcgctctaaaaaccagtccagatgatctgggtgtgccggctggaactacactaatgcgaaatctacaaggcgaagctggaggagaacacatttcaatcagtttgcaatcaggcttaatctacagcacaacttgacaatgttttataagttatgttcaagctaaatttggtaaaatgcttgaaacattccattaatttgcggctacaagctgaatttacaggtattattttattaagtaatatataattcaattgcttatctttttagaagtgggactttttaatgttaattctcaaagatttgagattcattcattcaatgctctctacaactttttgctacagtttgcaactgcatttatatttaactagctgaaatgtacaatattgcaagagcactggcgtttcgaacagtaaaagttataaaatgatttccatacatttggcaaatgtgtttaaacaatttgttaccgaaaatactacaaaaattacacactaagcaaagggcgaaagcattagaactacaactaaaagccctaacctacggtttctattagctgcagggacttacgcactacacatcgtacaatttcatgttctcgatctcgtccagcgtatcctccgatccggatgccgtcagatccgacagctcgtccaggcacttctgtcgcttgcgcacattccagtgcagtccgtcggctagggaggcgaaccagtcggatatctgatcctgggcgcagatgcatggcacgggataaatggaggtggtcacgcgaaggctgtcgccatggaagagctcctgcctgttgcgtccatcgaagctaacccacgatgtgttgcggctctcgggggatactgatatctgaaaatgtagcagatgttagaaacggatctatgggaattatgagtaaagcgacccaccttcagctccactcctgctggcaccacaatgggtcggaagctaagcgaatgcgggcagatgggagtcaccataatcgccggcacggagggatggatcatggacgcaccggccgccgccgcatatgccgtgcttcccgtgggcgtcgatacgatcagaccgtcgccctgcaccgacgtgatatactttccgtccagaaacagatcaatattgctcagatacggcgatggaccacgatcaatgaccacttcgttgagcaccagtatgctgttggctgcaggtcgcgcctcaccatctagatctgcctccagagtcttagcctcgtgtttcctatcgctcctgcgatgcataacacagcgcaaacgactgcgaagcgttagggcagcgtgaccctccaggacgctggtcagctgctcctcaaagttatcgaaacggaagggtgtgagaaagccgagggagcccaaatggaaggccatgacggggggcacagattgctggaagagcagcgaagcatacagcagggtgccatcgccacccaggcaaactataaagtctatgcgatcggtcagatcatctcggccatctctgcgggcataatgaataggttatttatattatatacacattctcattaaacaccgactcacttgaaagtcactagcttatcccgaatggccttgaatcgcacattttcgttgagctggacatcctccagcacggccgactccacccaaacgaccatgttcttctcctgcagcagccagtccaccaggtagacgaacggtgccagcaccgaggcatcgctgaccttcttgatcacgagcacggtgagtggtggcttgtaccaggtgagacgttgactagccggatcctggatctgcatcaccatggcggagtttttcatgatgcgaccacatggtccgaactgctggacaggcgagggtgcattcaagctgcgagtgcgcctgtaaaatagagttgggaaaacagaacaattagtatggataactttgttgtacctagctccttaaagaccttaaaatatggcgattggttttgggccttagaattggctcctcccgaatgcaattgttattgcaatcatttatatcctcccacttcacattgttgaactcttcgatgctcaaggagctgtggagcggaaacgaggcaaccgcctgcggctgatcaggacgcaggggaaacatttgttcaatatttcaacaggattttcagaatatttggcttgttttctccacctttgcagtatgcagactaagttctctcaactgtaaatcaaccttatgcaaatggcgactgcgaaggcagacagaagtcgagagaaaaacattggggaacattggtgggatacgattccccagaatcgcatttccaattccccttcctgcttgcattcgtagatgcactaagaaaaacaggggcttggttaaacattcagttgtaagggaacttatgtacaataaagtaagcaacaataaagtatttgatttaaaagatctactttaaatgctataaaagttttgaaattcgaacatttggaacaataaatctttattccacttgaatatgtaagtaggaaccatatttttgccagtgcacttattgcgccatcgtaccgatttggatttggattacgaattccatgcttttcgcatgcaatttcatagctaggggaacctttcagctgtttgtccacttacggccaggtgccggaacgcctgcgtcgcccaccacctgacgacgacgaatcaatggcattggcattctcccgggaacgtccccgtgccagacagtttccgttgtggtccggctgcactttcctctgcagattgcgctcgagacagagccgcgtcatggcactgaatccgacatgatgataatgatgctgatggtatatgtggtggctattgggcaatccgtagtgccagcgctgctccaagcgattctcgtgcaaggtggccaaatcaatgtccgacaatgccatttctgcgattgtaactccacttttgtgtccaaaaaagaatgcggtttcatacacttgcgctcatggaatgcagtcggacggcattgtttttggccagcggaaaagggaccaaggttagagttttgttttcacaacacgagagtcggttgcttttaaaaataacacgcccacgcacttttcatcgatgagccaacaaaatatgagcccaaaaaatgtgaatgtgtcggccgtaaaagagaaagtgttttatcagcgaatgtgacacacaaactggtaatcagaaatgcattacgctgatggagtgtttaagaaaaactaggctttatgctttatgtgttcactttaactttatgccaagggtgagataattttccaacgattttccaccactgattattgcgcacaaatgggcggaaaattgatggccataatggaaatgacggagggccctgaatttgtcaaccgggcgatcgcgagtgcgagcaacaactgagcgcctgagttgaccacgttggtccgcagcggactgggttttctactccgcaccattgacagcttcccgattccaatccagatcgcacttagctgagcgcaggcgcagaggccttggcgatcaattagcagttcaattgataacatcgaagctatcaaagcgtatcaattgccgaaattggcacaagtctagaccaaatcgcttttcaatttctttcgtttaaatggaattaagaaaactattttaagatgggttattcaacttttacgaggaaaacatgagtgaagaggttatatctatgagttcctaaacttacttaatatggttaattatttatgcttacaaaattcctgccaagaacctagtacatgccttttttgccattgtactaataaacttaagcaacatagcacttttgttagcctaaaatcgatgtcagcctagttaattaataattagtaagcttatagtaatatattaaaaacaaacaaacaaaacatacactgaatgctagtcgcgtgccaggtcaatggaattatcgcttaaagcacctattcgtacggccaccactgtgttgttgcatgtgagatgggaatccgataagagttgtgtataagaccgcatgattacaaattcgggcaggtgattgggaccttaccaccaccagctgctggtcatgtggttgccgcccagtcccggagccgaggtggatgcagttgctccatccaccgttccaggggcatgcaacagatgacttccatcggcagcggcgtccttttcggtgcagaaatattcctcttggtcggaggagtttaggtcctctggtgctggcattccacttgtatgcctgcagatgcttggagagatcagggacacatctgtgccctatctggaggaatgccgtgctatatatgccgtttaaatgcagtacaccgcactgattgttaacgaattctttcgatgcaaaaaaaaaactggtcaaagttttggctagggctgtcaataagtcgattaaataatcgatagcatcgatttcttggcccatcgcgaaagtaagcgcgaaatttaaaaacccaacggatgtcttcaccttcgtcattcagaagagcattcgtcattcataattaatgtcgacaaaggagtgtacttggcattgcaaattagtcaggcacgtgaaaacaccatttttatttttagcctaatttgtacgtgtttttgagtgcttttaacctctcaaacaaacatttttgttgtttatttttagaaccgcttataaacaatatacaactatatggcggagaaatggcattgtgtgaaaaactttaattagatctaagaatatcatttaatatattgttttttaatgtgtttttattgcacagatagctattaatagcacttggaatctttctttaataggaaatctactatagacactgttgaaactagctttagctgtagtttttgtataaaacctagtctaaactacatgtttactatgtttacctctttatttcccttcctgtgaagctttcttagtccacccacctgaattgtttacgcctctcactcaaatccaggactcttctcaatggcttgggtgagttgcccggcgacgtggctgccgctccatcattttcctcctccagagaactggacaccgaggtacttgccaccatttggagggccaattggagatcctcctcacgcattttttgttgtttttttttattggaaaagtatgaaaaaaaaaccgagttttgagacgacaacctcgttgttccggtggcgagatccaactaagtgacttctcgtgcttcgttttccaaaatatatacaatgcatgcgcatatgtaatacttggcagtgcgatcggagaggtaagttgttgaatagatgctatgcccgcctcgtacactcgtactttgaattcattaagagccttccg

SEQ ID NO: 13190 - DNA, 1842 bp, DROSOPHILA
ttaacaatcagtgcggtgtactgcatttaaacggcatatatagcacggcattcctccagatagggcacagatgtgtccctgatctctccaagcatctgcaggcatacaagtggaatgccagcaccagaggacctaaactcctccgaccaagaggaatatttctgcaccgaaaaggacgccgctgccgatggaagtcatctgttgcatgcccctggaacggtggatggagcaactgcatccacctcggctccgggactgggcggcaaccacatgaccagcagctggtggtggcgcactcgcagcttgaatgcaccctcgcctgtccagcagttcggaccatgtggtcgcatcatgaaaaactccgccatggtgatgcagatccaggatccggctagtcaacgtctcacctggtacaagccaccactcaccgtgctcgtgatcaagaaggtcagcgatgcctcggtgctggcaccgttcgtctacctggtggactggctgctgcaggagaagaacatggtcgtttgggtggagtcggccgtgctggaggatgtccagctcaacgaaaatgtgcgattcaaggccattcgggataagctagtgactttcaaagatggccgagatgatctgaccgatcgcatagactttatagtttgcctgggtggcgatggcaccctgctgtatgcttcgctgctcttccagcaatctgtgccccccgtcatggccttccatttgggctccctcggctttctcacacccttccgtttcgataactttgaggagcagctgaccagcgtcctggagggtcacgctgccctaacgcttcgcagtcgtttgcgctgtgttatgcatcgcaggagcgataggaaacacgaggctaagactctggaggcagatctagatggtgaggcgcgacctgcagccaacagcatactggtgctcaacgaagtggtcattgatcgtggtccatcgccgtatctgagcaatattgatctgtttctggacggaaagtatatcacgtcggtgcagggcgacggtctgatcgtatcgacgcccacgggaagcacggcatatgcggcggcggccggtgcgtccatgatccatccctccgtgccggcgattatggtgactcccatctgcccgcattcgcttagcttccgacccattgtggtgccagcaggagtggagctgaagatatcagtatcccccgagagccgcaacacatcgtgggttagcttcgatggacgcaacaggcaggagctcttccatggcgacagccttcgcgtgaccacctccatttatcccgtgccatgcatctgcgcccaggatcagatatccgactggttcgcctccctagccgacggactgcactggaatgtgcgcaagcgacagaagtgcctggacgagctgtcggatctgacggcatccggatcggaggatacgctggacgagatcgagaacatgaaattgtacgatgtgtagtgcgtaagtccctgcagctaatagaaaccgtaggttagggcttttagttgtagttctaatgctttcgccctttgcttagtgtgtaatttttgtagtattttcggtaacaaattgtttaaacacatttgccaaatgtatggaaatcattttataacttttactgttcgaaacgccagtgctcttgcaatattgtacatttcagctagttaaatataaatgcagttgcaaactgtagcaaaaagttgtagagagcattgaatgaatgaatctcaaatctttgagaattaacattaaaaagtcccacttctaaaaagataagcaattgaattatatattacttaataaaataatacctgtaaattc

SEQ ID NO: 13191 - protein, 454 aa, DROSOPHILA
MPAPEDLNSSDQEEYFCTEKDAAADGSHLLHAPGTVDGATASTSAPGLGGNHMTSSWWWRTRSLNAPSPVQQFGPCGRIMKNSAMVMQIQDPASQRLTWYKPPLTVLVIKKVSDASVLAPFVYLVDWLLQEKNMVVWVESAVLEDVQLNENVRFKAIRDKLVTFKDGRDDLTDRIDFIVCLGGDGTLLYASLLFQQSVPPVMAFHLGSLGFLTPFRFDNFEEQLTSVLEGHAALTLRSRLRCVMHRRSDRKHEAKTLEADLDGEARPAANSILVLNEVVIDRGPSPYLSNIDLFLDGKYITSVQGDGLIVSTPTGSTAYAAAAGASMIHPSVPAIMVTPICPHSLSFRPIVVPAGVELKISVSPESRNTSWVSFDGRNRQELFHGDSLRVTTSIYPVPCICAQDQISDWFASLADGLHWNVRKRQKCLDELSDLTASGSEDTLDEIENMKLYDV

SEQ ID NO: 13192 - DNA, 7308 bp, DROSOPHILA
ttttaaataattaaaaataaaataaacactatttgtatacaactacaagtaagtgcaacggaagggaatctaactgtgaattattgaaatcattataataatctcttaaaattttcattagtaaactgtcttttaatattcccgaaaaaataagcaaataacgtaagacaggctttgtaagagtacatttatcacagagccaactgtatttggcttccctggtcgctaaagaaacggtatattttggtatcttagtgagcagcatgctggtattttttatttcatactatttctatacgcgacgctgaagaggaaggcgagttttgagcagttgaaaagcccgttaaatagtgcaaaatagtagctaattttaagtgcaacgtgtaaataaaggcaatttagatcgcgaaaaagttcggtgagcaaataataatttgagattggaaagtggaaagtacgtgaactgggcgagaaaagaaaacggaaaaacgtgagactgtgtgcgtgcgaagaattttccgtctccctcgcaccaaagtggagcgcactcaattattttgtggatggagtggaacacaaacaacaaaaacgacaacgactatagcaataacaaaaacgacgacacagcaacaaaaacagcaatagcaacaacagaattaaatgcaaatgcaaaacatgttgagggaaagagagcgaaaatcgagagaacaatagcaaaaggatgtaatgcaaccgatggaataactagagtacaagtacaaaaattgcattggaaatttaaattcgtgcgacaaaagcggacgattgcagaaattttcgaaacttggcagccatatttactacaaaagcaacgccgttgtaaaaatacgtgacaaaacgcttacacacacatactcacattcgtacacccacacacagttgcgctctctcacacacatacacacagttgcgctctctcacacataaacacacaagcgtatcgaaagactggtgcagacagagagagacgcgaatgtgaattaacaaacaaacaaaaatattttgcgaaaaagacaaacacaaaaagtaaagccaataaagtgtattacataaacaaacggagctccgatatctaaataaatattatggaaatcgcaccactgatcaataacgccgtcgctgtcgtcacagcctctgcctctgccgccgtctctgcctctgctagcgtcggcagtagcagcaaggatgataacggtaggcgggtctctagatgataagcggtacacttccagtgggttcataataaactataaaaataataaaatatatgtaaatacaaagcataaagtgtagtacgtgctcgaaagagtcacactttctcgttaaagaacttcacgttctatccatattatatgattattatgtttcaaaatcctttataatcaaaagcgaattagacaatcagaatatctcccacccagcaattcataatctatataaaatatagtcagaatattgcaatcatacaaaaataaatacaaacacaaggacttaagtatttggctttaatcaaaatatatccatttgtttctttgccttaattagtttacatcattaataatcgtatatttttaaggctaatatcacgtagctaaaaactaaagaactaggctaattttttatctggtaagataaaaagtaaataaaaatttcagcggccttgaatcagattcacaaatcaaaaatagacaatgttactagttgttgggttatgcgtaatgtagaattggtaaaattttccgcttaatgttgaagacaaaactttcttctcaacttccaatcaactgtatgccaccagtctacgttatcggggtcgtactgcagcactcagtgcacattgcacaagtagtcacccacaccaactctagtgtgcgtgtgcatggtgcaacacatttcaacggggtcgctgaactgcccgtgtgttttttctgctttcaattgttttttttagaggccaagcgaacggagtacgacggcaatagcctagtaatagtagtggttttgccgcttgtctcgctgtttgttgttgcgcaattggcagcgcagaaatgtacgtagatcattggccaggggattgcgattactcagcaattcctcaaggtgctccactagcatttgccttagtttccgagacagcatggcaaccaatggtcgaaaagggttatttttaggctcttacaaagggtgcttatcgaatcaagatgattgccattaaaggtaaaactgctgggaattcaaaataacgtaacttctttcagaaaatatatctaaaaaagtttccattaaagactatcttaggacacaacacaaacatttgctaatcaagaagaaatatttcttttaaagctttaaacacgcaaattaattaaacattttcttcgacaagaaatagaaacaataaaagtatttataaaacgtagttatctttgcattgtttaccaaagctattacgtttgctacgcattaacaacgattcaatacatatacagctcgtagggtagggtatagatataaattttaaatttgtattgcttgtatctaaaactacatatgtgtgaaatgaatgtatatctttcagctgtttatgtagtttcattacctcgttgtgttttcattactatcagtttcttggggccgtgtgcttatctatcaatttttcccctctctatttcaagtcaacaatctagcgttgctcgcgtcgctgactttacaaaaagtgctaaatatcaacaataacaataaccagcacagcaagaacaacaaccacagcgacaatagcaatagcaaacaacacgagcaacaaaaacagcagcagcaaccacaacgacgaaacctcgacattaaaagcgagtatgatgtactaaaccaattgctaaaaactggagctgttttcaccgccacgcccacagcgccaattgccatcgaaaggaggaagcagacgcagcagcagcaacgtccatatgcacaacaggcacatcaacagcagcagcagaagcaacgcctaaactcatccatatcatcgacccactcatcgacatcgacaaactcctcctacggcagctcatcatcggaggatgctgcaggcacatctgcgccaacgggagcaggtgaagttgtcacatcagcagcattaacaccaagagcaagcaccacgaaggcgtccagcaataaattgccagagaaatcgaaaattccgtccgatatacttgatgatctggccagtcgatttataatcaatgttccggacatggagctaaacaatctaatacgtatgtgtttccaaatcgaactggcccattggttctatttggatttcttttgtgcccccgaatctggcgaggatggcgagaccccgaagtgcgtgcaacgaaagctgccatcggtgggcatcaagcagtttgccatgcagttgttccaagtgagtttcggattttgatagcttatgttctttgagttatatagataatattaatcttacaccagcacattcccttcctgaacaaacattttggcaccgtggatcaaatcctggacgagtggaagaactacaagctatcggtgcccacttatggcgctattctggtgtccgaggatcacaatcactgcttgctagtgcagtcctacttcgcgcgcaactcctggggatttcccaagggcaagatcaatgagaacgaagacccagcccattgtgcaacgagagaggcaagtcgggaatatattggaattctaaaaaatattattgtgaaaaatgaatgcattcaatgtggtgttaaaaaaaaaaagaagtgaaatggaattactttacatggtttatggactttgaaaacaaatttattaatctccggtgattttttaggtttatgaggagaccgggttcgatatcacggacctaatcgatgccaacgactacatcgaggcgttcatcaactaccagtacacgcggctgtacgtggtgcgaaacataccgatggacacgcagttcgcgccccgcactcgcaacgagatcaagtgctgcgactggttccgtatcgatgcgctgccggtgaacaagaacgatgccatatcaaaggccaagttgggcaagacctccaactccttcttcatgattatgccgtttgtgaagcgcctgaagaagtgggtgaacgatcggaaggctggaatcgagccgcgtcgccgcaaattctctggtcagcaatcgccaaaagcggcctcgcccaccaatatgaacggaaattgcaagaaggacgtcacaggagtgcgaaatgaatcgcaacgacagaggcacaagtccatgggcgacttggatggcgtcaaattgaataatctcaatggcaaggggaccgttggaacgggagcgggatcggcagcttccgcctccgccaccgctgccatcaactcgatgaacatatgcaatagcaatgggaaacgcaataagcaaaatgcggctgcgggcagcaatcaggcaacgccaactacaatagcaacgccaatgacgtcaaatggcgccgtcgtaggaggtactgtatcctcgaagcgtcaactgttccatagccaaagtcagaacgatgcgcagcaatcggcaagcaatgagaaggtgagttatctcagtgtttgattataaaataggtacataaaaccgagcattttcagcagattgtcagctccttcgatttaatacgcaaggagaagcagcaacaacttaaggcagctaaggcgcaaaagcagcagcaacaacagcagcaacgatcgcgcaccaagtcgcagagtgataagcagtacaatccacagcagccagtcaaaatcctgggacaacagcagcccacaacgggcatggatttgatagccatgctatcggcagcggcggcagctcaaaagacaccaaacaacgagcagcaaacacaagagaagcagcagcagcaacaacgaccacgacctgcttcagtgtcgcttaaccttggagcaggcagtgccacaggagcaacaacatcagctccggatgcccagtacatgcacaggctgcagcgcatggcatcgggcacaaatttgaggattctgaagcgggcacagtcgcagcagccgcagcagcaccatcagcaacagttgcaactagaacagcaacaacagcagcagcagcagctgggaatcgactttacgccaaatttgaattcgtggacgaatttctcctttaccaagaacttcatagcaaatgtgttttgctaaacttttctttgagtcaatcacacacacttccttttaaaactctcaattaatgcatttccgcgcaaaaggcccggttaccgggaacaccgaatagtataggaggctctgtggagtttaaggactcgcgctttgggtaacagaaactttggagacttgccagtaaatgaaagcatgccaattgcatttaacaagttcatttgttataaaactaacactacaactactgacactatatagacaactaatcatgtctagtcctaggccttggagactatgtatataagtaaagtttctcgatctctgtactggagatcaagcttttccagacatatatatatattctacgttagggaaccacaaacacaccttaactcgaaaattgaatgcgatcaattgtataggacatttttaatacgagaaagaacaagattttcataccaaaaagaaaaaaagaaaagtaaaacataaacgagagtcttccgctcagcacacgtaaagtaatattttgtaataacactacaatcgctgttcgactttaagatccaagtgagagcgaacaaattgagtataattatgttagaatcccttctgtataagctaaaagtgtttattgtgagcctagtgaacctagcctacttcaagcagagtgctcgccgttgaacgtatttttagagaaaccaacaacaaactaaatctaacttaactaaagcgtagctttaaaccgccccgagtacagatcgttgtgcttcaattttaaggtcttgacagttgacttttggcaggggcaatgaaacgtttctgcggggcgagaacacgatgattaacaaataatatttccgggccgtattacttactgcccgcccccacctatgaaagttagacgagagaggagagaaagatgtgtaagaaatattacaaataataacaatgtaaataattaaattgtgatatagtatttcttagcacaattgtgatcttagcaaacggctggcaactacaaaaacttttataagcgcaaccacaacaccattttaatcaatcaaaagaatgcccccgcacacacaccgttcgaaatgaagagccactttcccacaatcaggggcaatatcaggcatatctcggcagcaaagtgtttcgtcaatttttgattgaccacttgggaatgggattgtgaagctaaacatgagaaaacaaaacatttaacgaatttaaattagtttaaaattgaatgcctaaaacgtttgcaagcataagaaatttgtatgatatatacgatgagcgactttgtaattttacgaaacaaccagaacgggagtatatttttgtgagccactagtgcgtaagttacgggggagagaagccttttaagaaatgttaagtcttttgataactacgcgtagaattcgtgatggttattcagccaggccaagtttcctataattcgtaagcatgtcacgttagcatgttaactaattcctccttcaaacgtagtctccaatgtgtgaaacagttgcctattagcgtttatctttagactaagcaatgaccagcaatgtctccaaggtggtaacatcagagccaataggtttacatcaccgaaaatcaaaagaagttccctgtaactcggccttttgtgttcaattcgaaagtagttctctaagcgtatcggccgaaaacagtaagaaatttgcatttgctttaaatcttttaccattgacttttaaagctttttgaaaagccatattaacttttattttatatgtttacttaatgagctgcaaatctgttttaaacacttctctccttatttggatttggattatacttcatttttattaaaagcctatagtttaaagttttatttttttggaaacactcaagatccgtttccagcctcagacaaatgcccaatgaaattgataatcttgtctttctatcctaatttaatgccttctttcttctcaataccaaaacgaacttaacttctttggtcatttgtctgggccaagtgacaaacaacatcaaacttatcatccatcaagcaatgaa

SEQ ID NO: 13193 - DNA, 3549 bp, DROSOPHILA
agagagacgcgaatgtgaattaacaaacaaacaaaaatattttgcgaaaaagacaaacacaaaaagtaaagccaataaagtgtattacataaacaaacggagctccgatatctaaataaatattatggaaatcgcaccactgatcaataacgccgtcgctgtcgtcacagcctctgcctctgccgccgtctctgcctctgctagcgtcggcagtagcagcaaggatgataacgtcaacaatctagcgttgctcgcgtcgctgactttacaaaaagtgctaaatatcaacaataacaataaccagcacagcaagaacaacaaccacagcgacaatagcaatagcaaacaacacgagcaacaaaaacagcagcagcaaccacaacgacgaaacctcgacattaaaagcgagtatgatgtactaaaccaattgctaaaaactggagctgttttcaccgccacgcccacagcgccaattgccatcgaaaggaggaagcagacgcagcagcagcaacgtccatatgcacaacaggcacatcaacagcagcagcagaagcaacgcctaaactcatccatatcatcgacccactcatcgacatcgacaaactcctcctacggcagctcatcatcggaggatgctgcaggcacatctgcgccaacgggagcaggtgaagttgtcacatcagcagcattaacaccaagagcaagcaccacgaaggcgtccagcaataaattgccagagaaatcgaaaattccgtccgatatacttgatgatctggccagtcgatttataatcaatgttccggacatggagctaaacaatctaatacgtatgtgtttccaaatcgaactggcccattggttctatttggatttcttttgtgcccccgaatctggcgaggatggcgagaccccgaagtgcgtgcaacgaaagctgccatcggtgggcatcaagcagtttgccatgcagttgttccaacacattcccttcctgaacaaacattttggcaccgtggatcaaatcctggacgagtggaagaactacaagctatcggtgcccacttatggcgctattctggtgtccgaggatcacaatcactgcttgctagtgcagtcctacttcgcgcgcaactcctggggatttcccaagggcaagatcaatgagaacgaagacccagcccattgtgcaacgagagaggtttatgaggagaccgggttcgatatcacggacctaatcgatgccaacgactacatcgaggcgttcatcaactaccagtacacgcggctgtacgtggtgcgaaacataccgatggacacgcagttcgcgccccgcactcgcaacgagatcaagtgctgcgactggttccgtatcgatgcgctgccggtgaacaagaacgatgccatatcaaaggccaagttgggcaagacctccaactccttcttcatgattatgccgtttgtgaagcgcctgaagaagtgggtgaacgatcggaaggctggaatcgagccgcgtcgccgcaaattctctggtcagcaatcgccaaaagcggcctcgcccaccaatatgaacggaaattgcaagaaggacgtcacaggagtgcgaaatgaatcgcaacgacagaggcacaagtccatgggcgacttggatggcgtcaaattgaataatctcaatggcaaggggaccgttggaacgggagcgggatcggcagcttccgcctccgccaccgctgccatcaactcgatgaacatatgcaatagcaatgggaaacgcaataagcaaaatgcggctgcgggcagcaatcaggcaacgccaactacaatagcaacgccaatgacgtcaaatggcgccgtcgtaggaggtactgtatcctcgaagcgtcaactgttccatagccaaagtcagaacgatgcgcagcaatcggcaagcaatgagaagattgtcagctccttcgatttaatacgcaaggagaagcagcaacaacttaaggcagctaaggcgcaaaagcagcagcaacaacagcagcaacgatcgcgcaccaagtcgcagagtgataagcagtacaatccacagcagccagtcaaaatcctgggacaacagcagcccacaacgggcatggatttgatagccatgctatcggcagcggcggcagctcaaaagacaccaaacaacgagcagcaaacacaagagaagcagcagcagcaacaacgaccacgacctgcttcagtgtcgcttaaccttggagcaggcagtgccacaggagcaacaacatcagctccggatgcccagtacatgcacaggctgcagcgcatggcatcgggcacaaatttgaggattctgaagcgggcacagtcgcagcagccgcagcagcaccatcagcaacagttgcaactagaacagcaacaacagcagcagcagcagctgggaatcgactttacgccaaatttgaattcgtggacgaatttctcctttaccaagaacttcatagcaaatgtgttttgctaaacttttctttgagtcaatcacacacacttccttttaaaactctcaattaatgcatttccgcgcaaaaggcccggttaccgggaacaccgaatagtataggaggctctgtggagtttaaggactcgcgctttgggtaacagaaactttggagacttgccagtaaatgaaagcatgccaattgcatttaacaagttcatttgttataaaactaacactacaactactgacactatatagacaactaatcatgtctagtcctaggccttggagactatgtatataagtaaagtttctcgatctctgtactggagatcaagcttttccagacatatatatatattctacgttagggaaccacaaacacaccttaactcgaaaattgaatgcgatcaattgtataggacatttttaatacgagaaagaacaagattttcataccaaaaagaaaaaaagaaaagtaaaacataaacgagagtcttccgctcagcacacgtaaagtaatattttgtaataacactacaatcgctgttcgactttaagatccaagtgagagcgaacaaattgagtataattatgttagaatcccttctgtataagctaaaagtgtttattgtgagcctagtgaacctagcctacttcaagcagagtgctcgccgttgaacgtatttttagagaaaccaacaacaaactaaatctaacttaactaaagcgtagctttaaaccgccccgagtacagatcgttgtgcttcaattttaaggtcttgacagttgacttttggcaggggcaatgaaacgtttctgcggggcgagaacacgatgattaacaaataatatttccgggccgtattacttactgcccgcccccacctatgaaagttagacgagagaggagagaaagatgtgtaagaaatattacaaataataacaatgtaaataattaaattgtgatatagtatttcttagcacaattgtgatcttagcaaacggctggcaactacaaaaacttttataagcgcaaccacaacaccattttaatcaatcaaaagaat

SEQ ID NO: 13194 - protein, 791 aa, DROSOPHILA
MEIAPLINNAVAVVTASASAAVSASASVGSSSKDDNVNNLALLASLTLQKVLNINNNNNQHSKNNNHSDNSNSKQHEQQKQQQQPQRRNLDIKSEYDVLNQLLKTGAVFTATPTAPIAIERRKQTQQQQRPYAQQAHQQQQQKQRLNSSISSTHSSTSTNSSYGSSSSEDAAGTSAPTGAGEVVTSAALTPRASTTKASSNKLPEKSKIPSDILDDLASRFIINVPDMELNNLIRMCFQIELAHWFYLDFFCAPESGEDGETPKCVQRKLPSVGIKQFAMQLFQHIPFLNKHFGTVDQILDEWKNYKLSVPTYGAILVSEDHNHCLLVQSYFARNSWGFPKGKINENEDPAHCATREVYEETGFDITDLIDANDYIEAFINYQYTRLYVVRNIPMDTQFAPRTRNEIKCCDWFRIDALPVNKNDAISKAKLGKTSNSFFMIMPFVKRLKKWVNDRKAGIEPRRRKFSGQQSPKAASPTNMNGNCKKDVTGVRNESQRQRHKSMGDLDGVKLNNLNGKGTVGTGAGSAASASATAAINSMNICNSNGKRNKQNAAAGSNQATPTTIATPMTSNGAVVGGTVSSKRQLFHSQSQNDAQQSASNEKIVSSFDLIRKEKQQQLKAAKAQKQQQQQQQRSRTKSQSDKQYNPQQPVKILGQQQPTTGMDLIAMLSAAAAAQKTPNNEQQTQEKQQQQQRPRPASVSLNLGAGSATGATTSAPDAQYMHRLQRMASGTNLRILKRAQSQQPQQHHQQQLQLEQQQQQQQQLGIDFTPNLNSWTNFSFTKNFIANVFC

SEQ ID NO: 13195 - DNA, 3508 bp, DROSOPHILA
actggacaccgaggtacttgccaccatttggagggccaattggagatcctcctcacgcattttttgttgtttttttttattggaaaagtatgaaaaaaaaaccgagttttgagacgacaacctcgttgttccggtggcgagatccaactaagtgacttctcgtgcttcgttttccaaaatatatacaatgcatgcgcatatgtaatacttggcagtgcgatcggagaggtaagttgttgaatagatgctatgcccgcctcgtacactcgtactttgaattcattaagagccttccgatatttacatttccagagcaacttttttcgagcggtccatattttggcggccccggggcgtggccgatctggtatgagatcgatttataagctatgcgtggattaatagccggtggcgcactcttaataatatatgtccgaaggtagcgccaagaatataggcccatttttgcattaacaccgatcgattttaagtggacctgcgcctgccaatattgtcgatacacattttcacatttttatatgccatttgcatattccgtttgtccattttatataagaaatattttgtcgctttaaatttgtatttatgaccaaggtgaattctcaggggtgtcaggaactactgatcaagtagggatttctttattaataataattgtttgtttattgcatttttgggtttaagtgtgtaaagtggtaaaatttcatacatttttgatttcattttggtaatattgatgctatttaaatatttatttattacttgcaccgatttccttcttaatttatttttaagtattttagttatataaagagattttctttggatttaatgtaaataattttttacatgaatgaatccgagcttacatctattctacatccgacttgactgttgcattctacagctgcgctgcggtcacactaagcggcaacaccgggtggaatcgataaacaattactatcgaacacacatcgattgttgagagagctgtgaagccgacgattttacgtcaaaagcggaataagtttatttaacgtacgaaaaagctaagcataatgtcagcaaaggcagccttaccactgcagatgtttggccggcgactcgtccacctgaggtcatcggtcacttctcaaaatatgaggtaattccggttgcattgcttcctcttatctgtgacgtaatgagggcgcacgtttgtcgtttcgcatgtaattctaacattgcctcccgtctcactcccaatcgtctaccacacaaccagtgccctgcgtttgtacagcacagagaaacagccggaagaagcgacagagcagaaggccaccgaatcgtcgccagaagttgagaaactcaccaaggaactggccgccgccaaggagcagaatgccgagctaatggacaaatacaagcgttcgctagccgacagcgaaaacatgaggaaccgactgaacaaacagatcagcgacgccaagatctttggcatccagagcttctgcaaggatctgctcgaggtggcggacacactgggacatgccacacaggcggtgcccaaggataaggtacaaactatcttatcttaagatttaaggtttaaggtatcttaaggattcagactcgcaatgaagttgcatatgttgagataagaatttcgtaattatttgttgccaatacttgaaaatcttcatagcattttaaggtgtattttcccgatctttccatttctatctgagagataacaaacccgattgcattacatacatctaattgtacatatagatttgttggggtattttaaattgagatatttggataacttgttagccattttagacttaatagatagtttaatcgttttgcattaacattcttaaagctacccttactaatgatcttaattattgcagctcagcggcaatgctgatttgaagaacctgtacgagggcctcaccatgacgcgcgcctcgctgctgcaggtgttcaagcgacacggactggagccactggatcccatcaaccagaagttcgaccccaatcagcacgaggcgctgttccagaaggaggacaagaccgtcgagcccaacaccgtggtggaggtgaccaagctgggctacaaactgcacgagcgttgcatacgtccggccttggtgggcgtgtcgaagtgttgatagccatgcggctgcccagaggcatgtaaaattcccagtactccccccccccccctaaaccaatttacatggcgtgtgtctctcaattgtttgcaatttgttttccgctgcaaaattcatgtacgtaaaccctgtgtaaatacaacctatcccacaaacgcatccttcgggcaaagcttgcgaatttagaattcctcctagtttctaagagatctgtgactggatttgatggccacaatttgtaccatacgcgtggccatcgagtgttccactttaaggtttaattacgataataaaacatgttttagtttgttgaaatataccacggaaatttgtatttcatcctcatctggaggagactctgtttatctaggtctctttttagtttcctttgattttccccgttttccttagcccttgaaattcgaatccctcatgaaaaaccatttcttttgttaacaaaaaccaggtagcgaagcgtaatcgcattcctgctcgtcgcgtaggtggaaaattcaatggaaatgcgtgattttctatgacccagcaggtaggcttccaagcacgttcccatgaattcagaggtagcacagatggtgggttccctaaaacgagatttgcgccagagttgaaagtctacttcaaacggttttgaactatctcgttggttagttgtccttaaacatttgaagtgaacggtatgattggtgtgctaatgcgttttctctggtccttggccatggtgcagtgcatccaggctagagtgtcgatgctgcctcgtttttatggacaagacagcgctgttatagtggacatcaatagaaaattcccacctagaatggactccaagctgcagaatgccctgtactacaacctgccggtctacaaactgataaagccaaccacaacaactacgacaaccacgacggctgctccaacctctggctatcctgctgatctcctgaacattgctcacaacaagctgggcctcaaagatctgcccaatctcgaggagctgggcgagatgattggtacggatggtgccagcgagaccatagactatatacgcacgctaactggaacggaggagggtttggccctgatgaaacagtatctggatgccctgcacttcgaggaggcggaggaggagaatgtggccgaggaacaagagaaggctgaagacgacgacgacgatgatgatgacaacaccatgggcaatgccagctacgatgagatgccgcaggaaaaatccaccaccactgcagatccccgtcctgagctgagtttaatgcagcgtttcggtgactttgtgaagcagtaca

SEQ ID NO: 13196 - DNA, 1043 bp, DROSOPHILA
tgttgagagagctgtgaagccgacgattttacgtcaaaagcggaataagtttatttaacgtacgaaaaagctaagcataatgtcagcaaaggcagccttaccactgcagatgtttggccggcgactcgtccacctgaggtcatcggtcacttctcaaaatatgagtgccctgcgtttgtacagcacagagaaacagccggaagaagcgacagagcagaaggccaccgaatcgtcgccagaagttgagaaactcaccaaggaactggccgccgccaaggagcagaatgccgagctaatggacaaatacaagcgttcgctagccgacagcgaaaacatgaggaaccgactgaacaaacagatcagcgacgccaagatctttggcatccagagcttctgcaaggatctgctcgaggtggcggacacactgggacatgccacacaggcggtgcccaaggataagctcagcggcaatgctgatttgaagaacctgtacgagggcctcaccatgacgcgcgcctcgctgctgcaggtgttcaagcgacacggactggagccactggatcccatcaaccagaagttcgaccccaatcagcacgaggcgctgttccagaaggaggacaagaccgtcgagcccaacaccgtggtggaggtgaccaagctgggctacaaactgcacgagcgttgcatacgtccggccttggtgggcgtgtcgaagtgttgatagccatgcggctgcccagaggcatgtaaaattcccagtactccccccccccccctaaaccaatttacatggcgtgtgtctctcaattgtttgcaatttgttttccgctgcaaaattcatgtacgtaaaccctgtgtaaatacaacctatcccacaaacgcatccttcgggcaaagcttgcgaatttagaattcctcctagtttctaagagatctgtgactggatttgatggccacaatttgtaccatacgcgtggccatcgagtgttccactttaaggtttaattacgataataaaacatgttttagtttgttgaaatata

SEQ ID NO: 13197 - protein, 213 aa, DROSOPHILA
MSAKAALPLQMFGRRLVHLRSSVTSQNMSALRLYSTEKQPEEATEQKATESSPEVEKLTKELAAAKEQNAELMDKYKRSLADSENMRNRLNKQISDAKIFGIQSFCKDLLEVADTLGHATQAVPKDKLSGNADLKNLYEGLTMTRASLLQVFKRHGLEPLDPINQKFDPNQHEALFQKEDKTVEPNTVVEVTKLGYKLHERCIRPALVGVSKC

SEQ ID NO: 13198 - DNA, 4554 bp, DROSOPHILA
taattgccaccaaactgaaacatattgttggaatcaggccagaaccgctgctcatccagttggatggggatggtgctcaggctgtccggcagcccaaggaacgcacggagcagcgagagcatgcctccggttccgtcgctcccaacgaggccaccgttatgctctgctccccggcgggattctcctgcgattccgcatccggggacaggttcggcatcgagtccgccagtaggcagaagtatgagttagaccgtctgtaagtcaactccgttgacccggaatcgttcccatactatttcctgtggcagctctgttttctaagttctggtttttatagtctttatcctgtagtttctaccaaattagcttactcttggttttttattgattttattcttttaaattcataaattggtgtatttatattaatagtagcatatacacttctttatttaactattaaaaatttaattttgattcagttgctgttttttttttaattatttactttttaaagagcgaacacagtactatatccattttttgtatagtaagaactacagaactagaactaacaagattgttgtttatttagtttattaattccaccgaaaaaggacaaatgtgaatttcctttgtagagccttagatgcttatacttaggctagctagtatacaaactatattgaattcgaggtgtcctttggctttccaagtcccatccttcgaaagcgttagtatcacgatgccttagaataagctgtcccgatcaacagttttccccatacagccctagccaaacttgataataatccaatggccttgctagaactggtaacatggctaattagaaaatcgcaccaatcgaagtgagtacgtatggaaaactgatatggaatcaccagcacataaccatatatacttcaaatcatgtagcacgcgtagatcacgcttcaaactatatttcaatatcttaacttcttaccaacctttatgcaggggcatgactgtcagcacgaatgctgtcgtcattacaaaggatcagagcaacctgattggcatcagcattgggggtggagcacccatgtgtccatgtctgtatatcgtgcaggtaagtctgaaaatcatgaactcataaactctcacaaagatctttttgctgccatattcagcttgtttcaaatttaatttacaatctcatttctaggctgcctgagaatcttttctagcggtgacccttgtttgcttccagggattcggcgtagccttgaaatttgtcattttgcgtagcttaaagtactcgcttctttcccgtgcaaaccaatcgatggtctgctgctccaaacgccgatccatccgtatccttttcctctcgtcatacacttggcggcgcagagcacgctccgacgtatggagatgaaaaggttttggatgggtaaaggaggacttgacaagcggcgtaaagggctgccggttgaggtagtccatagaagagcctggattgattcggggcacaaagtcggatgtctttcggctctgcctttgcttctttaggcgcttgtttaaagcgaccattgacgtggccagcgtggcagggcatcggggcttcgtcaccgtttgcagagagttcaggtacagcttgcgcctttccaaacgacgatgagatcgctcgaaatcgggcacaggtctgctccggaactgaaacgcattactttgcatgttggcctctcgttttagcttcttgcgtttctcagtgtaaaccttctggaatttgcatacccttggtgtctgttttctggtcgtcttgagctttttgggctttgcctggctttggccaccacccgcctgtgtacgcttgcgctgatgcttttgcacgtcccgctcctgaagcgccgcctgcagcctcttatccaactggtcgaatcccggaatcaacttgggtctcgcatgggactcattgcttaaatcctttacggaccaattaaaccagttggtgatggtcataatttggctaaccaaatcggtttcagttgcgaaggactaatcttaaacgataattttgaaacttaaagttatgagtactatttgcttggttttataaaaatgtttacgttttgacacaagtatgatttacaaactgtaaacaatagctttccaaaaaatgcaatgctataaatgtcacatcttgtaaactctagatcttcgatggaacacccgctgctcgtgagggatccctgcaatcaggagatgaactgttggctgtgaattcggtgagcgtgaagggcaagacgaaagtggaggtggccaagatgatccagacggccaccgacgaggtggttatccattacaacaagctgcacgccgatcccgaacagggcaagacactggatatcatcctcaagaagctgaagcatcggattgtggacaatttgtcgagcaatacggcggatacgctgggtctatcccgcgccattctgtgcaatgattcgctggtcaagcgactggaggagctcgagggcactgaactgatgtacaaaggactcgtagagcatgctcgccggatgctcaaggcctactacgatcttctgcagacatataaatcctttggggattgcttcacccaaatatcggtccatgaaccgcaacagcgggcatcggaggcgtttcgaacgtttggcgagttccatcgcaccttggagaaggatggcttgggcatcatcaaacagataaagccagtgctggccgatctgggaacgtatctgaataaagccattccggacacaaagctcacggtgcgtcgctatgcggatgccaagttcacatatctttcgtactgcttgaaggtcaaggagatggacgatgaggaacatggctttgctgccctgcaggagccactttatcgcgtcgaaacgggcaactatgagtaccgtttgatactgcgatgtcgccaggatgcacgcagcaagttcgccaaactccgcaccgatgttctcgagaagatggagctgctggaatgcaaacatgccatggatctgaacaagcagctgcgaagcctgctcgaaagtttggccgaacttcataggagtttggtggatcgactagactcgctgccaccgctctttcccatcgaagtggacttcaaggagacggactttcagtacaagtcgagtaccctgaagccgcaggagctggacgatgatgaaatcgaggccaacaatcatccgcattccactccttcgcaagtcgattgcggtttcgaggctgtcgaacagccggcggcaattataaatgtggaagcggccaaggcgtccgttgattcgtccaccttacaatccgccagcgagaacgaaacgttgctcaaggagctgggcctgtacgatgtggatctgctctccaatccgcagaccattagcaaccaaaaggactccattgctgcccaaaatgatggctacgatttcgacttgttcttgaaccaggcgactgcagccaccaccagtttggagcgcgatctcatgtcctcgaatgcggaggagatggacctgctactgcaataggctacttagtacaaatattaagtaatgtgttagataaatattaaatgtttcagtatttggtgtagatatcaaaaaatattaaaagcctttcaatttaatagtagcttagactttcatttatgttttatttctgtaaagtttaactttatggaaagcaaattctttgctcaacaactgatttaactttttacctttgtactagtttgtttaattgatggaatttcttatatactatgttgtttgaataaataagatagtaaataagaagtcctgtatttacaaacttgcacatttcgtcctgttttgatttgtgtaaaatcctatattatcttatgttaaagaaaccacattttccacactcgacttgttagtcctgcaaaacagtttcacgcagatagacccaattatggatattccacccaagaccacaaagtagctaccgtaaaccacgtactgatcccgcggctccagagcgaatccaactcgctccacaaccgcaacggtcagaatagtctgcaggatcagacccaccaacgtattgataccgaagatcaagccgaaactgtcctccaccagattctcggccaccacggcacccgccaccgtgatgatgaagaagaatacggtgcagaaaagcacatagttcacgtaggccacccagatcaactgcgtcttggcggcatagatgagcagagcgcccagggcagcggcacagatggatatgcccatcatatacgatccccgtcgcttattggagttcagcaggcccgccagaatggctccaatagcacccagcagcgtggccacggcctccactccgccattgtaaacactgagcttattcggtgccacctctttccacaggaactggatgtaggagatcacctagaggatttaacataattagtttattacacacttaacttcttgcaataaacggccaacttacttgaacttgaccacaggtggccaatgcccaccatatgctccactgcagcac

SEQ ID NO: 13199 - DNA, 1467 bp, DROSOPHILA
ggcatgactgtcagcacgaatgctgtcgtcattacaaaggatcagagcaacctgattggcatcagcattgggggtggagcacccatgtgtccatgtctgtatatcgtgcagatcttcgatggaacacccgctgctcgtgagggatccctgcaatcaggagatgaactgttggctgtgaattcggtgagcgtgaagggcaagacgaaagtggaggtggccaagatgatccagacggccaccgacgaggtggttatccattacaacaagctgcacgccgatcccgaacagggcaagacactggatatcatcctcaagaagctgaagcatcggattgtggacaatttgtcgagcaatacggcggatacgctgggtctatcccgcgccattctgtgcaatgattcgctggtcaagcgactggaggagctcgagggcactgaactgatgtacaaaggactcgtagagcatgctcgccggatgctcaaggcctactacgatcttctgcagacatataaatcctttggggattgcttcacccaaatatcggtccatgaaccgcaacagcgggcatcggaggcgtttcgaacgtttggcgagttccatcgcaccttggagaaggatggcttgggcatcatcaaacagataaagccagtgctggccgatctgggaacgtatctgaataaagccattccggacacaaagctcacggtgcgtcgctatgcggatgccaagttcacatatctttcgtactgcttgaaggtcaaggagatggacgatgaggaacatggctttgctgccctgcaggagccactttatcgcgtcgaaacgggcaactatgagtaccgtttgatactgcgatgtcgccaggatgcacgcagcaagttcgccaaactccgcaccgatgttctcgagaagatggagctgctggaatgcaaacatgccatggatctgaacaagcagctgcgaagcctgctcgaaagtttggccgaacttcataggagtttggtggatcgactagactcgctgccaccgctctttcccatcgaagtggacttcaaggagacggactttcagtacaagtcgagtaccctgaagccgcaggagctggacgatgatgaaatcgaggccaacaatcatccgcattccactccttcgcaagtcgattgcggtttcgaggctgtcgaacagccggcggcaattataaatgtggaagcggccaaggcgtccgttgattcgtccaccttacaatccgccagcgagaacgaaacgttgctcaaggagctgggcctgtacgatgtggatctgctctccaatccgcagaccattagcaaccaaaaggactccattgctgcccaaaatgatggctacgatttcgacttgttcttgaaccaggcgactgcagccaccaccagtttggagcgcgatctcatgtcctcgaatgcggaggagatggacctgctactgcaatag

SEQ ID NO: 13200 - protein, 487 aa, DROSOPHILA
MTVSTNAVVITKDQSNLIGISIGGGAPMCPCLYIVQIFDGTPAAREGSLQSGDELLAVNSVSVKGKTKVEVAKMIQTATDEVVIHYNKLHADPEQGKTLDIILKKLKHRIVDNLSSNTADTLGLSRAILCNDSLVKRLEELEGTELMYKGLVEHARRMLKAYYDLLQTYKSFGDCFTQISVHEPQQRASEAFRTFGEFHRTLEKDGLGIIKQIKPVLADLGTYLNKAIPDTKLTVRRYADAKFTYLSYCLKVKEMDDEEHGFAALQEPLYRVETGNYEYRLILRCRQDARSKFAKLRTDVLEKMELLECKHAMDLNKQLRSLLESLAELHRSLVDRLDSLPPLFPIEVDFKETDFQYKSSTLKPQELDDDEIEANNHPHSTPSQVDCGFEAVEQPAAIINVEAAKASVDSSTLQSASENETLLKELGLYDVDLLSNPQTISNQKDSIAAQNDGYDFDLFLNQATAATTSLERDLMSSNAEEMDLLLQ

SEQ ID NO: 13201 - DNA, 2787 bp, DROSOPHILA
atttgaatgggtataaagggaaatgggaaggacagcacttcacttctacgatatattgaatgcatagaaagattactaaagaacgagtattggctttagcaaaatgttattttaaattaatgataggaaatacctttttggttctaatttccaaaatattaagttttaataataattttgggcgaatcttgcatatgagccactcctgctgtaggtttacatacgtgtttaccatagctcattacgaaaacgaatttaagctcaactaaccgtgtgcaattgcagatatggtctcttgggcgcatctggatgcgggaaaacaacgctgctcagctgcatcgtcggacgacgtcgccttaattctggcgagatttgggtactcggcgggcgacccggatctcggggttccggagtgcctggaccccggattggctatatgccacaggtgagttgagctcggccaaactgcgcctgctaccttccattttccacctggaagctgctacatttttcatgtgccttttattatcccatgcccagaggcgagtaaattaaatcaacgcaataaaatggtgaatgcacaaaagaaaacatttacccataatgaaaagaaggaaaacttttaatttcacaatccataggaataactcaactgtactaaaatttgttttgtctaagcaacagcgctgtcaatttttaacgaaacaattttgattccctttaattaaataaaaaaaaataaacataaattattgtcttgctaaccttaaaaatatttcatcaaaattataaataaggtttttaggcttaatcattatatttggggtctgaaaaaactcaaattttctgttgggaatagtggagtggagtcataaaccagcgaagccggaaagcgggctgtgtttttagaaggaaacggtgttcagatggtgaaaatttataacatccgaattccaattttggtttattgcaggagatagccctttacggcgagttcacgatgcgtgagaccttaatctacttcggcatcatttctgccatgtccaaaggcgacatcgaggatcgtacagaattccttctcaaattacttaatttgccaaatgcctccaaatttgtcaagaatctgagtggcggccagcagcggcgagtgagtctggcggtggctctgctccatgagccggagctactcatcctggatgagcccacagtgggggtggaccccgttttgcgtcagaggtgagtccagaactaaatggttgttacactggtactaaatgaatgatttaaaaaataaaatgttatttatcttttttcgaagttgacgtagtatataataatatttatttccactgaagcttcagcttcatatatttattttaatacttaatacacactgtgcacaatttgcatctagatgacaattgattaactctttatttttttgattgcagcatctgggatcatttggtggacattacgaaaaatggtcacacgactgtgataatcaccacgcattacatcgacgagtgtgcccaggcgcatatggtaagtagtcagaggatttccgggtaaatgataagcgggtggggacgaagggatttcggtggcgctgtgtggcaagcaagtgtcaatggctcttggcgcccacgcattgttcgtccgggtgatttatgatcagccagcacatccatgtgtaatatgcggcgtatgagcaatattatgctgccactgccaaggtgaaagttcagctatcagctccggcgagcgctgtcaacatgcggcgctaagtgcttccgcctgccccttggcaaattggtatcctgcggccggctgcaacaaatccgtgtcctttccgaaaataaaaaaaaatgaatggccaaaagaggaaagccgtggagtacaatattactgacggctgtcttctctgttgacccatggccgtggcacgatttacgaggcatttccgagcgagacacattgcaaaaatttacttcagatttatttatgccaccagcgaaacacatgagatctgtataggaaaatataactgcgctagtcatttaatgcgtgcagcaaacaatgaactctgtcgttttcaggcgtagaaaaaagacaagaataaatcgtgacaaagctcgcaaacaaacgcccatcacaatggacatttggatagacagatagatacacggctaaagcgacaggctgagatacagatacttggcaacacgcacgggatatgcacacataaaacaaacagaatccttacccagagacacacacgcaatctcaagtggagtgtgagatgcatgaatatatcaatgacaacactctggaaaagattgatgtggggagcgtcgaagaaagtgtgaattgggccgaagatcgacactagagacactctacaaggggcccgtttaatttgattgatagggtgcaagaaaatattcatcaaaatggctgactttaaggaacatttgatattacaaaatgtattacaatttttattattatctgatcataattgtatgtcttaactcttcgcgggtataaaaaaaaatgggtttaattacaggatatcataaaggtagaagtcttaaaaataaattgaaccatctataataaacattaaagctgaagatgttttttctaataatttcgtttggccatgctttaaagttaagttaatcacttggcttgcgaatcaatatatcgattcgatagaaatgattgattgaggcaagaagctattaatcagcaatatgtgccgagaatatttattagtttgaa

SEQ ID NO: 13202 - DNA, 381 bp, DROSOPHILA
atgcgtgagaccttaatctacttcggcatcatttctgccatgtccaaaggcgacatcgaggatcgtacagaattccttctcaaattacttaatttgccaaatgcctccaaatttgtcaagaatctgagtggcggccagcagcggcgagtgagtctggcggtggctctgctccatgagccggagctactcatcctggatgagcccacagtgggggtggaccccgttttgcgtcagagcatctgggatcatttggtggacattacgaaaaatggtcacacgactgtgataatcaccacgcattacatcgacgagtgtgcccaggcgcatatggtgaaagttcagctatcagctccggcgagcgctgtcaacatgcggcgctaa

SEQ ID NO: 13203 - protein, 126 aa, DROSOPHILA
MRETLIYFGIISAMSKGDIEDRTEFLLKLLNLPNASKFVKNLSGGQQRRVSLAVALLHEPELLILDEPTVGVDPVLRQSIWDHLVDITKNGHTTVIITTHYIDECAQAHMVKVQLSAPASAVNMRR

SEQ ID NO: 13204 - DNA, 4167 bp, DROSOPHILA
tggtgctgttgttgctgggtctccggtttagacagccgggcttcggactccgggtctcctctgcctgcctccctctctctttcgctgctccccctcacacccgcacacagccccttcgaccaacaaccgacttcggtcatcgtggatttctctgctctccgttttgcggacctgcattttgctctgcactcttcgctgctcttttgtttcgcttttcgctgcttctaatgctcgtccgccactcaccccttccccgacaacaccctctcgttttcggtggctccaagttagagagagggagagagaggagacccccaatgaaagagaggtagcttgtttatcgttgcctttcttttgggcagcctgcccgctgcttttttccgcctcctccatcttcctcttattctttcagtgcttttcttctctgttgtttttcggtttttgcagctctgagcttcgctgcttctgccgctgctgcgctatgttgttgctttttgtctgtctcctctttggtcttgttgcttgtgtctgttttgctttttcgccctgccatcttacacacttactcactcacacagatacaagcacctacacgcggagacttttgtatgtaaaactgacgtcgtcgctgctgactcttctttcctttttctgtctttttttttttttgcacattctccctgttctctcttctcgcctgcattttgtgtatctcatctcgtgtacgctttcgctgcctttccaatctcttcggcatcggggcaacaacaacgaaaagctggcgtcgccgtcgccgtcatcgttttctctattttcctcaatcgctgtgccttttcattttcaattcgcatatttttgcaaactctactttcagttattcgccgataattgatgtcaaaggacgcagttgtgctccgccggcgcagtttcacatcgcctttggaatcattgccgcggtacggtatcattcagtgccagtgtgaccagtttcgctgtggccatgcccaaggaggatccgttcgtaaatcgagcccagctcttgaaggcgatcaagaaatatccggagatctgggactccaacaacaagctgcacatgtgccgcagcgtcacatcgcccatgtggacagagatcgccgagcagttcggcggtcatgtgccgacaggtgagcccaccaagaatgtacccgtccctacgaaccattccgctttccgacataagcacccctcacactctacgccactgctccattcgccagctagctagcagtgttgccatttgttgctgcctttcgcactctcctttcgccagctctttcgaggcgcattcagtggcgcaggcatgtgcttttgaaagggggctgaaaatcactttatttaaagtaagttggtccaacctgaacattttaaagttcactgctcaataacaaaaatctacgttgaatcaatattcctaaagggttcattattttcttaaattacgtcactgcacttggctaaaattagacaaagggcatttcggatagaaagtaaaggtttctgtccgtttggaataatagaggagcctacgccactatataatgcaaattgaagcactcgcagtagaaataattgacgggtggaatgtactttgatgaatgcaattgggtggcttaatgtaagcttagttatctgcaccgtgccacaagatattacaatattcatgaatgaaaagactaaacttcgcactcttaggcctcttaagccataatctcaatatttgaaatatctatttcttggaagtttcaataatcacgattcacgattaatattctttaaaaaagaaaatgtttaccatatttatttataattttcagttaagctgcaatcgatctggagccagatgaagtaccactatcacaacttggtccaccgccagatcctccacaaggatcgattcaacaccaagtgggagcacttcgagcccatgtccttcatgtataacattacggtggcaaagatcgtaggcgctcagtcgagcggcggcagtggcggaggcacctcctccgatgccccatccacagccactgaagcagcaactgtgggggaggaacctgctgccccagtggcgcctccgccattacccaccgccacccatggtcgcggacgacccagtggtagcttcagctggctgcagaccgcaaccacacccaccgcccctcaactgccgcatctaatcactcagccgccccatagtcaaggtcatggcatgacatataccgctttcacggggctggtacctccaccggccactgtggcctcagagacggtggccacgccgccgcgaaagttgggccgccccagttcgttgcacaatagcatgcgcggacgtatcatcgatgccatcaagacgcgtccatcgttgtgggctgggcgccagcggagtgagaaaggacagggtcagagtagaacctcagcggtttggaaggaagcggccatggagatgggtctgacaccgagtaagttagtcccgtctaagtagattatatccatcgaaatatatagcatgtagcaaactaatttaatattgtgttaaaaggatgttactaatgtcctgacgaattggtattaaaataagcttaagtagcttaaaggaatgtgaattataaaaagttccccaaccctcccaaaacatcttatactttgcagctcttatgcaaacgcgctggtcaatcatcaagcagcgctacgtagacgaactgcagaaggagcgccacgcccaatactcccaccaatccttccgctccacgtgggaacacttcgatcgaatgtccttcatgcgggaaattctgctaaagaaggtcgatgagagggagcagacacgcgaacagatccaggagatcgttagcgagcagcagcaccaccagcagacgcagcaccatccgtcacagcacttgcaccactaccgtccaccacagccgccagcaggattggtggagcacgcccaggacatgccaatcggattggtgcagcaccaccatcaggagggacaccatccgactttggccatgcaccatccgcagcactcgcagcccattcgccgtcgggtcaagcacgagtccgatctcgagtgggatccctttgagatgattctccatgtccatggtgccggagagccagctgccaattgaagactgagcaaataggggcagttaagccctagacacacctgagaaaaagcctgcaccactttgttttttttttgggcactaattaatattaacttactagatcaaatacttcaatataattgaacaaaattaacaagatttcacttgtttttttttcttgatttgatataggtttcttctcaggtgcaatttgaagaccctaaaataatcgtcagatgtaaaatcactagctataccgcatgcccctactattgaaaaacctttttgtaattccattttctactactccgcaaataaatacatcactaagatatacataatatttaatttgtatattttggttggaaataaattcacttagcatatatattccaatttgtgtagtctagaaacttccatgtatttctgaaggattaatgaattaaaattaaattagggctcattcaatgcgaaactgaaatggatactactcacgttatataaccgagtggtatacatttcatcaatatcaatttcgagaaaaatgcgattgtaatttccgaatgaaaggagatttattccatctgaagtgctttgcactcaatcaattgcgataatcgtgatgcgatgcgacggattcgagattcgagaacgctccgagcgcgaaaactaaattatgctaattctcacagtgtgtgcaacatttgtcgattgccaaactggcaaacatgtttcaaatacacacacacatacacattgccgcacatggagtcgtcccataaagccaccatccatccagccatcctgccatcctggcttcctggcatccagtgttttgtggatttgtgtaaatttctggctgagggccaagggcggaacacgcgtaattccaatcacgtgccagcccagaaaagaaaagttctcaaactgtaaaacgtttatcaaaacgtatagctgccccgttttcgtttcgcccaagagccacccacataattggcccaaaggatgccgcctcatctta

SEQ ID NO: 13205 - DNA, 1287 bp, DROSOPHILA
atgcccaaggaggatccgttcgtaaatcgagcccagctcttgaaggcgatcaagaaatatccggagatctgggactccaacaacaagctgcacatgtgccgcagcgtcacatcgcccatgtggacagagatcgccgagcagttcggcggtcatgtgccgacagttaagctgcaatcgatctggagccagatgaagtaccactatcacaacttggtccaccgccagatcctccacaaggatcgattcaacaccaagtgggagcacttcgagcccatgtccttcatgtataacattacggtggcaaagatcgtaggcgctcagtcgagcggcggcagtggcggaggcacctcctccgatgccccatccacagccactgaagcagcaactgtgggggaggaacctgctgccccagtggcgcctccgccattacccaccgccacccatggtcgcggacgacccagtggtagcttcagctggctgcagaccgcaaccacacccaccgcccctcaactgccgcatctaatcactcagccgccccatagtcaaggtcatggcatgacatataccgctttcacggggctggtacctccaccggccactgtggcctcagagacggtggccacgccgccgcgaaagttgggccgccccagttcgttgcacaatagcatgcgcggacgtatcatcgatgccatcaagacgcgtccatcgttgtgggctgggcgccagcggagtgagaaaggacagggtcagagtagaacctcagcggtttggaaggaagcggccatggagatgggtctgacaccgactcttatgcaaacgcgctggtcaatcatcaagcagcgctacgtagacgaactgcagaaggagcgccacgcccaatactcccaccaatccttccgctccacgtgggaacacttcgatcgaatgtccttcatgcgggaaattctgctaaagaaggtcgatgagagggagcagacacgcgaacagatccaggagatcgttagcgagcagcagcaccaccagcagacgcagcaccatccgtcacagcacttgcaccactaccgtccaccacagccgccagcaggattggtggagcacgcccaggacatgccaatcggattggtgcagcaccaccatcaggagggacaccatccgactttggccatgcaccatccgcagcactcgcagcccattcgccgtcgggtcaagcacgagtccgatctcgagtgggatccctttgagatgattctccatgtccatggtgccggagagccagctgccaattga

SEQ ID NO: 13206 - protein, 428 aa, DROSOPHILA
MPKEDPFVNRAQLLKAIKKYPEIWDSNNKLHMCRSVTSPMWTEIAEQFGGHVPTVKLQSIWSQMKYHYHNLVHRQILHKDRFNTKWEHFEPMSFMYNITVAKIVGAQSSGGSGGGTSSDAPSTATEAATVGEEPAAPVAPPPLPTATHGRGRPSGSFSWLQTATTPTAPQLPHLITQPPHSQGHGMTYTAFTGLVPPPATVASETVATPPRKLGRPSSLHNSMRGRIIDAIKTRPSLWAGRQRSEKGQGQSRTSAVWKEAAMEMGLTPTLMQTRWSIIKQRYVDELQKERHAQYSHQSFRSTWEHFDRMSFMREILLKKVDEREQTREQIQEIVSEQQHHQQTQHHPSQHLHHYRPPQPPAGLVEHAQDMPIGLVQHHHQEGHHPTLAMHHPQHSQPIRRRVKHESDLEWDPFEMILHVHGAGEPAAN

SEQ ID NO: 13207 - DNA, 5001 bp, DROSOPHILA
caagtcgttcagaatctgcagcccgtgattgtgcagattaaaaaatgtgttgatggagagaatttgcagaatgttcttacagaatttggaactcggttgcaccgagtaatctacgatcacctgcagaccatgcagttcaacacggctggcgccatgtgtgccatctgcgacgtgaacgagtatcgcaagtgcattcgcgagctggatagtccactggtcacgcagctgtttgacatactgcatgcattgtgcaatttactacttgttaagccccaaaaccttcaagaagtttgcacgggtgacactctggtaagtgtgcggtgcctttgatgtcgagcgatagtcttacgttaccatctgtatccaccccactctatttagaattatctggacaagtcggtggtgcggcaattcattcagctgcgcactgatttcaggatcatcaagaacaccaactatctgaagggtattattgagtgaggagttcgacgtccagaatgattcacattccaaaattttccaccttcgctgtctacggattaaattgatttattaaaggggacattatctaatgatgtttaattatggcttgccatgttctttaactttcaattaaagtcaagtggctggttacttttatcaatacatcgcccgcgttacttgatttactttcgtgtatttataggcgcgactcacacgcgtgcccgccgcccaaccacccactctcagacccacacacgcctccagctacgtcacggacttcccgtttggaaatcttcaaagagattcgctgaccttatcagttggagctgaagcgaaagtcagcgttatttgctcccatcggcttccagtcaataaatcaaagtttattgcctaggcgtccgcgaattatttatttatttacgtttgcccggagagtgccagcactccaatcgaagagaggccggctacttttgttggtacccactattcttggtgtcagtcacctaatagccaccaagcaaatcgtatcgccaaaaaaaaacgttgccagcccgtgatcctgattaacgaactgctttgttattgttattaacatttcttatttgcacacctacgcaaaattcgtttggacgatattctaatcaaaccgcgatcaagatctcagtcgattaaaccatgcgcggcgccctaatggattactatctaaaaatactcttggttatttgcgctgcccacgaattggccggcggaacgatcaagtctaccagagatgctgtttacaaaaaatatctgtccctaagatctttgcccttcgaggattgcggtaagtatatctcaggatcagtgcttttcggtgggtcgattcagacaacgtataaaatcaattgatttccacaggggaaaaaaacggtaagaaaatatctcgagcagttttcttatacaccatggctttgttaaggtatgcattcgaaaagaaacctcaaaagctttatattcgaaaaaatattagaattagaaatcattctactaaaatattatcttccggtggaaaatcgacctaccgaataatactataataatacaataataaggaattacttccgcaacacccattttcgggaattttaatggatccaatattgtgcactgtaattcagattatatcgctgccaagtatattgtaaatttcacagggcgcaatctgacaaaagagaaaacgatataacagagttcctcgaccatcagataccccttagtcaccttaaggcagtccgagcaaaggattgaatcttgcaatcttgcaattcaatcaatttcgagattaaatataaatttatggttataggattttaagaactacgtatggaaatatcaaaaaacgaatatagtataccctattactctatgagtaacgaatatatataatagtcataaagagtaattccccgatagtagcgcctttaacttcactttatacttgtgacatgataaatctaatttatgatacattaccataatcgaaaaatactatcagagcttaatttgaaagtgggtaagatctgtgggcgtaataaacgtgatattccaatgacatcaacaaaaaacccgaatatagttacttgttttcaatttttcattatcaacagaatataaaattagattgacgctgttcattttgcagtcaaggaaaaagaaatcctatttttaactacttttaattacccagcttagttgattttagggcatcaaaccttcgttaactagttttggttgcccaaaacacgagctattaattgtattctggtttttacgatgtctgattaaatggagtatttatggactgtgcacagtaaatacatgatttatgttctagatttgaggaactgtaaacaaacagatatgacgcccttatgggggattaccttatgacgctgatagacaggcgaacgcccactttgggggggcagtaatcaatgagcagccaagttaattgagtgttgtaatctaatgctgaacgcggttcattttttgaagatagaaactttttaacggccttgggaagtgcacttggtcatagattatttagaaatgcgtatatagtatgtataggcgatcgcctgtgtggatcgcagataattcggcttagttgctgagagtaaagttttttactttgttgccaggtgttaattatatggttgaatggcatgtactatgtcacgtaaccaaatccattcaggatagaatgcccaaccttacctactctatggatcgtatccttattatgtttaaaggaataactacgaactattttagcatgttgttagcataagatctaaagctaaaagatccatatcttctggttttatgtgccttttaaatctgtttccattgcctcttttaggttctttgtaccaggtcagctacctggacatcgagagctgtacgacactgccctgctccatggcccggaacgcgacaattaaggttactgtgcgcttcgatgataatggtatgtaggtgctccgctgataacagcagatccgtgcattcggaattgggatttctcagagcaacgtacactcgactcgcgttctgagcaaaagtcagtcggaaataaaaatagatgtggtgcgggcgaagaacttcgatcaggtgaatggcggatgttcgggtggggcaaggtgttttggaaccccctgaattccctgaatatgcatggtcaaatgatggtggcaataatgataagctggtgaagattgtatatctacaaaaactcaccgaatttcctgctgctactactactactgtttatgttcaatgcatttcgattgcaacctaggctcagccccacagtcgatccataaataataaattaaacgcctaatggtattttgatgaatcagcagaaatggagacgaaatcgaaacgattgatctcagcacgaatcgaacatttggagtactaatttgcgatagggggctgaaacgaagattggccaaaaattcgattaaagagagcatgcaaaacatgttcagataattggattagagtttcagctttgataaaaaacgtacagccaagccaaaatgatagtaatagtataattgttttatgttatagtaaaacttattattttatcccattaacaggcaatggcgtcagctttctgaagcacgaagtccgatgggtgtttaactacatcaagacccaggcggccataactcccgatccctgcgacggagatcacggatgcatagagagcgcaagtggtggaaaggcctattgggccaatatctttgtgaacgaaactttgccggtggtaagtaaagaacccttacaataaactctacaaatcaccattaatattcattcgtacatattcttaattatatattttatatatatataatatatttctctctgtgttccagatgaaaggtagcatgttgtgggaatccaaggatgcgaacgatcagaacctaatctgtttccaggttcccgttgtaatcacagtgtaaatgtgtaatcacgaaaataaagtaattggtgcatgcaaatcaacagaccagtgcgtttgtgtgtgtgtgtgggggaggggaggtgtgcatgtgtgcatcctttaatgaaattttgaatgaaaacaaaggggcgcggcatcgtagtagtagaaagggagagcgagcgagacgggaggtggagatctccgttttggcacggcacacacggtgagtgggagcgggagcaagtggagcacggcacagtggtacaaatcgctgatatagcacttaaacagtcgagtataaacaatactatttaaatataacagaaatatatgtttataacttaaaatagttatgtaacaaactattatatgctgtgtgattattttgaatattttataattaatattatgttcgaaaaatccaccaccttgcccactgtggcgagagagcggcgggagaacgggagcattggagctcgagccctgcagtccgagtccgtggcgttcagtgtgtcactctctcttgggggctgcagcgcaacggtcgcacgaaaagagctcccacttgagatttagattcagattctgattcggattgagattcggtttcggttttgttacttaagatcaacagttcccaggagcggaaatcggaacagtgcggcgaattaaagattaaagtggcaacaagcgatcaaagaaggcgctccgactgcgtgggagtacgagatcacggatcacgaggcgtggagccagtgcatccgaaagtgtttccattaccgtgagtacctaaaaatgtatcgcactgcccgccatttgcgcaattccgtcggcgtaaatgagattgtcttcgcgctaattgcggactagtagagatggtgctggcgatataggggcatccaaggggatgagctgagatcccatcggatagtgcacggttgacatgcggcaacatcacttctcacgccccaaaagctctcttagccgtacacttgcataggcggcgttcttttgcc

SEQ ID NO: 13208 - DNA, 671 bp, DROSOPHILA
gcaaatcgtatcgccaaaaaaaaacgttgccagcccgtgatcctgattaacgaactgctttgttattgttattaacatttcttatttgcacacctacgcaaaattcgtttggacgatattctaatcaaaccgcgatcaagatctcagtcgattaaaccatgcgcggcgccctaatggattactatctaaaaatactcttggttatttgcgctgcccacgaattggccggcggaacgatcaagtctaccagagatgctgtttacaaaaaatatctgtccctaagatctttgcccttcgaggattgcggttctttgtaccaggtcagctacctggacatcgagagctgtacgacactgccctgctccatggcccggaacgcgacaattaaggttactgtgcgcttcgatgataatggcaatggcgtcagctttctgaagcacgaagtccgatgggtgtttaactacatcaagacccaggcggccataactcccgatccctgcgacggagatcacggatgcatagagagcgcaagtggtggaaaggcctattgggccaatatctttgtgaacgaaactttgccggtgatgaaaggtagcatgttgtgggaatccaaggatgcgaacgatcagaacctaatctgtttccaggttcccgttgtaatcacagtgtaa

SEQ ID NO: 13209 - protein, 170 aa, DROSOPHILA
MRGALMDYYLKILLVICAAHELAGGTIKSTRDAVYKKYLSLRSLPFEDCGSLYQVSYLDIESCTTLPCSMARNATIKVTVRFDDNGNGVSFLKHEVRWVFNYIKTQAAITPDPCDGDHGCIESASGGKAYWANIFVNETLPVMKGSMLWESKDANDQNLICFQVPVVITV

SEQ ID NO: 13210 - DNA, 8498 bp, DROSOPHILA
aaggcttacgtagatttaagaaaggcttttgttaatatcgtaacgtaagtaagcaaatgtggcttgtgtagagagcaaattcaatattatacaagcagaacactaatgaaaatgcatcgagcatccttatgtttccaaaatattcagatcctatgtaaatttagggaatttcagatgaacatccaagatttattttgccagctgcatatattctagaataaatttcaagctcgctcacatccagtaagtgccacctacgaacccagccataaatatcatgtgcatttttcaatttcctcttcgtgccgggcacgaggcgaacggaaaattatttatggcatgcaaaattgccggtcataataatgcatatcacatagttggccaataaaattacaattggctgcctcgccaggaagaccgtaatttagtttgccattgcaattcaattaagacgttaattggccctgagaagtcgaaaagacagtcgccagtcgaattgcccaaacacacaacatgctctgggggaaatgggtgatttccttccttgctgcccaaaatccaaaatcaggagccgaacgaagccaaatcaagtggcaaaactttgttagctatgtgtgcgagtgtggtttatttagcatagaatttgcctgtgcactcggaaaaatccgggcgtaaaatctgtacaaggggttctgcaggatccaacccactcatgtgcatgcctaatgaagtcatccatttgatgtggaactgatgaacaagcagcgtcttcttcatggcaaacttttccgctcgcagaggggctaaggggatgacggctggtcatgtgcggacacagaaatcaattaagttaatttccgcacgttgcgtgagcaagggattacgccgagcattggtagtcgataaaacttcatcgacacatccacaacaacagcgccaggaacaggaacaggatgtgcatagagggcgcaaactttgacaaagattcagagacgcggacatggacaaggacaaggacgactggcaagtcgcatcaaagtcgaaaagttaaattggcttgacgacactttgccatagcacgctccaaatcaattgagtgacaaaacagggatcttacacaaatctatttcaacttaatttcgagaacactcggatgtgctagtaagggcagccagcctatttattagctgggggatattttcaaataaaacatttttttataattatttattttatcatctatacaattttcagatcggtctactgcgtggtggaaaaatgctggcagaggaatcgccggactatctgcgtcagcagtataatgccgactcgctggaggatgtcttcctgaagctctcggttttgcagaacatgggaaaacgccgccgatcgtcgatagctcaggaaattgtggaacaggtaacggtgccggcgatctctaatcccgccttggacatgtccgatgagcagcatgccgccgaaatttccggcgagttcggtgacaacatttcaatgtcgtccgcggctcgagatccgatcagtacaaccgcacccgcagctccgcctttgccaccgccccaggaaatacccacatccttctggtataatctacatgtgatgcagtcgcatcacctgcacgccctcatctggaaaaacttcttgtggatgatgcgcaacgtggggtgagtaacgaaattctgaaaattatcaaatattaccgatcaaataactgaattcatttgaataatttatttcaaacgaatctcgctttttcatcaatccaagctcagcatacttgggttgcataataataaaccgaggactagtaacctcatcaattgctaaccatctttgggtgatttttccgcagggtgatgctgttcatcgtgggtctgcccgtggtgcagatactgctcttctgttacgccatcggccatgatcccactggcctcaaattggccgtggcgaatcacgagatgtcgggggaaatgattatggaacaattctgtccagtgcacaccggatgcaatcagacgatgctgagctgccgttatctcgatatgctggtcaagaacaagagcatggttgtggtgagtgcaatgcaaattacctactcgacttcaccaacgcccccctttttgcaaccccatgggagcagaaggacatgaacagtgggcaggatgaaacggaggatgaggcagtggcaaatgcagatgaagatgcagctcccagcccgggggtgcaatatcagctgtcattggctttttggttaaattgtgcagtgcgaactttacaataaccactcatgtggcttatattcagagcccccgattcgaatacgttcgccctgccggccgctcctgtaatttatttcaatttgtgtggacagccgagtggctccccctgttgggcccgagtggaggctggtgctgccgggtcttcaatctactgcacacatcatttcgccctgccgcactcctaaatcaaccccctccatatacttgcctttgtcttggccaaatcgccaaaatagtgctgcctacttgaccattttctgtatactatttggctatcttgaggatcttaagttgttgaaatcttaaaaacgcctgagctacaaaacgatttagaatatggttcgaaatgaacataaaaaattatttatattgaagaaacctaaaaactatatcaatatatatatatttttttggatattttttatataattaagctgctttttccataccaaacgaacaactctgctcgtggtccttcttcgatgcaaaatgaagaggatgctggcactgactctgcctccgatgtggccgttgccgttggtgttgggcgaacacaaattacagctgcttatctttggcacagcaacaacaggccagtcggtcgagatcatcaataaatttactgccctgccatgggcggcgatggccagaaatagtgggccaggacagagcagaaccgtattaccgaggccaagaaaagccgcttgtggcaatttattgcaaattacgcttcaaaaacaaagtcgcttttgttgcctaatttgagtttcgtttcggtcgagggctcgagtcctggcttatgattccatgcattttacattagacactattataagcataataacagtaaagaggcgctgagagtgtgggtatttttacgattagtttgcacagcattcatgtaaaattgaaacttcttagcgagtttgttgtaaatttctggggaactcgaggatactcttctacatagtcctttcgcggaatccgtttcgacaatcaattgcgttccgatgaaagataataaaacaaaatcagcatggagacctcaatgtccaatcaaattataccgccaacagaccgtgacctccttaacttttcgaaaattttcaaataacaatataataaagaccgcaataataaggccagcaaccgtccgcatgcctcaactggcaatttgtgaagaaaactttttacctttggaaattgaaaagcatccccaaaccgctggctatcagactaaatttgtataacttcggacaaaaataaaggaaaaatggagaaaaaataatacgcgaccgtgtatctttaggccgcatcaaaagacccagaacgaaagaagggggagcacgaaggcaaagttaattttggtcaatgaacagcgtatcaacgtgccatcagcactttgctaaaaccctgccccggcttaccttcccaaaatcctgtggaggattgaagcttcaggcagacctcaagggggggtcaagaaaatttgaatttttctcgtgtattgaagttgaagcgttgctgttttttcaataccacttttccaagacggttacgtggtagtgcagtagggatttaatgtttttatcgaaaagaccttgtaatttctaggcaagagacagcgaaaaacagctgttgagcctatagtaattaaaatataattacgtagaataggagtatagcgaattattgattttctatttgcatattacttgtttaacgccgaaaagtgtaatttttgtgacttttggtccttgcgatttttattcgtattcagaaagagaactgaaagggtatagcgataattctcgttgtcccttgaatttttccgacctttttgccttgtggttatgttttttccagatcaaaagcatttcctttacccttgtcttggcgacactaaaatcgcccttttgtgttgtttggccaacctcccaattttctgaaggcagctccctgaatggttgcagtaataattttataaacttcccccacagctgggagcccgaaaaagaagtcttaatttatgggaaaattgaaaaacatattgtggtcagccgatgtcgttggctgttgtccttgctgctaattaaaagttcattaaccatgaaaatgtagctcattagtgtagaatctgggcaatttcatgcttttcgaggttgcagaaaatcttagatatcctggtagaagtagtagtattctagagactaaatctttttagaatcttttaatgtacaaataataatttttacacttaaaaatgctttttcaactcttcgagcattcaaagcattttaataattgatttaatcaaagctcatcaattatttttgtttcagctaaaatcccttttttactacgcttctgatggtacttgattagcgacaagcttttacttgaagaaagtgctcgaaagtgcatccttggctttattttttccctagctagagagattttatgagcgaagttaaggcaaagtcgaaacaaaaattgccaaggtagctgtggaaagtttttctcccagctcctttcgagctcatttgcgtcgggcttctgaccaagttgacttcatttgcgcatagtttgtggctcaagtttgtcataaacaatgttgaagttggggttaaatagtagcataaaagttgttcaggacctacaatttgattgtcagtagccaaggatcttggcattataatttattccaggtctcttgtgtaaaacccaaccgaatctctagttcaggtgaattcaaatccactctgcgccacatagtttggccaagacccgcactcacgcacacatccctttctgggccatcaaatctaatgaggccaattaaaccacacactctagtgttggccccaaaatcgaggaatgtgtgcgcagcattaagacggcaattgcgtaaatttcacgcctgtttgcgaggcgtctgtccttatgccattttcgtttaaataactgcagatcgaagccgcaaaattgcccgaactaagcccaaatacaaatgccaatacacgcagcctgggttttgtggccaggactttctccctcggctgtgattgtgattcctgtggctgttgtggcacataagtgactggcaaaagtttaggcaaagttttacgcccctccagttcgatggtaacttaataaatgtgtgagcacttgccggaactagctcaagatccttgggactgctctactttctggtggctgccgctgccgtcgcctttgccgctgccagttcattatttatttcacagcgaaatgaaattgttacagataacacaaacaacatattgttgacaacaaggagaacagggtccgcaaaaaagtaggcaacgaatcgcaacgcaacgaaaacgcctctcctttgttgttgatttgtttgcctcgctgaatttatcgcccggcgcaaagtacgcacattaattacggggagttacttttattgttgctacaacagaacgccccacatgcagcaaacaatgcgacaggaaatgaagcgggacgcacaaagagacagctcacaaagctgccaagaaaggaagtgccgtgggcaggaacccccgaatcctgtcctgactgccgagtcctcgaatcgcgacatgcgttgctcaataattcaacagctccaattttaattgcacggcgaaaacaatacccagccgtttggcatctgactggctggcaggtgcaatgactttttaagctaattgaatgagcatttgattgactgctggcgttcaccgacacggctgctcacctaaagtctcgaaagcacttagatatttttagatgaaaatgtctgcggttttcgataggtttatattcctagaaatgtcaaaaaaactataaaagctattttaagtagtgttatctttaaactgtgcaattatgttattacttcatttgcagcaatatgtgaccgacgatgaaatggcttacgaagaagtaagaaaaggtagagcctgggccgccctggtaatccaacccaactataccgcatctctgatggaacgcgtggaggatggtcggtatgccgaagatggaactattgagtcctcggacctagcagtacgaatggactggtcaagtaaatataaatgataacatagtagtattaaaaaaaagagaaattaatggcttatatctactttatagatcaacaaatctcacagttgctgtaccgcgatctccagtacacattcttcaactttgtgggtgacatgctaagcgactgtgatgtgaatccgaaactaggtcgtgtgcccgtggacttccagcatcctgtttatggctatcgcaatcccaatttcacagactttgctgctcccggagttatcctgacgatcatcttctttttggccgtggctgttacctccggagctatgttaattgatcggaatgagggcatgttggagcgttgtttggtagctggaatcacgggtccggagattcttctctcccaggtggtcacccagttcacggtgatgctaagccagacgaccttcgtactgattgtcagcttctacttcttcgaacttaccttggtgggtaacatatggctggtggtggcactctgcatcctgaatggactgtgtggcatgagcttcggattcgttatttcctgtgctgtggacacggagcgaactgcgacttatgtggcgatgggctcgttcttgcccatcgttatgttgtgcggcattatctggccgatcgagggcatgttcccgcttctgcagttcttcacagccttcctgccgctcaccaaaccaacggaatcaatgcgatccatactgcaacgcggctggggcatcgacaatcccgtcgtctacaatgggtttatttccatttcttcctgggttctggtattcctcgtacttaccatcctgctgctcaagttcaagaagggataagaacttctcttgggtctacacgacacaggatgaaaatgtgatgttatgttggaagctgaaatctatctgtctatcccaacttaaagtagtgattgcttttggcatatattaagggacttatcatgacctctaaatttgcattaattcctgtgcctatttcttatgattttactaggttttaagggtagacttacgctatcttagccagtaattagtcttagccttccctcactggcaataggttccggatcaccactactactaagtatggaaattgttgtgccttgtagaataagccttcccatttcattttactttcatccgcattcaaccacaaaacaacatcaaaaaattctatttatgttgtaagctcgtgaacaaaaatttcaaaagtttgaataaattgatagaaaaactttgccgaaatttacctcagaaattattgcagagagctttgctttctgtaattgtgatttattcacataggagagagcaatgtgattgctctgattgcacttggtgagtcggtaagcaaactgaccgaaatgtccggacttcggactttggactccggacaaacggcagaccaagttgctgcattgtcgaagttggtgccaagtggtcctgtggtcctttcaatcagtcattggttttgccaatatttatttaccaagtatctgcaatcaaagacctcaaaaagaaaagaccccagttcgggccaccgctcagagaccccttcgcccgggacattattcgaggacctcccgttgggagatggaatgtcaggggcgatgtcatggtggctcgttttcgacacatttcacattttgtggcaaaatcaattaagccggaaatgcatgtagaccatggactgagtgagtgagtgggtggtaaggtggttggtacacagcatccgcttaacacgaaaattcaacttaacaagcgaacaaagtgccaaggaagcaagcggaaagagttacttcccaggtgcacttgaaataaatgcgaaactcagtagatccttaatctgcagtgcaagtgttaccaaaatggtttttcataacaagggaattataagaattgtgcaattttgaatagcttaaaaaggtaaaaattatgtaaaattctgaaacattttttctgagtggaccaacggcaataaaaaagcagagacgcgcacacacacacatgccgacttatgctattaggtgttacatatgcatatgtaggtcagccagcatggggcgtggttggaacaacactaactggatccacatgt

SEQ ID NO: 13211 - DNA, 1887 bp, DROSOPHILA
atggacaaggacaaggacgactggcaaatcggtctactgcgtggtggaaaaatgctggcagaggaatcgccggactatctgcgtcagcagtataatgccgactcgctggaggatgtcttcctgaagctctcggttttgcagaacatgggaaaacgccgccgatcgtcgatagctcaggaaattgtggaacaggtaacggtgccggcgatctctaatcccgccttggacatgtccgatgagcagcatgccgccgaaatttccggcgagttcggtgacaacatttcaatgtcgtccgcggctcgagatccgatcagtacaaccgcacccgcagctccgcctttgccaccgccccaggaaatacccacatccttctggtataatctacatgtgatgcagtcgcatcacctgcacgccctcatctggaaaaacttcttgtggatgatgcgcaacgtgggggtgatgctgttcatcgtgggtctgcccgtggtgcagatactgctcttctgttacgccatcggccatgatcccactggcctcaaattggccgtggcgaatcacgagatgtcgggggaaatgattatggaacaattctgtccagtgcacaccggatgcaatcagacgatgctgagctgccgttatctcgatatgctggtcaagaacaagagcatggttgtgcaatatgtgaccgacgatgaaatggcttacgaagaagtaagaaaaggtagagcctgggccgccctggtaatccaacccaactataccgcatctctgatggaacgcgtggaggatggtcggtatgccgaagatggaactattgagtcctcggacctagcagtacgaatggactggtcaaatcaacaaatctcacagttgctgtaccgcgatctccagtacacattcttcaactttgtgggtgacatgctaagcgactgtgatgtgaatccgaaactaggtcgtgtgcccgtggacttccagcatcctgtttatggctatcgcaatcccaatttcacagactttgctgctcccggagttatcctgacgatcatcttctttttggccgtggctgttacctccggagctatgttaattgatcggaatgagggcatgttggagcgttgtttggtagctggaatcacgggtccggagattcttctctcccaggtggtcacccagttcacggtgatgctaagccagacgaccttcgtactgattgtcagcttctacttcttcgaacttaccttggtgggtaacatatggctggtggtggcactctgcatcctgaatggactgtgtggcatgagcttcggattcgttatttcctgtgctgtggacacggagcgaactgcgacttatgtggcgatgggctcgttcttgcccatcgttatgttgtgcggcattatctggccgatcgagggcatgttcccgcttctgcagttcttcacagccttcctgccgctcaccaaaccaacggaatcaatgcgatccatactgcaacgcggctggggcatcgacaatcccgtcgtctacaatgggtttatttccatttcttcctgggttctggtattcctcgtacttaccatcctgctgctcaagttcaagaagggataagaacttctcttgggtctacacgacacaggatgaaaatgtgatgttatgttggaagctgaaatctatctgtctatcccaacttaaagtagtgattgcttttggcatatattaagggacttatcatgacctctaaatttgcattaattcctgtgcctatttcttatgattttactaggttttaagggtagacttacgctatcttagccagtaattagtcttagccttccctcactggcaataggttccggatcaccactactactaagtatggaaattgtt

SEQ ID NO: 13212 - protein, 535 aa, DROSOPHILA
MDKDKDDWQIGLLRGGKMLAEESPDYLRQQYNADSLEDVFLKLSVLQNMGKRRRSSIAQEIVEQVTVPAISNPALDMSDEQHAAEISGEFGDNISMSSAARDPISTTAPAAPPLPPPQEIPTSFWYNLHVMQSHHLHALIWKNFLWMMRNVGVMLFIVGLPVVQILLFCYAIGHDPTGLKLAVANHEMSGEMIMEQFCPVHTGCNQTMLSCRYLDMLVKNKSMVVQYVTDDEMAYEEVRKGRAWAALVIQPNYTASLMERVEDGRYAEDGTIESSDLAVRMDWSNQQISQLLYRDLQYTFFNFVGDMLSDCDVNPKLGRVPVDFQHPVYGYRNPNFTDFAAPGVILTIIFFLAVAVTSGAMLIDRNEGMLERCLVAGITGPEILLSQVVTQFTVMLSQTTFVLIVSFYFFELTLVGNIWLVVALCILNGLCGMSFGFVISCAVDTERTATYVAMGSFLPIVMLCGIIWPIEGMFPLLQFFTAFLPLTKPTESMRSILQRGWGIDNPVVYNGFISISSWVLVFLVLTILLLKFKKG

SEQ ID NO: 13213 - DNA, 9384 bp, DROSOPHILA
ggcaggcccaaaactgcgccagctggtcgtagtcctcgggtggttggccatccgcctgcagaggcagctcgtacaggcggtgctccacgctaaagtcggtgtgtggttcgattacaacaatcggatacaactccttgactatggtgaggcgattggtgccagttatgttgactagcagagtgccacaaacaaaataatcgccgcagatccgagtccatacatcgccgagtcgtcggagcggctgcttctcctcaaggagcagcgaacgctggcccggcgtgccgaagtatagaaggtcttggacgtgggctaattccttctggttttgcattcgctggctgtcgagctcggcttgggcgcggtgcacctcctgcagcaggttctcgaaatccttcgcgggcaagcccgcatttttggacgtgctgggctcctcatttaagaaatcctcctggaaatcacaacgctgacgcttgccattgccgaactccagttccacaacggcctggaaggaaatgggaccttcgaccatctggtagtccaccacatccttgtgatccgccaccagttcgaagttggccccgtgatccttgggcctctttaggacgacgagatgcttccagcactgaattaacaggtagatgccctcccgttgccacacaaactttccaaatttgaggggcaaatcctccggcggatccagcatgctccagtccaccttttcgtcagtgggttcctgcttggacagaaagggacaaaccggtccgtcgtaggcctccagttgggtggctatttgctttagtttcgtgaccttcaaatcgatgtagtgcaccagatccttgcgccggaattcgtagaactttaggtttctcgctaaaaccaatgtagtggggtcatcccgcggtcggcccacgtgaagattggcgcagaaggccaaccgggccggctggagcagcatctccggcacattctcctggacaaacggcagcatggatgcggaagccacaagatggatgtggcgcccttgactcgaaagcccttcgaatcgatagctattgaattcaagtagtagttatcgatgcggtgaacgatattaggctattttgaaatggaaaaaccaatattaatcgagtttcgaatgctccttttagcgagaggtaagtctttaacaccgcataaacacaatcagtgttgcctaaccaatctgtgccctccactttctctcataatcaagcaatttctcataaaaaacgcacatcgataagctgataacgttggccctcgactaacaccgattattcaacaagttgtgtcaatcggcggagcagctgatcgttgtaagtagcaagaagaagacgccacacaaacattgcactccgctccgcccgcgcgttctcatttcccatctctctcactctgtctctcgcgctcaccgtctctctctctcgctccgcctcgcaacccccacagcgctccacaaaccgggccccacattcttgtgtgtgatttctggttcaggttctgatttcccgcgtgtccttgtgtgtgtgcgcgctgcagtgtctgtgtatctgttactgttgctgcatcttctgcatcaactgcaacgttaccaaaaatcaaaagacaatcgcctgcaaaagcttaattttgttgctcagtgttttaagtattagctgtttgcaagcagcacacacacgtaagaaacaacaagaacaacgataaaagacaacaacacaaatgcagagcatttgaagcgcaaacacacacaagcattcggtgcggctgtaagagcgagacacaaaataaggctaatttataaaagaaaagtgtgctgcaaggaatcgataaataacgggagtcgaggagcggaataggagtaaccaataaatataaatactgtaaatgcgatattaaaaagcgacaacaacaacaaaaagcagctgtgaatcactccgtcccgctcccccgcgctttcagtcactccagttgctccacttccatatatattcggatttggactccgattcggatacggatttcgcttggttcgattctgttttcttcggatcggtttagctttgcttgccaactcgaaatcccacaaacatggtgagtactggcagattattgccgccgttttcgagttgttttggccaaaagcggcagtggcaaccaaacagcaacacccacacaccacacacacacgtacagtgcaagcttcttggccaggttttgagctcctccatcgccgcagttccaatccgaacttcgtggtaaacagttgtccgctgaaaacgcagtgcagcctccgcgtgaagaacgctctgaatatacggtttcaaagtcctaagaggttgtttatatgagtctaagtacagctacaagatatatttaagctatgcttttcgaaactatcgtgtagttgttccaaatacagtgaaacctcaatgttcggtttttgaagttaaaaagaaatataaacatatatttgaagtttacaaactgtacagtattaatttgagcaataaacccaacagtccagatttgaagtttttttgacatgtttcaaatttttaatattctagcatagtgtaacgtaaaacatgattaaatgtttagcaacagcaaaaaaactacatttttgcaaatagtaaacaaaattttaagcagttaaccgaaaaagttacagaccatagatgttacgcgatatttggatacaggttttaatccagattagttgcaatccagattcctaaagtcctatgtcaatcgccgtaatcttcgattgaaaaaggccgagagttgcttttttatgtggtaacattggtaaaatctttcatgccattccacatatggttgtttggaaagggttaggtaactggattcttgagcacttgtctcaccccagtgggcaatcaaattcgcctgtgggagcagcactggcgatccatctgtgcatgaatccccgccagaagctgcgttgtgtgtctacctagcgggaaatgcttactaaagatttaaattcgttttcgcagagcccgcccatcgtcacgcgacggagtgcgcagcaggcaaagattcagacacgggcaatggccagtaaatcgaagacgggcacgacaggggcggcgacggcggccggcggcaccggcagcagcagcggcagtatcagcggcggatttaatgccgccgatccgcgaaagtcgaacaaaccgaacgcagcgctcttggaggcgaaacgtcgagctcggaacaacatgctcaagaatcagggctgcggatcgcaggagagcgtcacggatatattccagaatgtgagtgctatctgactgacctctatcctctgtccttgtgcaatcctaaccaagtgatatttaatcgtcgccgacgaaaaggctgtcaacagcaagagtctggtgcggaaaccaacggcactgatctacgatgagtccatgagccagcactgttgcctgtgggacaaggagcactacgagtgtcccgagcgcttcacacgagtcctggaacggtgagtatatttgaagaaaacggtacaaattaagctgatatgtattccctaatctcctcatccagctgtcgcgaactaaatctgacggagcgctgcctggagttgccctcgagatcggcgaccaaggatgaaattctgcgcctgcacacagaggagcacttcgagcggctgaaggagacgtccgggattcgcgatgacgagcgcatggaggagctgagctcccgctacgattcaatttacattcatccggtgagcaagcgcatccaacggggaacatggaacagtgcatcccagtgcctggctccaaattagctcattttattgtatttgcacttgattgcttgcggagattgcgttgtttttaattcgacggcttgataaatgcaaattggagcagattagattagatgcgacccattgcacaggtacagtgcggtgcataaatgtaaatggttgagtgactggcataaattatgcaaatgattatacctccgaacttaaaatgcatttattccccgattgtaattctaatatgtctattcttgttgtgatattcattatctttatattgcgtgcaatctttatttagtttgctcaaactttagttattaattattacgactgcccgcagcttttattactttatatttcattagctaaatcctccagcaatctgaagcgcactgtaaattcgttaaaatgggctggtactcatactattacatcctagataagattcccgctgttttactagcaccgaacttgttatatatagaacactgataaccttatccgcctcccacccgcagtccacattcgagctctccctgctggccagcggctccaccatcgaattggtggaccatctggtcgccggaaaggcgcagaatggcatggccatcatccggccaccgggtcaccatgcgatgaaggccgagtacaacggttattgcttcttcaacaacgtggcactggccacccagcacgccctcgatgttcacaagctgcagcgcatcctgatcatcgactacgatgtgcatcatgggcagggaacccagcggttcttctacaacgatcccaggtaaagttggcaatatatgtttagtattctcattcatcgtgtgtgtgtttcagggtggtttacttctccatccatcgcttcgagcacggaagcttctggccgcatctgcacgagtcggattaccacgccattggatcgggagcgggcacgggatacaacttcaatgtgccgttgaatgcgacgggtatgaccaatggcgattacctggccattttccagcagctgctgctgccggtggccctggaattccagccggagctgatcatcgtttcggctggctatgatgcggcgctgggctgtccggagggtgagatggaggtgacgccggcctgctatccgcacctgctgaatccgctgctgcgactggccgatgcccgggtggccgtcgttctggagggcggctactgcctggactcgctggccgagggtgcggccctaaccctgcgctccctgctcggcgatccttgtccgccgctggtggagacagtgccactgccgcgtgcggaactcgcccaggccctgctcagctgcattgccgtgcaccgaccccactggcgatgtctgcagctccagcagacctacgattgcgtcgaattgcaggatcgggataaggaagaggatctgcacacggtactgcgccattggattggtggaccaccgcctatggatcgttaccctacgcgcgatacggccattccgctgccgccggaaaagctgaccagcaatgccgctcgtctgcaggtgctgcgcgcggagacgaagctatcggtgccgtcgtttaaggtgtgttatgcctacgatgcccaaatgcttctgcactgcaatctcaatgatacggggcatccggagcagccgtcgcgcatccagcacatccacaagatgcacgacgactacggtctgctgaagcagatgaagcaactgtcccccagggcggccaccacagacgaggtgtgcctggcccacactcgcgcccatgtgaatacagtgcgtcgattgctgggccgcgagccgaaggaactgcatgacgctgctgggatctacaactcggtgtatctgcatccgcgcaccttcgattgcgccaccctggccgccggtttagtgctgcaggcggtggacagtgtgctgcgtggcgagtcccgcagcggcatctgcaacgtccgtccgccgggccatcatgccgagcaggatcatccgcacggcttctgcattttcaacaatgtggccattgcggcgcagtatgccattcgggatttcggtctggagcgtgtgctgatcgtcgactgggacgtccatcacggcaatgggacgcagcacattttcgagtccaatcccaaggtgctctacatcagcttacatcgctacgagcacggctccttcttcccgaagggacccgatggcaatttcgatgtggtgggcaagggagccggcaggggcttcaatgtgaacataccctggaacaaggtgggtttttgcacacttacgggcccaactcattccactcactttgcagaagggcatgggtgacctggagtacgcactggccttccagcagctgatcatgcccattgcgtacgagttcaatccgcagctggtgttggtatccgccggattcgatgctgccatcggcgatcccttgggcggatgcaaggtgacggccgagggctacggcatgctcacccactggctgtcggctttggccagcggccggataatcgtttgcctggaaggtggctacaatgtgaactccatttcgtacgcgatgaccatgtgcaccaagacgctgctgggtgatcccgtgccgacgccccagctgggagccacggcgctgcagaagccaccaacggtggccttccagagctgtgtggaatcgctgcagcagtgcctgcaggtgcagcgcaaccactggcgctcgctggagttcgtcggacggcggctgccgcgggatcccgttgtgggcgagaacaacaacgaggattttcttaccgcctccttgcgacacttgaatatctcaaatgacgatgctacggctgcggcgggcggactcgccggcgatcgtcccgactgcggcgatgagcggcccagcgggagcaagcccaaagtcaaggtaaaaacgctcagcgactacttggcggagaacaaggaggtacgaggacagcactgcgcttatccctcagctggcaactaatcgcttcttttcgtgcctttcttcatctcgatcccatgccctgcaatctctgcccctcgatcccgttcccgatccccattcgcgtgtcaggccctcgagcagagtgagatgttcgccgtgtatccgctcaagacgtgtccgcacttgaggctcctacgtccggaggaggcgccccgatgtaagccaatgcagtccggagaagattccctccccttttggtcaagataatagcacttcttaagtgtgaacaagttgtcaagaaaaattcagttattgaatctctttgtatctttgtatttgtatgctgtgacccataaaaataattggaaaaatggttttatgactcaagttaagtcttcaataacgtatttaacattttatataaatggggaagttgtttgaaatgcatatagtgaaataccctataaatctgaaaaaatcgggaaatactttacaggaagtgctattattttgaccaattttaaggactcttctttcttataatgttcatcgttttctttgctttttgtgcttaaaattagcaattggctatttttctaaattacttataactgcttaatggtttatgtgcatatggcatgcaatctttttgtgcttggcggctgttttttctttcagtatccttgcgtttattgcattttttgaaaaggttttttgcttcaatccttacgttttagcaatgtaactttgggttttaaccaaaaatctgccgtgtgatttgcttttatctaactttatcttagtttaaaactttagaacatttgatatatcgcctgcatgtgaacagcttcttgagctatacgctactcaatcctgacacaactaacatactttctcaacgatttcccatccaaatcagcactagacagcggagcggagtgcagcgtttgcggatcgacgggggagaactgggtgtgcctgagctgcaggcatgtggcctgcggtcgctatgtgaacgcccacatggagcagcattcagtggaggagcagcatccgctggcgatgagcacggctgacctgtctgtgtggtgctacgcgtgctccgcgtacgtggaccatccccgcctgtatgcctacctcaatccgctgcacgaggacaagttccaggaaccgatggcctggacacatgggtgtgcgtggcgcgaggatggctgctatgcgacggggcccgatgggcgagatgaggatgacgatgatgataatggcgccggtagcagcatttgcctgcgactggagcgcaacaactgacccttagccatccgcgtgctggacgccctcacggactacttgtgcgcgctctgcccgccactaaggcacctaatccatttcctggccgagcacctctggccgctgctggagcgcatttaccttaacctgttgcactacttcctggcccactgagcaccccatatccaatcctctagcccgcacccacaactgatctgaaaactgctgcaactggcagccggtcggtcatcccctggagatcctggcaccagtcaccataccatttatacaaatgcaaattgttaaagttatcaactaatgatctaataaataattcaagtgttttttgagtttattttcgaatacagtttctagtttcgttaatgagatcgaacttcttaagttcagaggtatttattcataattctgttcatcccagccaaatcgacagttcatccacggttttatttaatctatatttctagattaactcaatatttgttgagtcataacgttggctactaaaaattacttctttttctgctgctttgccttccccttagaagctggagtgggttgctgctcgcgcttcattggcttcctcttccggtggccgtgatcactggagacatcgctgtcgctgtcggagaagtcgtcgttctccttgtcttccgatgagttgctttcttctgaggattcctcgtctttcttgttcttcttcttttccttcttcttctcggcatccagtttcttatcctgctcgtactcgatggtcacgaatccccgaggtgctgccggcttggcactttggtcagactccactttcgcctttggtttctcctccactttggtgcgttgttccaccggtcggacgttgccgaactggcggagatccagcaggcccaagtcggtgggtcggcagtccatgaagctgcgggcaatctcctccagcttgcgcgtttccatgtcgatcttccagactttgatttgaccagcgctggaaaagataaatttgtatatataaaaacgaataatgtgatgggtgttcttagttatctgggtgtagcttggatttttatagaataactcacatggagacggtggccaggaattcgttcagataggcgatggccttgacccttacctcgtgtgcaagaatgaaggtgggctgcaaagaaagcgcatttaagtatcatagataacaggctgagaaagtgcaattcttactggtgtatcatcctcgtccttgagggaaatccaggcaatgttgccgttgtccaggccagttaaacactcgttcccatccagccaggtgatgcaaatgggtttcgacggcatctcaat

SEQ ID NO: 13214 - DNA, 4689 bp, DROSOPHILA
cacaagatggatgtggcgcccttgactcgaaagcccttcgaatcgatagctattgaattcaagtagtagttatcgatgcggtgaacgatattaggctattttgaaatggaaaaaccaatattaatcgagtttcgaatgctccttttagcgagaggtaagtctttaacaccgcataaacacaatcagtgttgcctaaccaatctgtgccctccactttctctcataatcaagcaatttctcataaaaaacgcacatcgataagctgataacgttggccctcgactaacaccgattattcaacaagttgtgtcaatcggcggagcagctgatcgttgtaagtagcaagaagaagacgccacacaaacattgcactccgctccgcccgcgcgttctcatttcccatctctctcactctgtctctcgcgctcaccgtctctctctctcgctccgcctcgcaacccccacagcgctccacaaaccgggccccacattcttgtgtgtgatttctggttcaggttctgatttcccgcgtgtccttgtgtgtgtgcgcgctgcagtgtctgtgtatctgttactgttgctgcatcttctgcatcaactgcaacgttaccaaaaatcaaaagacaatcgcctgcaaaagcttaattttgttgctcagtgttttaagtattagctgtttgcaagcagcacacacacgtaagaaacaacaagaacaacgataaaagacaacaacacaaatgcagagcatttgaagcgcaaacacacacaagcattcggtgcggctgtaagagcgagacacaaaataaggctaatttataaaagaaaagtgtgctgcaaggaatcgataaataacgggagtcgaggagcggaataggagtaaccaataaatataaatactgtaaatgcgatattaaaaagcgacaacaacaacaaaaagcagctgtgaatcactccgtcccgctcccccgcgctttcagtcactccagttgctccacttccatatatattcggatttggactccgattcggatacggatttcgcttggttcgattctgttttcttcggatcggtttagctttgcttgccaactcgaaatcccacaaacatgagcccgcccatcgtcacgcgacggagtgcgcagcaggcaaagattcagacacgggcaatggccagtaaatcgaagacgggcacgacaggggcggcgacggcggccggcggcaccggcagcagcagcggcagtatcagcggcggatttaatgccgccgatccgcgaaagtcgaacaaaccgaacgcagcgctcttggaggcgaaacgtcgagctcggaacaacatgctcaagaatcagggctgcggatcgcaggagagcgtcacggatatattccagaatgctgtcaacagcaagagtctggtgcggaaaccaacggcactgatctacgatgagtccatgagccagcactgttgcctgtgggacaaggagcactacgagtgtcccgagcgcttcacacgagtcctggaacgctgtcgcgaactaaatctgacggagcgctgcctggagttgccctcgagatcggcgaccaaggatgaaattctgcgcctgcacacagaggagcacttcgagcggctgaaggagacgtccgggattcgcgatgacgagcgcatggaggagctgagctcccgctacgattcaatttacattcatccgtccacattcgagctctccctgctggccagcggctccaccatcgaattggtggaccatctggtcgccggaaaggcgcagaatggcatggccatcatccggccaccgggtcaccatgcgatgaaggccgagtacaacggttattgcttcttcaacaacgtggcactggccacccagcacgccctcgatgttcacaagctgcagcgcatcctgatcatcgactacgatgtgcatcatgggcagggaacccagcggttcttctacaacgatcccagggtggtttacttctccatccatcgcttcgagcacggaagcttctggccgcatctgcacgagtcggattaccacgccattggatcgggagcgggcacgggatacaacttcaatgtgccgttgaatgcgacgggtatgaccaatggcgattacctggccattttccagcagctgctgctgccggtggccctggaattccagccggagctgatcatcgtttcggctggctatgatgcggcgctgggctgtccggagggtgagatggaggtgacgccggcctgctatccgcacctgctgaatccgctgctgcgactggccgatgcccgggtggccgtcgttctggagggcggctactgcctggactcgctggccgagggtgcggccctaaccctgcgctccctgctcggcgatccttgtccgccgctggtggagacagtgccactgccgcgtgcggaactcgcccaggccctgctcagctgcattgccgtgcaccgaccccactggcgatgtctgcagctccagcagacctacgattgcgtcgaattgcaggatcgggataaggaagaggatctgcacacggtactgcgccattggattggtggaccaccgcctatggatcgttaccctacgcgcgatacggccattccgctgccgccggaaaagctgaccagcaatgccgctcgtctgcaggtgctgcgcgcggagacgaagctatcggtgccgtcgtttaaggtgtgttatgcctacgatgcccaaatgcttctgcactgcaatctcaatgatacggggcatccggagcagccgtcgcgcatccagcacatccacaagatgcacgacgactacggtctgctgaagcagatgaagcaactgtcccccagggcggccaccacagacgaggtgtgcctggcccacactcgcgcccatgtgaatacagtgcgtcgattgctgggccgcgagccgaaggaactgcatgacgctgctgggatctacaactcggtgtatctgcatccgcgcaccttcgattgcgccaccctggccgccggtttagtgctgcaggcggtggacagtgtgctgcgtggcgagtcccgcagcggcatctgcaacgtccgtccgccgggccatcatgccgagcaggatcatccgcacggcttctgcattttcaacaatgtggccattgcggcgcagtatgccattcgggatttcggtctggagcgtgtgctgatcgtcgactgggacgtccatcacggcaatgggacgcagcacattttcgagtccaatcccaaggtgctctacatcagcttacatcgctacgagcacggctccttcttcccgaagggacccgatggcaatttcgatgtggtgggcaagggagccggcaggggcttcaatgtgaacataccctggaacaagaagggcatgggtgacctggagtacgcactggccttccagcagctgatcatgcccattgcgtacgagttcaatccgcagctggtgttggtatccgccggattcgatgctgccatcggcgatcccttgggcggatgcaaggtgacggccgagggctacggcatgctcacccactggctgtcggctttggccagcggccggataatcgtttgcctggaaggtggctacaatgtgaactccatttcgtacgcgatgaccatgtgcaccaagacgctgctgggtgatcccgtgccgacgccccagctgggagccacggcgctgcagaagccaccaacggtggccttccagagctgtgtggaatcgctgcagcagtgcctgcaggtgcagcgcaaccactggcgctcgctggagttcgtcggacggcggctgccgcgggatcccgttgtgggcgagaacaacaacgaggattttcttaccgcctccttgcgacacttgaatatctcaaatgacgatgctacggctgcggcgggcggactcgccggcgatcgtcccgactgcggcgatgagcggcccagcgggagcaagcccaaagtcaagcactagacagcggagcggagtgcagcgtttgcggatcgacgggggagaactgggtgtgcctgagctgcaggcatgtggcctgcggtcgctatgtgaacgcccacatggagcagcattcagtggaggagcagcatccgctggcgatgagcacggctgacctgtctgtgtggtgctacgcgtgctccgcgtacgtggaccatccccgcctgtatgcctacctcaatccgctgcacgaggacaagttccaggaaccgatggcctggacacatgggtgtgcgtggcgcgaggatggctgctatgcgacggggcccgatgggcgagatgaggatgacgatgatgataatggcgccggtagcagcatttgcctgcgactggagcgcaacaactgacccttagccatccgcgtgctggacgccctcacggactacttgtgcgcgctctgcccgccactaaggcacctaatccatttcctggccgagcacctctggccgctgctggagcgcatttaccttaacctgttgcactacttcctggcccactgagcaccccatatccaatcctctagcccgcacccacaactgatctgaaaactgctgcaactggcagccggtcggtcatcccctggagatcctggcaccagtcaccataccatttatacaaatgcaaattgttaaagttatcaactaatgatctaataaataattcaagtgtt

SEQ ID NO: 13215 - protein, 883 aa, DROSOPHILA
MLKNQGCGSQESVTDIFQNAVNSKSLVRKPTALIYDESMSQHCCLWDKEHYECPERFTRVLERCRELNLTERCLELPSRSATKDEILRLHTEEHFERLKETSGIRDDERMEELSSRYDSIYIHPSTFELSLLASGSTIELVDHLVAGKAQNGMAIIRPPGHHAMKAEYNGYCFFNNVALATQHALDVHKLQRILIIDYDVHHGQGTQRFFYNDPRVVYFSIHRFEHGSFWPHLHESDYHAIGSGAGTGYNFNVPLNATGMTNGDYLAIFQQLLLPVALEFQPELIIVSAGYDAALGCPEGEMEVTPACYPHLLNPLLRLADARVAVVLEGGYCLDSLAEGAALTLRSLLGDPCPPLVETVPLPRAELAQALLSCIAVHRPHWRCLQLQQTYDCVELQDRDKEEDLHTVLRHWIGGPPPMDRYPTRDTAIPLPPEKLTSNAARLQVLRAETKLSVPSFKVCYAYDAQMLLHCNLNDTGHPEQPSRIQHIHKMHDDYGLLKQMKQLSPRAATTDEVCLAHTRAHVNTVRRLLGREPKELHDAAGIYNSVYLHPRTFDCATLAAGLVLQAVDSVLRGESRSGICNVRPPGHHAEQDHPHGFCIFNNVAIAAQYAIRDFGLERVLIVDWDVHHGNGTQHIFESNPKVLYISLHRYEHGSFFPKGPDGNFDVVGKGAGRGFNVNIPWNKKGMGDLEYALAFQQLIMPIAYEFNPQLVLVSAGFDAAIGDPLGGCKVTAEGYGMLTHWLSALASGRIIVCLEGGYNVNSISYAMTMCTKTLLGDPVPTPQLGATALQKPPTVAFQSCVESLQQCLQVQRNHWRSLEFVGRRLPRDPVVGENNNEDFLTASLRHLNISNDDATAAAGGLAGDRPDCGDERPSGSKPKVKH

SEQ ID NO: 13216 - DNA, 7930 bp, DROSOPHILA
aaaacgtacagccaagccaaaatgatagtaatagtataattgttttatgttatagtaaaacttattattttatcccattaacaggcaatggcgtcagctttctgaagcacgaagtccgatgggtgtttaactacatcaagacccaggcggccataactcccgatccctgcgacggagatcacggatgcatagagagcgcaagtggtggaaaggcctattgggccaatatctttgtgaacgaaactttgccggtggtaagtaaagaacccttacaataaactctacaaatcaccattaatattcattcgtacatattcttaattatatattttatatatatataatatatttctctctgtgttccagatgaaaggtagcatgttgtgggaatccaaggatgcgaacgatcagaacctaatctgtttccaggttcccgttgtaatcacagtgtaaatgtgtaatcacgaaaataaagtaattggtgcatgcaaatcaacagaccagtgcgtttgtgtgtgtgtgtgggggaggggaggtgtgcatgtgtgcatcctttaatgaaattttgaatgaaaacaaaggggcgcggcatcgtagtagtagaaagggagagcgagcgagacgggaggtggagatctccgttttggcacggcacacacggtgagtgggagcgggagcaagtggagcacggcacagtggtacaaatcgctgatatagcacttaaacagtcgagtataaacaatactatttaaatataacagaaatatatgtttataacttaaaatagttatgtaacaaactattatatgctgtgtgattattttgaatattttataattaatattatgttcgaaaaatccaccaccttgcccactgtggcgagagagcggcgggagaacgggagcattggagctcgagccctgcagtccgagtccgtggcgttcagtgtgtcactctctcttgggggctgcagcgcaacggtcgcacgaaaagagctcccacttgagatttagattcagattctgattcggattgagattcggtttcggttttgttacttaagatcaacagttcccaggagcggaaatcggaacagtgcggcgaattaaagattaaagtggcaacaagcgatcaaagaaggcgctccgactgcgtgggagtacgagatcacggatcacgaggcgtggagccagtgcatccgaaagtgtttccattaccgtgagtacctaaaaatgtatcgcactgcccgccatttgcgcaattccgtcggcgtaaatgagattgtcttcgcgctaattgcggactagtagagatggtgctggcgatataggggcatccaaggggatgagctgagatcccatcggatagtgcacggttgacatgcggcaacatcacttctcacgccccaaaagctctcttagccgtacacttgcataggcggcgttcttttgcctatagaagagattttagaacatatttgagttttagaaaggagatcccagaagaaaagcttttacagaactctataatcggaagtacgagtatgaatgcacacacgacatatcatatcgctgaaccttgagcacggcttcgtgttcagaacctgacgtagaactcgacaccgccatggatacagatcctactcggattcgctccgcttgagcttgagcttgagcacatgcccagctgggtgcttgaaccccttaaatgggcttccattggggtcacttggatttcctagcggtcttaagtgtcaccatagcgatccgggggataccgcgcttgacaacaatgggaaagatacgaagtttctagcaagagagtagctagatcatgtgaaattggtatagggactacatactgaagaatatagagctcaagcttaagaccttgaatttgtaagataatcgtaaagcttgttgttcttgatgatgaattgtttaggttataaatttgcatgaatcgaaagcgttgacatctgacgcatactaaaatggaatcatactttattttcatgatatttgagaagggaacttcacggtttctttaaatgcacaacagcaaacagtcggttgatatttacattatggttaactgtgattcagcaatgatcgtggataatgtttagccccccgtaaaaagccagtccatcgaactcctcggtttgatctcgccgttttctcgcctggtccccaaaaactgatgattgctcccgttccccgtcccatttgctggtattttgttacgtgccctcttggaacgttaaagtttttcgacttgttttttttttttaccaccaatgcactttggcagcgacggaggcaacaatgcgatgagctgttggtcaaagtgttaaacgatttgcatcatattacacccagttgctgccgcctcgagttttggccattgtcgccggattgccattgtagtaagccccaaatgggggattgtggtagggggtggaatgagggtggctaaggggacggagcaactgcaagtggaggcaaaacaaaagcaacactccagcaagagcagcaaccaccaacgatttatcacagcaacgacgtcaacgaaatcgatccggatcttagtgccccccatcctcatcccccccaattgccatccgctgccctccttagcaacgcccctgtgtgtacacttgcagaaaatatgggtcaaacgtgaccttaaacttgactatggccattacctccatctcttttttgatgaatactttgtagtgtttttcaattttatattttttcattttatccaactaatttcctaaaatttattagcattttccccaagtgcatcatatgtgtgctatgctatgctggccaagtgccttatcgccttggtgtgcgtgaagcataaaaagtaattttgaatttttgaatcgttaaaagcaattaatcgcctctacgcaacggcagccagcctggctgcgactcgactgtctcatcagcgtcagccggagaacccattcatctggaagagtcgtggccgcgatcctcatccccataccccacaccccgcaccacacatcccatatagcatacccatagccaaaccccaaccacaaccccaacccaatccccgcattgccgacgctttactgcccaattttgttgcaaatttttcgttccgcggaacttggtgcatttcatctcgtctgctcttggcgatcgtcgtcttcgcagtcgccgcttcatcttcttgcgtcgatcgtcgcgcacattcatttgtcgcttaatgtccctcagttaggctgcctcgggcctgcgctccccgcagccattccgagctccttggcccccagtccccatcgcatcccagtcggagtggcagtcgcagtcgccacagacgcggtcagcacaaaatgtcttccaattaagaatcaaattattataactaacaatgcagctaacgaggtttaactaacaatactattattttgcaagtaaattcattgcatactttttggcaagcgacttctactcagaattgatcccaagtccgatccaaatgaaacccaaattgtacttagaaagtagaaaatatataattacagctccatcaaaaaaattacccatacgcagtgttgccttcaatgatgcgatggtaataataagcactttgagatatgtacaaactttcgatgctgcgaatggattctaattattatcaaatcgcaatgcctacatacatttctgaacccaactgtgctggagcatggcatctcctggctaaaccaccgccaccagccgccgaatcgctgcaccacttctccactcaactgctcctgctcccagagtgtctgtatcgccttggtatgtgcggcatctgctggctaggcttctgatctgatgaggctgctgctggcggtgcggctgcttctgcagcccctgcaactgtggatgtggaaatggatgtggttgtggatgtggtgacatccacttgcagctctcgcacattcatcgtagtcgtatttttctcgattttgttttcgctgcctgcacattcacacgcagtcgaacagcaacaaaaagctaaacaacaacataaaccgacgaccatcgaccataccataaaacattagtttcccatttgcgtgctaaataccctacttggaatcgatgcgagcacatcgatagttatggctaacaggtgaagaatttcgagagtctgcttaaggcttccgagaattggtgcgttgagaaattaagatgaatagagctgtccgggatttagaaaggtgcgaagatattcacacgagaaaaaagttttattaggtagtccacacttgctgtgattcttatggtacactgagaaaaaaacaatagatacttttccaactcaaaatgaccagcggagtgcagggcatcacggagtcagcttgaaaggaagatagctggcctcgcctggccgtctgtccgatgctctcgtggcacgcactatgatgcgcgctttgaagtcctgtcaagcacttgagatacatttatgtgttttttgcattttcattgcctcgacttcggggtcggtcggctcaaatgcgaggaatgattagttagttggtcatgcaaaatgggtgaaaccggttcggctcccatcgatatcgcggggagcaggcggagcgggtgatcctttagcataatcagcgggctgctgctgatgatcggcacaaattacgaacgcacggaatgtccagaaaccgagagctgatcacctgacgcatgatcatttgcagattgcaatcaccgaggatcggagcgtttcagatgggcagcatgcaagtggcgctgctggcgctgcttgttctcggccagctattcccaagcgccgtggccaatggatcctcctcctatagttccacctccacatccgcatcgaatcagctgcagcgacagaagctggcacactggttccgggatagcaatgatgttaaggataagatcctggagctgcaatgcctggcgaagtgtggcagcaatcccacaaccaaagctggacgggaacagtgcctgaacaagtgcatccaggagcttttgctgggacccagagccggcagttgccccaaaattggaaggcaatcgcgtgccagactctcctgcctggacaactgtcagtacgatcatgaatgcccagaggtgcagaagtgttgtccctccagttgcggacccatgtgcgtggaacctctcggcgttaggaacaacacacagcttccgcccataccgaagattttgtatttccggagatcgcgaggtcatgctgtcgatctgaagatcgagtcctcgctactggtctactacttccatgtggaggtaagatcccacataggacggcattttgcagccagaaaactgggtccttggcaatggcagaaggtggagaagaccatggaggagaacatcggacacagcaagcagtatgtttattccatggtatatttattttacaatggcatcactcctctatatcccacagtacttacatcttctttcacatgcgacctggtcggtggtatgaggttcgagtggcagccgtaaacgcctacgggttccgtggatattccgagccaagcgatccctttccctcgacgggcagtaagtgtttagttctggtcttccaaacaaccttcacttactctgctgttaactctttagacccaaagcccccaaagtctccgaacgattcgaagatcatcggcaagcagttcgatggacgctacatgacccttaagctggtgtggtgcccctccaagtccaacctgcctgtcgagaagtacaagatcacctggtcattgtacgtaaacagtgccaaggcctcgatgattacgaacagctcctacgttaaggatgtaagtggaacccgatgtgtgccctgtaacgccttagcaatccgcacgttatgataatttcagacacaccagttcgaaatcaaggaactgctacccaactcctcgtactacatccaagtgcaggccatatcctacctgggttcgcgtcgcctcaagtccgagcagtggtcgatgctgttcaacacgacgctgcaacctctggagccaattacaccgcttcagtgctccgggaatggcaataggcgacggcatcatcacactagcagctctatgagctcggaacgggccacaacctcggagccagttgccctcaatgaagtttcgcccaccattacaaaccggacatcggccgccgccacgtatgaagtgggtttccggttaaaccggaagttcggcatgattgtgcagattctgggcttccagccacacaaggagaagtaattatttgtaaacaaaatgcccaaatgcataaatttcatgccatcaccccgattgcagggtctatgaactgtgtccccaggagacgaactgcgagcagcgagagttccgcgcgattcgcgccaaagtaagtaatacccttgatgatgctctgatgggagccacgagccacatgtcggaatacttcgtgccgattggccggaccaccgggcaagggcaaattagtggaacatcgttgaccatggggtattgtttaacaaggcgcaatcgtgtttcctctatttgacacggaaaacacgtctttccaattggcagtacgtggtcaaatgccaatcaaaattttcccaatattgatgaatagaatcgggtcatgccataggtgtttgccaaaatacaaagatcaaacaagcgaatgctgccgtatgttagatacattaaattcattttgattgcagaaagacccgctggagttcagcaaactgaagtacaacaccacgtatgtgctgaggattccccgttccagtcccaattccgtgttggacgactccagaaatgtctttaccttcaccacgcctaaatgtgaaaatttccgcaagagatttcccaagctgcagatcaagtgcagcgactagccttctctgtatgggctcaacgcactgctgaccatgagattacattagattgtaaataattgtatgtaaaacttaacttttacttatcgttaggcctaagaacaaacaacaagaaactaaacaccgatcgttttttacgtgaaaaggtccttaaactgctgtagatcctgctgatgaacgggtttctgactaatagagcccaaaagtttgcagtcttccaagcgcacgccatgctcaacaagagctgctatcagtcgcgaggtgtagagcactggtccgcccaccatgtgcaagaaatcatagtgcttctcccgccgcgtgctaaaaaggattcgcttagagacaaagtctccgtagttgctgatacgtcccacacacacatagcgctgcagtgagggggcataaacttcgatgactgcccggatactctccgccggagttagatctgctgctgttgcataagaaatcctgaatggtatgtccagtgctttgtagaaatcagttgccagattgagaatatgctctagttgggagtccgcttcgttgtccgtttgcgttgccacaaagatttgtaccgcattcgtttgtgtcgccgtataaagactaggaatgggcccatacaaatccgcttccgctctgttgtagctccgaccacagcagacataccgaaggggcagcaccgagggatacacgcacagcttggtcatggcaccaaggtagctctcgaaggacgcacctccagtcaaataggcggtattgatcttgttttgcaggtgctcttcctgaaccagatgatagtcggataagggtgtcgcatttgcttccaggagaacgcaacgcacaaagtccggattggcggtttgaatgaagtgcccgtggttgacgaaatagcgggccagggattgcatggcatttacgtcaaaaagagcagcctgctccatcaagtagtaacgattgttgtctacaaaatgtacaagttcctggcgtgccaagtgggatg

SEQ ID NO: 13217 - DNA, 1796 bp, DROSOPHILA
acttgagatttagattcagattctgattcggattgagattcggtttcggttttgttacttaagatcaacagttcccaggagcggaaatcggaacagtgcggcgaattaaagattaaagtggcaacaagcgatcaaagaaggcgctccgactgcgtgggagtacgagatcacggatcacgaggcgtggagccagtgcatccgaaagtgtttccattaccatgggcagcatgcaagtggcgctgctggcgctgcttgttctcggccagctattcccaagcgccgtggccaatggatcctcctcctatagttccacctccacatccgcatcgaatcagctgcagcgacagaagctggcacactggttccgggatagcaatgatgttaaggataagatcctggagctgcaatgcctggcgaagtgtggcagcaatcccacaaccaaagctggacgggaacagtgcctgaacaagtgcatccaggagcttttgctgggacccagagccggcagttgccccaaaattggaaggcaatcgcgtgccagactctcctgcctggacaactgtcagtacgatcatgaatgcccagaggtgcagaagtgttgtccctccagttgcggacccatgtgcgtggaacctctcggcgttaggaacaacacacagcttccgcccataccgaagattttgtatttccggagatcgcgaggtcatgctgtcgatctgaagatcgagtcctcgctactggtctactacttccatgtggaggtaagatcccacataggacggcattttgcagccagaaaactgggtccttggcaatggcagaaggtggagaagaccatggaggagaacatcggacacagcaagcatacttacatcttctttcacatgcgacctggtcggtggtatgaggttcgagtggcagccgtaaacgcctacgggttccgtggatattccgagccaagcgatccctttccctcgacgggcaacccaaagcccccaaagtctccgaacgattcgaagatcatcggcaagcagttcgatggacgctacatgacccttaagctggtgtggtgcccctccaagtccaacctgcctgtcgagaagtacaagatcacctggtcattgtacgtaaacagtgccaaggcctcgatgattacgaacagctcctacgttaaggatacacaccagttcgaaatcaaggaactgctacccaactcctcgtactacatccaagtgcaggccatatcctacctgggttcgcgtcgcctcaagtccgagcagtggtcgatgctgttcaacacgacgctgcaacctctggagccaattacaccgcttcagtgctccgggaatggcaataggcgacggcatcatcacactagcagctctatgagctcggaacgggccacaacctcggagccagttgccctcaatgaagtttcgcccaccattacaaaccggacatcggccgccgccacgtatgaagtgggtttccggttaaaccggaagttcggcatgattgtgcagattctgggcttccagccacacaaggagaaggtctatgaactgtgtccccaggagacgaactgcgagcagcgagagttccgcgcgattcgcgccaaaaaagacccgctggagttcagcaaactgaagtacaacaccacgtatgtgctgaggattccccgttccagtcccaattccgtgttggacgactccagaaatgtctttaccttcaccacgcctaaatgtgaaaatttccgcaagagatttcccaagctgcagatcaagtgcagcgactag

SEQ ID NO: 13218 - protein, 522 aa, DROSOPHILA
MQVALLALLVLGQLFPSAVANGSSSYSSTSTSASNQLQRQKLAHWFRDSNDVKDKILELQCLAKCGSNPTTKAGREQCLNKCIQELLLGPRAGSCPKIGRQSRARLSCLDNCQYDHECPEVQKCCPSSCGPMCVEPLGVRNNTQLPPIPKILYFRRSRGHAVDLKIESSLLVYYFHVEVRSHIGRHFAARKLGPWQWQKVEKTMEENIGHSKHTYIFFHMRPGRWYEVRVAAVNAYGFRGYSEPSDPFPSTGNPKPPKSPNDSKIIGKQFDGRYMTLKLVWCPSKSNLPVEKYKITWSLYVNSAKASMITNSSYVKDTHQFEIKELLPNSSYYIQVQAISYLGSRRLKSEQWSMLFNTTLQPLEPITPLQCSGNGNRRRHHHTSSSMSSERATTSEPVALNEVSPTITNRTSAAATYEVGFRLNRKFGMIVQILGFQPHKEKVYELCPQETNCEQREFRAIRAKKDPLEFSKLKYNTTYVLRIPRSSPNSVLDDSRNVFTFTTPKCENFRKRFPKLQIKCSD

SEQ ID NO: 13219 - DNA, 2789 bp, DROSOPHILA
agcatgcggctctcacagagcagcagttggtggaggccttaactcgagaaacggagctcaagggtcgcatacagacgctattggcaaatgtaacagcttcgcagaaggccttcgacgaaaaatacgagcaactgcatcagaacgtgcgtgaactgcagaaatccaaccagtaagattcgttttattttgactgtttcatacataatttcttcatatttcccttttagcaatctgggccaaatgttagatcacaccaagcgcaagtaccagctgcgggtgaggaagctagagcagaagattgttgacctgcggctggactacgagcaaggccataaccatgttcctgagactactctgtaggaaacgcatgacgaccttccaggaggactgagcaactgggcgtggagcgggcgcgcttgtcacatatcccgcaaaagatctttccctctcgatcatatcgcttattttacctttaatgcaatgaccacccgcccagcagtcgccgtggatccgccatgaccaagacagtatcacgaatgtgccatgcgacttaattgcagtcggctggggcttgggcggtgtccctgcctcgcagataaggctgcagtaactacatactcaaatacatacatattcagaggtgccatgagcaaggctccaccaacctatccatagatccgtgggattggagcatccgtctatgggccacaagcaattacatatacacacatacgaatagacaaactaaggagttattcaagacgcatacacgggatcctatatttatacaatgtattcgcattttgcttgttatatgattcaatatgtatttaaaactgtacaaaatataaaacgtctactaaaactcgataaaattcacgaatttgaaattggctccaataattaatcgataagctaatgaaactaacttaagcatccatcaccatttcgtgtagtgttgcaaatcaccagaatcaagtatatgagtacttgtgaaataaaaatgttttgaaaatttaacttaatttacttaaaatgagtgccacagatgcatctacagccgatagtggcgctaaacgaaaatcttctgaagatatcacacacaattgcaacgcaaattttggcgcagaaaacggcctaagaaagcgcgtaaaatcggaggagcctgtggcgtccattaaagatgaaacaaatcctgaagttcctatgaaaataaaagctgagccagtggagaatgcagatgagcccacaagcactactcctgcgatcaagattaaagccgaaccagcggacaatggaaactcacctgcagctgcgatggtaaaaaccgagcccactaatagcaatgcacaggacgccgccgacgagtctaccgtatcttcaagcagtattaggacttcttgtcgcttcggcatacgatgctacaggtgattcacactaaccaactcccatattaccaactaaaaatatacctttttccaatgacaggcgaaatccagctcatcgtagtgcagaagctcatccgggggatcaggattaccggcgaccaaactttccagcgccacccctcggaactccagcttgtcctttcggtaacgcatgctatcgccgtaacccagttcacttccaggattactcccatcctgcggattgtaagtagaaggcttggcatacttcggcttcaaattggctaaagcccattgtagtcaattccgcgcagaacattcgaaatcgtctgcgtcaacggcgagcccaacggcagaacgacgatgactcggggacggatgaggaggatgaaccctttggtggcgacaatgacagggatgcggactaccgtccaggcgcagacataaacgaagatgaggatgatgagctggagtttgatagccaaccaataagtggggatgactatgattagactataaattcaaattcgctgttaacttagatgatacgttccatttgccgaataataggctttatatatatatattatattctgttgatgaaaacttatgtctatggagttccattagtagaagccctcgtcaacttcatcggctggcttttgatcaaaagtggcgccccattttgcagcctctccgccgcgaacttttacattgtagcaaacattctcggccttaagaacgctctgcttcatggtagtgatcttacgccatagttcacgggctctctgacagtttagactgatgtaactgaaaacaataggaagttaattgagtttcttaagggagaactaaccaacccgctgtagaaatgctgcagggccttgcaggtgtccaaacaggtgtctgtatctccactgcctagcgaatttatgcagcggcgcatcagttcaccagtaagatccgaaagtccaagtatatattccgtggggtctacgaaaaactggaacttctttgggctctcaacctgagctatagcctgaacatcttcgccttcagttggttcttcctttggctggctgctctcctcgacgtactgcatcaccgcctgaatggcctgccaatctgaaacgctcttggtttcgttctcgccctcagcatcctcgtggcacaggtactccatgtaggtgtaggcctcgataaactcctgcaatcctggagagtaggagctgcggaactggtagacatcctggtcgcgcagttccagggccacagccctaaagttaaccgcgatcagcttgttcagtcgctgacgtgcctcctccaggaccttctccttattctgcttacgcgagtcaatggagtgcagcaggaagatgatac

SEQ ID NO: 13220 - DNA, 728 bp, DROSOPHILA
aaaatgttttgaaaatttaacttaatttacttaaaatgagtgccacagatgcatctacagccgatagtggcgctaaacgaaaatcttctgaagatatcacacacaattgcaacgcaaattttggcgcagaaaacggcctaagaaagcgcgtaaaatcggaggagcctgtggcgtccattaaagatgaaacaaatcctgaagttcctatgaaaataaaagctgagccagtggagaatgcagatgagcccacaagcactactcctgcgatcaagattaaagccgaaccagcggacaatggaaactcacctgcagctgcgatggtaaaaaccgagcccactaatagcaatgcacaggacgccgccgacgagtctaccgtatcttcaagcagtattaggacttcttgtcgcttcggcatacgatgctacaggcgaaatccagctcatcgtagtgcagaagctcatccgggggatcaggattaccggcgaccaaactttccagcgccacccctcggaactccagcttgtcctttcggtaacgcatgctatcgccgtaacccagttcacttccaggattactcccatcctgcggattgtaagtagaaggcttggcatacttcggcttcaaattggctaaagcccattgtagtcaattccgcgcagaacattcgaaatcgtctgcgtcaacggcgagcccaacggcagaacgacgatgactcggggacggatgag

SEQ ID NO: 13221 - protein, 187 aa, DROSOPHILA
MSATDASTADSGAKRKSSEDITHNCNANFGAENGLRKRVKSEEPVASIKDETNPEVPMKIKAEPVENADEPTSTTPAIKIKAEPADNGNSPAAAMVKTEPTNSNAQDAADESTVSSSSIRTSCRFGIRCYRRNPAHRSAEAHPGDQDYRRPNFPAPPLGTPACPFGNACYRRNPVHFQDYSHPADCK

SEQ ID NO: 13222 - DNA, 3379 bp, DROSOPHILA
atgtgttcatttgtttatcgccgggacagaagttgaaaaccagttccacagatgaagttctatcgtaattgcgtataactttaagtacaatacattaaggtctaattgacagactgactggcagcccaaagttgatttcaactcggcccgctcttcgcctcaccaaattaatcatcagagaatgcgatagatgtggctcgtgttggtgttgcgatttattatattatataagcatgcggaattacgtaagcacttgtcgaacagttgccttatggcattaagtaattctcttggatttctgcgatgccttgagccgcttcacgtccattcgattattactctgactgagtcattccccgatgtcgagtaattacagccctatcacagaatcgatcgaatatatacatatgtgtatattatccagacccagatctcttcctgaagtcttttgtttactcgtgcatggaaaattgattaggctaaatgcaattaaaagtccgagcgttttaaatttatgagtttgagcagaacaaagggaatcacttggttgaataacgaggatactacaactcaaaattcatatacacaaagttaccttttcaatgagtaaacttaacttaaaaatgatgttcattactttaaaaacatatactatactactttcgtgtcagttcaaattttaagccgatgtgacaatgttgatcatctttttatagtctcgcgacacatctcttaaagtgtctaggcatgacagatacccttcttttggagtttgacaagcgcattaaatcgcaatttaaagcgttaaactatggcttaagttaaaaccgcagcttttcagttcagaaaaatgccttgctggcgcagtttcatagcattgatctgtctggcaatcatagttgttgttataaccatctgccaatcttttcacacaaattttctaacagtgggccgtaatggaactttaagatatgagcccactgaactgaatcttggtcagatgcgaatgatcgccggactctccgatcctgaaaatcttcgcaagaatgtgcaaaggattgcgattaagagagcagtaagcacaccgggacattcggaagtgagaaactacatagtggattacctaaagaaactgaactggaacgtagagttagatatatttacgcagaaagtgcctattatgagtaatgtaacctttcacaatattgtggcccggcaaaatcctcaaacccaaagatacctaatgtttggctgccactatgacagcaagtatttcaaggatttcgattttatggccgccacggattcggcagttccctgtgcactaatgttaaatatggctacaattttgaaacaccagtttcatcgctcccaggtcagtttaatgctggtcttcttcgacggtgaggaggcatttggggaatggtcgcaggaggattcgccatatggttccagacatttggcggagctgtgggagaagcacggttttcttgataagatagacctcttcgtgctgccggatctaattggagccaaggatgtggtctttaagaaaaacattctcgatacatcaggctggttccaccgacttgtacagctggagctgaagctattccaggcgggcattgtgcgctcagaacgtccactattcaagtttgagcccggtatagatgtagatgatgaccacctgcctttcacgagacgcaacgttccggtcatacatctaatatccaataaatatccagcagtttggcatcaagccgaggatgtagagatgaacgtggattacaatactacggagcaagtgggtctagttctgcgaatgtttgtaatggaatacctaaattcagcaccatctatatcaaatacccttaaatagtaacaataaatagatgtctttaaatacctatattgcatattaagtaatatatacagtttttgttagtaaaggagcgaagtattttaaattttagtttaaggttcaagaaaaaacaaaaaaacgaaaaatcaaattgatggaaatgaagtgctttgcgatcgtttctttattaataaccacaattctgacttggccacaaccgccgactgctgtgttgttacttttcgcctctgctggcaaccgaatcgtatcaaatttccatccatccgccatcgtttttccgctccccagttggccaaaagccatcagccatcaggccacgggcaacactcgaaatttatgtacgctgctcccagctcgctgaaagcaacacgaaagttaattaaacttgaaaataataaaagcaaagcggagcagaacagaacagaagcagcaccagaagcttccaggagaagaaggatgtggatgtggatgtggatgtggcgaataatgaaacataaaaagtgtacatcacagccagcgggcaccgcaccgaatggcggacacgggcccagaaatcggctagggattgtacatatatatgtatatatatgtatatatatatccgcagatatatgtagatgaactggcaaaggcacggaggtcggtcggtggtcatcattagcatatcgccgacagcggcgcgaaaaagggttcccatttgaaaagttaatcgccagctgatgctgcactgcgattgcgagtggtgaaaaaccagtggagcagcactccactcaagggagtgggcaagtgggaaaagagggggtgacgatgactgcgttgacactgacagccacccaaaagaaccccctccaatcccagaaagacccaccgaaggccatatccctgtcgtcggaccttatctgcggactgcaataaaaacggacaataattaaaactggcaaatagaactggcacactgcgactgtgggtctgaacacttgtcaaaaagggttttctgcaatgtccttttaattacgaagtagccttaacattttacagatttttttacgatttttctaagatgtaaaatgtattaaaaacaacactggagactaacacaaaataacctgtatctatttactctactataaagatacaaatacttatgcgaaatcgaaatgatttgtttttttaatgatatacctagtaactattaaagtatcactttaatattctatcttaacaaattcattgctcacagtgcacaacttaaccccatttttatattcagtttcctagtcataaatcagttatgcaaagataagtacaattttcattacattgttttaattacccgaaaaaaaaagtctgcatactcttgcagtgcattccgaattgattaagccccaagggaaattgttcttttgactaaatacagatatagcatgatatttcaaaggaggccctttgagccttttaaaaggatttcttttccaatattttttcaagattatgtct

SEQ ID NO: 13223 - DNA, 624 bp, DROSOPHILA
atgcgaatgatcgccggactctccgatcctgaaaatcttcgcaagaatgtgcaaaggattgcgattaagagagcagtaagcacaccgggacattcggaagtcagtttaatgctggtcttcttcgacggtgaggaggcatttggggaatggtcgcaggaggattcgccatatggttccagacatttggcggagctgtgggagaagcacggttttcttgataagatagacctcttcgtgctgccggatctaattggagccaaggatgtggtctttaagaaaaacattctcgatacatcaggctggttccaccgacttgtacagctggagctgaagctattccaggcgggcattgtgcgctcagaacgtccactattcaagtttgagcccggtatagatgtagatgatgaccacctgcctttcacgagacgcaacgttccggtcatacatctaatatccaataaatatccagcagtttggcatcaagccgaggatgtagagatgaacgtggattacaatactacggagcaacaaagcggagcagaacagaacagaagcagcaccagaagcttccaggagaagaaggatgtggatgtggatgtggatgtggcgaataatgaaacataa

SEQ ID NO: 13224 - protein, 205 aa, DROSOPHILA
MIAGLSDPENLRKNVQRIAIKRAVSTPGHSEVSLMLVFFDGEEAFGEWSQEDSPYGSRHLAELWEKHGFLDKIDLFVLPDLIGAKDVVFKKNILDTSGWFHRLVQLELKLFQAGIVRSERPLFKFEPGIDVDDDHLPFTRRNVPVIHLISNKYPAVWHQAEDVEMNVDYNTTEQQSGAEQNRSSTRSFQEKKDVDVDVDVANNET

SEQ ID NO: 13225 - DNA, 3703 bp, DROSOPHILA
tgtagaatacccgattgaccatgtctcttttgagaagggcaatggcgtcctgcagttgtactgacttcagggaggtctctgtggtgtttacatgcttcagggaaatgctggcagccgcagtgaggcgactgggatgcaaggcagagatcttgagtagctttcctcgaagttgtgtgcaatggagtttgaaatctggttaaaagtatgataattagtgccgagaactgtttttatagtgtaaaacacatacccccttcgctcacaaatactgtggtgaggaattgctctgatgtgggccatacaatcctaaccagcggctgctccgccgtcgatggagcttccagcaccacatgttgtccaatgtgtagctgtgccaattgcatcgcaccctcggagacgaagactagcatattggcatacttggtgggcagatccttcagagactccacctcgaaattacgctgttgaagacttctcgtatagattgctccactgcgaacgtactccgcctcagaatcgggaccaacatcatcctggctgatggcgaagcataagccctcgtggttatctctcgctttcgagggaatgtggacgccgcaggactcgcagtggtaccaagtaacctggtttttcttgctgcttgactttggcggcatttcgttggccggttgcacgttttgttttcattgtgggtggaaacgttcgttgtgaatggcaaattgagcgcaagctctggcagatcttgatcgaaaatagctagatcttggtatagctaaacagataataatcgtatggcgtacggattgcttgttaatattaatttcattgcgtaatattttaaatattcgatagttataaataattaaaattgattgttaaaaataatagctaagcaaatgcagtcagcctagctgacatcactgacagtgttggtagggtcggtatttacccgctgtccgcatgcagccactccaaagattcattgttggcttgtgactcagactttctggtgcgaaaagcaggagcggatcacacagcggattagcgatgaacagcgacggtgaagcctcatcactgcagatgccccaggtgacggtgggtggcatgctgccggtagaagccaaccaatcgcctgaaaccgctccgctttcgatggcggagacggtgtccaacacggacttctacatcggcgttggcctggctatctcctcctgcttcttcatcggttccagcttcatcatcaaaaagaaggcgctcattcggctgagcaggtacggcgaggtgcgggcgtcagccggaggatttggatatctgagggagtggatctggtgggcgggccttctgacaagtgagtgaagaaccaaacaaagaacactcggtttccggaatacccttgcagtgtgaactctctagtgtgtatatgttctatgagtaataatagtaaagtgaaattcgaaaaccaagatacttaagtgaggaaagccttagaaacacttttccatatgtttcatatccaaaaaggtaataaaataacacatatgtacctgctatcacaaacttccgttgctgatatttttaatttaaatctttccaaatattagtcaattacttataacgtacaacgcaaactagagcattaataaacatataacgaataatctttaaaacgtagagataacaactatttccatttatacacataaacttgcctaatctatagaatcgaagattagttgcgaagcttctccagaaatttgaataccgtctgcaagggtatattatcagaaaaacagaaccccttatcacactgaccttatgactcacttgctctgtttatttcttacagtgggtgtgggagaagcggccaactttgcggcctacgcctttgcccccgcttcattggtcactccgttgggcgcgctgagtgttatcatctcagccgtgatggcctccagattcctcaacgagaagctaaacttgctggggaagatcggctgctttctgtgcatactgggatccaccatcattgtgattcactcgcccaaagagaaggagatcgaggatttgcagctgctattcgatatgcttttggatccggttttcattctgtacgtgatctgcatcgtcggttccacggtgtttgtggcctgcttcattgcaccacggcatgggcacaccaatgtggtagtttatatcttcttgtgctccggcatcggatctctgactgtgatgtcctgcaaggcattgggcctagccatacggcagacgctgaataacggaggcaacgtcttcctcacatggatgccatggttcctgatcctggtcaccgtcactttcatagccatccagatgaactatctgaacaaggcgctggatatattcaatactagtatagttactccagtgtactatgtaatgttcaccaccctggtgatagctgcgtctgccatcctcttcaaggagttcacccacatgcggttcgatgatattctcggcgatgtgtgcggcttcctgatcgttatcacagctgtgttcctgctcaacgcgttcagagatattgatatatcgctgaacgatgtacgtggactgatgcgaccgaaaatgcagcgggtgtcgcagttcgacgaggaggtgctggtcaccagcaataccaaggaacggcggctgtcctacggatccagcgacatcttccggaaggcctgacacaagcagcgctaccaggtctagttacatcccttgcagcggctgacctgaagacaaggttgctttactccgtaaacgaggcattggtccaaatatctgtgcatatcacctgcaatcactttcatctcatcatttccatttattgttccttcactcttgttattcatacattcgctagcataagcacataggtttaggttacacttacatatattaaacacgacttaatgaaaacgatttgtaattgtagttttattttttgatttttgatatgatattcgtatctatgtattactaaaaaaaaaccattaaaatattctactacattggtaaatgtaggtcgttccaaatcgaacgacaatattcattgcaaataatgtgagtacatgctcaatcggatttagtaaaataaatcttcaagttattttcaaggtttgttagttagtaatttaatgaagtatctatgtattctgaatttcgcccttgctggtcttatctggatattttaatccgttcagccagatgcagttgctcagacttttagcggtgtgaaatgagtcatcggctgagttatccggactgttctccactggcggaagatcctttggtctacgaatctttcgtggcgtgaagaagtcgcgatctgtgattaaaggaaatcgctggctttcatttggagcaaccgcaggtaagctgatctgcggctggagtgtcagtgagtcctgtttcagggtcattcttccgaagttccggatgatggcaatcgcctccacgtccaccattgtggtgtcctcccagtcctccattgtggcgtgctctcccagcggcttggtgccagctactctctgaatcgtctccatcatttgcagactttgacgaatctctcggccctttccaccccgcgtgccatatccaagcagatcctcgcgggctgtcaaaagctcataggtatgaatgggaacggattctgagaattcctctttcttcctcagttcatagg

SEQ ID NO: 13226 - DNA, 1205 bp, DROSOPHILA
gactttctggtgcgaaaagcaggagcggatcacacagcggattagcgatgaacagcgacggtgaagcctcatcactgcagatgccccaggtgacggtgggtggcatgctgccggtagaagccaaccaatcgcctgaaaccgctccgctttcgatggcggagacggtgtccaacacggacttctacatcggcgttggcctggctatctcctcctgcttcttcatcggttccagcttcatcatcaaaaagaaggcgctcattcggctgagcaggtacggcgaggtgcgggcgtcagccggaggatttggatatctgagggagtggatctggtgggcgggccttctgacaatgggtgtgggagaagcggccaactttgcggcctacgcctttgcccccgcttcattggtcactccgttgggcgcgctgagtgttatcatctcagccgtgatggcctccagattcctcaacgagaagctaaacttgctggggaagatcggctgctttctgtgcatactgggatccaccatcattgtgattcactcgcccaaagagaaggagatcgaggatttgcagctgctattcgatatgcttttggatccggttttcattctgtacgtgatctgcatcgtcggttccacggtgtttgtggcctgcttcattgcaccacggcatgggcacaccaatgtggtagtttatatcttcttgtgctccggcatcggatctctgactgtgatgtcctgcaaggcattgggcctagccatacggcagacgctgaataacggaggcaacgtcttcctcacatggatgccatggttcctgatcctggtcaccgtcactttcatagccatccagatgaactatctgaacaaggcgctggatatattcaatactagtatagttactccagtgtactatgtaatgttcaccaccctggtgatagctgcgtctgccatcctcttcaaggagttcacccacatgcggttcgatgatattctcggcgatgtgtgcggcttcctgatcgttatcacagctgtgttcctgctcaacgcgttcagagatattgatatatcgctgaacgatgtacgtggactgatgcgaccgaaaatgcagcgggtgtcgcagttcgacgaggaggtgctggtcaccagcaataccaaggaacggcggctgtcctacggatccagcgacatcttccggaaggcctga

SEQ ID NO: 13227 - protein, 385 aa, DROSOPHILA
MNSDGEASSLQMPQVTVGGMLPVEANQSPETAPLSMAETVSNTDFYIGVGLAISSCFFIGSSFIIKKKALIRLSRYGEVRASAGGFGYLREWIWWAGLLTMGVGEAANFAAYAFAPASLVTPLGALSVIISAVMASRFLNEKLNLLGKIGCFLCILGSTIIVIHSPKEKEIEDLQLLFDMLLDPVFILYVICIVGSTVFVACFIAPRHGHTNVVVYIFLCSGIGSLTVMSCKALGLAIRQTLNNGGNVFLTWMPWFLILVTVTFIAIQMNYLNKALDIFNTSIVTPVYYVMFTTLVIAASAILFKEFTHMRFDDILGDVCGFLIVITAVFLLNAFRDIDISLNDVRGLMRPKMQRVSQFDEEVLVTSNTKERRLSYGSSDIFRKA

SEQ ID NO: 13228 - DNA, 7775 bp, DROSOPHILA
tcacctcagcaacaaaagcaataaagaaaactgataacaccagctggaatatcagatgattcaccaacaacaacaacatcgaggagcaaaagcaacaacagctgatgccacaacttcagcacaaagagcagcacaccagcggtaatgaaactcaaaacaatagaaacattgaaaataatatttacaacaataccactatcaaccacttgagctagcacaacaccaacaaaagccaagaataattacaccaacgccaaacggtacaccaacgagaactttcaacaagagcaactttagtagaagtaaccgcaacaataataataattacaccaacatttataccaatagacaacaatctacaaacaactgtaacttttgttggtgtgctctctataggggcaacaactaccccagccgcagcaacaccacgtcgcacatcggtggcgaccacaacaacaacaacatgcaataaaacagctgatagcgacagcagcagcagcaacaacaaagcctgccattatcaagcgagcaacaacaggtcgcgaaaaaaaaaacaaaaagcccgcctgctgcagcacacacacacatacacagccatacagaagagcgggtgtgcgagagagagaggcaaagacaaagtcgcacacctttacctttgcgttgattttggacgtcgcaactgaacaactgacgcttcgcgctcgctcgctctccgtgggactcgctctctctcgcacaaagtgcagctgagctgccgccgccgcacttgccgctgccacaaatacaacacggccagctgaacgaacgctctacgctcgccgccgccgctgctgccgccagtcgaaagtcaaaagcaacgtgttgtggacgcttttttcgtcgcgtcgttgcgttgcgttctctctctctctcactccttttcctatcaccaacacaaccatacaaccgacacaccagtacaccacccaccaaccacccaccaccccgaacccccgcgcaggctgggaaaactttcaccattaccaacaacaacaacaatgtccagcagcgcagccacagcgcagttcaagctcgatgccaactccaatgccattgctttgatagccgatgttgccacgctgccactccccctttcgcccactgcaacaacaacaacggcggcgtcgggagcaacagcaaccgcaccagctgatcgcgtcgaatggtcgcgctcgacgatcttgaacttcatcgaggactatcgccggcagcgagtcctttgggatcccaataccaaaggttaccacattaaacagaccaaatacgaggcactcaagctcctgagtcagaaatatggcacggaaattcgttcgattagatcgaagatcaaatccctgcgcagctcgtttcatcgggagcacggtaaggtcctgagtggacgaaatcgcggcgttatctatcagcccatgtggtttgcctacgaggccattagattcatactcgatggcgagcgggatcaggatcgcgatcaggatcaagatcaagatgccgaaacggaaacggaagtggacgaaaagctagccctgatgcacagcctggatctggagcagctgaaggcggacaagctggtggacagggacatcatactgcaggtggagcaacagcagcagcaacacgatgagcttaccgctcgcattgcggccactgtggccgccgttgctgccgctgcggctgcagcaaacgctcgagatcgggagcgggatgtggataccgctggcgatatggataccactcgcgaattggaactcgaggaggcggcggtcggcggtggcctgatcgaatcctcctcggcggctgtggtaagtggtgctattgctgttgctttttctttggccaacccatgtgtatacctccacctattttgcatgtgtctctcggcctttagtttttttttttttttgtttgtcgtatttctttggagctttgcatgtgagcgcgtgtgagtgccagtggtttgacttgttttgcggcaccaggcacagcacacgcgctgctgctgtcgccgccttcgcccgccgtcgctgtctagcggttcgtcaaagccagcggcgcaaccggtggcgcacagtgggacaaagcctagacttttctgatagccttttgaggttaggaacattttgtgatatgtccgttaatatgtcaaacgaacatagctatttcaaaagtatgtgcattacagcagttggacacaagtcgtatacgtaattaatttaacaaatacatatttcgagtaattttaccattgcactagtaataattcaattttcattatacttgagtcggaaaactcgagccagaaaagcaaatgaggttaagaagtgttaagtattttttttgttggtatacgcgacgtatgagtatttttttttcaaatcaactaaatgaaaagacaatcctttttaaatataatgtttattgtgggttgtaaaaatacttaaaagacgtagtggcaaatatttaccaaattgaagaacaattgttaagatacgtggcgtatgagtaattttaccattgcactagtaataattcaattttcattttacttgggtaagaaaactcgagccagaaaagcaaatgaggttaagaagtgttaagtattttttttgttggtatacgcgacgtatgagtatttttttttcaaatcaactaaatgaaaagacaatcctttttaaatataatgtttattgtgggttgtaaaaatacttaaaagacgtagtggcaaatatttaccaaattgaagaacaattgttaagatacgtggcgtatgagttttttgaatatttgtataggaagtatgggtctacatggcgtatacgaaatatatatatatttttttttcaattttttaaaatcatgttccttgatgtaattgtaatgttaattgatgtttacatattttctcataattttagaagtttttatttcgttgttattgtgttgtttcgtgggctctatttatttaagtgatttgcacaaaatttattaagcccactgtgctcggtagctgctattgcgttgcgcttgataaggctgtattggtgttagtgtgccagtgtgtgtgtgtgtcaactggctttgatttgcgctgccgcttctgctgtacacaccgccaaacctacaaatgcacatacatatgtatatccataatgcatacacatgtgtgttgcatcagccgtagaaatcgacggccccacgttttgcaccgagccacgcccctcggccccgcatcgatgctccgccgcccccaagcagcggtagctccaatatgattacacatacatacatacatacacacgtagcaatattaatatagcaagttgctggactgcgtttcgttattcctatgtcgcctcgcccgctcgttcgtttttgtatttgattccgattctctcccaaaaaaaaagtacgagacttttgggcagaagctcgtccagcaatcgggcaacttcagctgaacagcgagctttcaccgaagctccgaagaagcgcttgccaagatagatgaccaataggctacatagttcgatcggctttccggaaatcaaataatcttaagtaaaaaataatagatgcaatattatcttaacgtcaattgaagcaaacagcagtattagtcacattgttcgccccactaagacgctgataaggcgaccttgaccagtataattaaataaagtttgtgtaccttacgtaagtaatggtaatattgcaatcccatacgaatttattgtactttcgatatacactatatactacatattttttatattagtacagtccatttgtttcgatttgacgttttttagtttcgaatatatttcaaaagagtcattaaaaaagagggttatgataggacttacttaaattcataaatttttagtaaatatatttacctaaatataatgtttactaaactaactacaaccctgaattattgctagaaattacagacttaacgccatagaaatagggtgttctctcgtcgatgtcttgatgcgtttcccattattttgtgatatttttcgtctgtcatattttttttggtcactcgtctcacgtccgtctgtgagtctgtccaccagttggtccacttcggtgttgacttggctgctgtcccgtccgtaccgcccccgcccctaaaacacttcgctctgcccccccccctgtccaacacccccctcaggcatcttgtaccgccgtgactaatttaatcgccagcggctcgactggcgagtttgcatcgacttttgtgtgtgtttttgtgcctgagtttgctttttattattattctaatttgttttctatttctctggcgtttctcgctttgcgtctgtctgtccactactattattatgttttgttgttttcttttttgttattatttgtctggcaaattctccacactgccataattgtatttgttgttgactctactacggtctacgctaattctagattttttgttcgatcttcgcagacacgttcctcttccgatttggatggcgagaattactgcaacatcagcgccgaggatgtgaaaacagaaattgtaagtaccctccgttgattgttaatcgcactttaattgaattgacgggttgaagttactttttggggggataatttaacattttttttttatacatcacaacccctgaagtggcaagtcaagtgggtgtgtgggtgcaattagtaaatcatttttgacacgggactgggaaacgaaatcacttttgaataatgtgtttcaaattagtagaaataatgataatgatcatattaagtatctttatataaataaaatcatattcttttagccaaataagtcattgttgtaacgattacatataggcaatttttaatgatataatctagttggcagttatttaagaatcctcacacatctgctattttttcgattatatattccaagcaaatagtacgattagattgcttattcgataaggcagcagtgtataaaattctgtaactaacttaattcgatgacgaaccttatcactgtgacgtccacaacttgaacattgaccgtccaaacttttgagtccctgaaggtcattgggtgttgccaaggcagatatacataatacatccgtatatcgctagtgataagccctagaagtcaaaggcatgtgaatcacatggtacttttgattcaaaattttagaaactttacaatatgctatgaatatgaaatatttgccaagctgcatttgattgcaaaatggcccgactaagatgactctcactattgatactttcacagacaaggttgtgcccacaatttaatttaattactcaactcgggttgcttatcaaagtacccacatgtcccagtcatctttcccttcaggcaacttggcaagcccatgaatcgaattgtttatactattagtatacagagcgatgcgcttctagtaaatagttgatgaaacaactcagcgatgatttcgtcagacattgatactataaatatatatgtacatataagtatagcgaaacacgttccggtattttttgaccggcccatctttagctaaataatatatgcagctgatgaaatattgaacagattttacttggcaaaagggaaaagctcatccttcatccattcaaccttgtaagattctctgggaaaaactcaatttattatagcttgggcatttttaaaattacatttattagcaaagtaaatgttactgttcattttagtttaattaaaattattaaaagtcttgattggaattttatataaattatatatattttgttgacatatattagatatatttgttttgctggattattgtattgcatctgctttaagatactttcgcagtgtacacctttcaacaccgtctaaaacacaaacgtataccccgtttttttccttcctttgccttaaaccaaacagatcgaacacgaatcggagctggggatgctggatcgtcggacgagcacgccgtcgcccataaattactacaagccgacggacctaacgtacaaccaccgcaaacgtaaggcgatgggcgtggagcacgttgtgggcgctttgacattgacgcccatcaaggtggtgggcggagcggtgggggcgggaacggtcggttccgctggccaccaacagcagcagcagcatcagcagcagcagatgaaccacagccagctcgcgtttcaggcgctccagcagcactttagccacaatcacggtcttagcctgagccactgcaacgggcaaccgcagcagcagcagcagcagcaccaacaccagccacatcatcagcagcagcagcagcaacaagcgttgcatctgcagcaccagcaacagcaacaacattccagtaacatggcacaaaaacgtgatcgtgatcgtgatctctcaacgtcaaatggcaacggcaacagcagcaacaccaataacacctccctggaaccaatagcaacatccagcaactgcagttcgagcagcagcaacaacagcgctgccacgccccccaagccgctgttggggggcggcggactgagtgccaatcatgtggacgaatatggtgtattcggggaatacgtggccataaccatacgcaaactaaagacgtccaagtcgaaaatagtggtcaagcacctgatcaacaatctgctctatgaagccgaactgggtaaatacgatcatgggatgccggccagcaaggagccaccgcagttgtacaatatgcaataaaactagcaaataaacggggataggattttggatattggataaatccgaccaaaaacatgtagacaaactacgacgtagacaggggggggggagtggaagagacaacaaccaacgcactagtcagcaaagcaacaattggtcaaaaccagagccaagaattagtagaaccagggggtttaattggatggttggggaggggggagggggtggggaaagcgggtgacatgagcatttcattcagggacaatgaccatataagtactttatctatatacatttataaacacataaacgatatcagtgagtatatccgaagtcagtcagtcagtaaaaggagtgcagttgaattaggggtgaaacaaacaacataccattaattaaattgaattaattataaatgctttaaacgttaacagtgtatttttatgcacacacccatatacatatatatatgctacgtttataaatatatatatatatatatactttttatgattatcgttttttgatttccagcgagcgttatatttttgattttcgttttattatatttacatttggcaataacactttgaactcaggtgcctttatttttttagtcaattaagccttgttatcttatgcataaaagggaaagagcaaacaaacaaacaaacaaaacgaacgcgaattgattgcaaaatgtctacatgtaatgcaaataaatgaagccgtaacaacatgtaaatttaattaactttttatcgcatatgcaaatccatatgtataaacttaattctgtaaatagtctaaaagaaaaaaaggagaaaacaatgaaacatgaaatgtgcaaatcttaatttttgttatgcataactaatttgaatcgagcgacgggctccaaataaaaatgcagaaatgttgaatttcattttgaaaatgaaacgaatgaattttattaacttgaaagggcaattgccaataaaattgaattttattcacagaggagtaatggctgcac

SEQ ID NO: 13229 - DNA, 1624 bp, DROSOPHILA
gctgggaaaactttcaccattaccaacaacaacaacaatgtccagcagcgcagccacagcgcagttcaagctcgatgccaactccaatgccattgctttgatagccgatgttgccacgctgccactccccctttcgcccactgcaacaacaacaacggcggcgtcgggagcaacagcaaccgcaccagctgatcgcgtcgaatggtcgcgctcgacgatcttgaacttcatcgaggactatcgccggcagcgagtcctttgggatcccaataccaaaggttaccacattaaacagaccaaatacgaggcactcaagctcctgagtcagaaatatggcacggaaattcgttcgattagatcgaagatcaaatccctgcgcagctcgtttcatcgggagcacggtaaggtcctgagtggacgaaatcgcggcgttatctatcagcccatgtggtttgcctacgaggccattagattcatactcgatggcgagcgggatcaggatcgcgatcaggatcaagatcaagatgccgaaacggaaacggaagtggacgaaaagctagccctgatgcacagcctggatctggagcagctgaaggcggacaagctggtggacagggacatcatactgcaggtggagcaacagcagcagcaacacgatgagcttaccgctcgcattgcggccactgtggccgccgttgctgccgctgcggctgcagcaaacgctcgagatcgggagcgggatgtggataccgctggcgatatggataccactcgcgaattggaactcgaggaggcggcggtcggcggtggcctgatcgaatcctcctcggcggctgtgctggggatgctggatcgtcggacgagcacgccgtcgcccataaattactacaagccgacggacctaacgtacaaccaccgcaaacgtaaggcgatgggcgtggagcacgttgtgggcgctttgacattgacgcccatcaaggtggtgggcggagcggtgggggcgggaacggtcggttccgctggccaccaacagcagcagcagcatcagcagcagcagatgaaccacagccagctcgcgtttcaggcgctccagcagcactttagccacaatcacggtcttagcctgagccactgcaacgggcaaccgcagcagcagcagcagcagcaccaacaccagccacatcatcagcagcagcagcagcaacaagcgttgcatctgcagcaccagcaacagcaacaacattccagtaacatggcacaaaaacgtgatcgtgatcgtgatctctcaacgtcaaatggcaacggcaacagcagcaacaccaataacacctccctggaaccaatagcaacatccagcaactgcagttcgagcagcagcaacaacagcgctgccacgccccccaagccgctgttggggggcggcggactgagtgccaatcatgtggacgaatatggtgtattcggggaatacgtggccataaccatacgcaaactaaagacgtccaagtcgaaaatagtggtcaagcacctgatcaacaatctgctctatgaagccgaactgggtaaatacgatcatgggatgccggccagcaaggagccaccgcagttgtacaatatgcaataa

SEQ ID NO: 13230 - protein, 528 aa, DROSOPHILA
MSSSAATAQFKLDANSNAIALIADVATLPLPLSPTATTTTAASGATATAPADRVEWSRSTILNFIEDYRRQRVLWDPNTKGYHIKQTKYEALKLLSQKYGTEIRSIRSKIKSLRSSFHREHGKVLSGRNRGVIYQPMWFAYEAIRFILDGERDQDRDQDQDQDAETETEVDEKLALMHSLDLEQLKADKLVDRDIILQVEQQQQQHDELTARIAATVAAVAAAAAAANARDRERDVDTAGDMDTTRELELEEAAVGGGLIESSSAAVLGMLDRRTSTPSPINYYKPTDLTYNHRKRKAMGVEHVVGALTLTPIKVVGGAVGAGTVGSAGHQQQQQHQQQQMNHSQLAFQALQQHFSHNHGLSLSHCNGQPQQQQQQHQHQPHHQQQQQQQALHLQHQQQQQHSSNMAQKRDRDRDLSTSNGNGNSSNTNNTSLEPIATSSNCSSSSSNNSAATPPKPLLGGGGLSANHVDEYGVFGEYVAITIRKLKTSKSKIVVKHLINNLLYEAELGKYDHGMPASKEPPQLYNMQ

SEQ ID NO: 13231 - DNA, 7179 bp, DROSOPHILA
tagatatttatgcagatcgatttatatatgtatgtatatgtatatttagagatatatgtatatgcgcttctcctaattgttacgagtaaatgacacacaattctttcgcttgacagccactccgcactccgtatctcaccctcaccctagtgattaatgaaactgccacaaagtggtccaatcccaggtgtaatatttcctgctgcgaagacattttacttctccatttgctatttattactgttttgtgtatgcctcgaaaatgtcccttctattcattccggcaatgaaaattaaaaaccacaaaaaaaacattaactcaaaaataagaactacaaaaaacgaacctaaaaagaagccaggcttaatgtttaagtattagaaaagtgaaaggtaaaaaatcgataaagaaattcatttccttgaaagcttagcttaggtttttcaaaaaatatatacatcttaatatattttctatctgtatagtgtacacgataaaacacaataacacttgatattatctacaattaccaaaatttctttctaccgaaacaggagacaaatttgatttactcggaccactgattctgtacgtatatgctaactttgaatttatcagacataccggcatatatcacatcttttgcatatttaaaccattagatatatgagtttttcttcaacttgttaaacattttcaatgacctaccaccacacacaatcacacaagagaaacgaaacaaaatgtaatatgaaaagaaaaagtgatattgaaacactatgtaaacatattattacgtcgctgcgtaatcaatgtgtattgttttgatggatatacatctctatgaataaagataaatgtattaagttgatgttaaaatgcaataaaacgaaagtgcaaccgaaacgtgttttcttgatttcgaaagaacgtttcgctgagcgtccatccctggcatccgcgtcgccgataacagacgctgtccatcgattgccctagcacacgccgctacacacctctatggttttgcggcaaaaaaaaaaaagttttttgcgaaaatttgtgagtttacgagaagcagccaactaaatggtttagtttcgctaagtagacgatcaattgctggaggccagttttaccaagtaccggctgggtgcatttagcaggagtaaaggagaccattcgactgctgcgtattgatagggcaggttggtgtgcgagtcgttgctgttcatcaactggcgaaattaataatgtgtacccccatgccgtatcatcctcccacctgcagtcagccgatgtgtcaatgttaatcgcgctcttcgcgcttgcacacttgccaatctttcgtaagacgcctttgtcagcctcctcctccccgccgccgtctgtccaccggtcgccaaggtgtggcaaagcaagtaccgcgtaccatccaccgccagcagacgcctgcatcagcattactgcttcagccattgacgcagcatccgggatgagcaacagcgccgaacaggacaagccgattgccgccaacggcaatgcggcagagccccaggaaatagaagtcatgtgcgtatcaccggttatccaatagacggcccttgcttaattaattcttttttttttgtgcctaacagccatttccaagcgcaagagaagcagtgttgccgcgttattagatccaataagaccaaggtcctcacatccggcggcgttcacacacgcggttcctccaaggtcaagctaaagaacatcgtcgactacaagtgggagcgcaagtactactatccgggtcacctggtcgctgtccaccgcgatggcaagcacctggcgtacgccattaatggtaagtaatttatatcccattgcagtttcttgaccaattagattttatttatgtgtgacaactttttctcgcaattcttgagttttataaaaaaggaatgattcttgaatttatcgatgggaatcatgtcccaatcaatattttacagagcttccggggaatgatggtttaattattatgtatacttatgaacccatttaccttgtgttaattttaaaattaatttaaaagctattgtataataacttcattgtgctcccagtcaacaacaaagccaccggaatggagggcatggtgcgcgtatgcaacatagccaccagtatgcgagccttgatcaagggaatgagcggcgaggtcttagatctgcagtttgcccatacggattgtgagcgtatattagctgtgatcgatgtcagttcgctgtttgtctacaaagtcgatcaaatcgaagggaacctgctgtgcaatctagtgctaaaggtggaggaccccatcgccaactatgtgccggagtacgatatggtctcctggtgtccctatgtctgcagcagcagcgccaccgttccaatcaacgacgatgacgatgagaatcagctgctcatttggtcgcgaagctctcaatttcaatgctttcaagtgaagatgattgtctctgaacatggggttcgtttgtgctaatgttcagcgccaaacatatcattaatggcatttaccttaacagcgcggcaagatccaaccagcagccctagaatctggatatctgaagattgaggaggactcgttgatcacgtgcgccgctttgtccccggatggcaccactgtggctgctgcttgcgccgatggcttggttcgtttctaccaaatttatttgttcgatgtgcgcaaccatcgctgcctgcacgagtggaagccacatgatggcaaaaaagtctgctctctcttttttctcgacaatatcaacaagcctgtggaagagtaagtagttattatataataattaaatataattattatattaaactttcccattagatcctactggcagcacgtgatcactacgagcgatgccaataccgaaatcaagctctggaactgctcgctatggaaatgcctccaaactatcaatgtggtggccagtccgtcatctttgcagcccagaaactttatcgcgggcatagatcgcagtgcgaactacttggtgttgtcttgcctggactctctggccgtgtatgtaatgcagattggcagtactggcggcgcagactccgagaataggagtagcgatagcgaaggagaaggctgcgacacttccaaacgcattcagaatgttgccgaattcaagctgagttcggggattctctctttttctattgtaaacgctagtatgcgtcgcgttaagaactccatcgagagctactatcctattgaggagcccgatgacttcgatgacgattccaattccaccagtgcccttgtgctgcacatgtttgtggtgcaggcaaagagcctgcaggaatgtcaaataatctaccagccatgtgtggctgaaaagacggagcggagcagcctaaacagcaagcgatcacagacgccagaagacaatctgctaatcaaagaggagccggaatcccccaacagtggaactgtgggtgctgttcagctggatgcattattcgcaaaatccgcaaagagagcttcaacgggcagttcatctgccatggtggccgtggcggcagccgcggctgcggcaccttcggccatcctgcaggacgccactaaggaggcggccaagtcagagtccccgcaactaagcagcgcgtatacgcagcaggttaatctcatgactccagatgccttcagtgcaagcggaaccgcagcggcagcagctgtatttgtgtctaccagcaccacaacttcaataggaactgatagctctaccaccaccagcggtcaggatagatccattgattcagcggttctgcaaactatacgaatgctggccacggtaacgtccaagacttccgaaaaccccaatgccgaggtactcctcaacctaatgaacaacaccctaatcgaagatcgcgagcaacaaaagctgaaggaaaagcttgacgctcgcaagaagttcattgcaattgatcgcaatccagagcggaatgtggctgagaacttggccagcggcagttcgagtccgagtcgagaggtgcaggagataatggccacacaggacgatgccgatgcctacgaagcagagctagagaatctggacgacgatgatgacgatgaggaagaagagctggcaaattcatcaccgctcccggaagctgttgacggaacatggcccattgtcaagctgtcatcccactcagctgagctccagaatgctgcccagatcatgtcccaggcggtgcagaacaccaacaatggcaatgtgccgcctacgctaggtggagggcacaataataacacaagtgtaggcagcaatagcaacaacaacacggctacaactcttagcaccagcaacaccagcagcagcaacaacgcgggcggaacatgcgttgattcaagtggaactggagagctaaatgccaaaatggaactactcataggtaagtggttgtgatcttcaatcagaaattttaaatattttatattaaaagaggcatgatggcgtaacgtacttcaaatactaacaatttcacataaattatttgcagatctagtaaaagcccagtccaaacaaataaacaaattggagaacgaagtcaacaagctacaaaagcagcaagaagcggcggcggccctgcatagcaaacaagacacttcattggagcctaaaaatcttagtcagctagcatataaaattgagatgcaactgtccaagctaatggagcagtatctcaagcgatatgaaaacgagcataagaagaaactgacggaattcttggcggcgcggtaagatacatataacaaattttccggggcacaatccaagtgaatactttttgcagtgagagccaaaaccgagagctacgtgactccgtgctgcaggtactaaatcagtatgtcatgaaccactttacggacattattggcaacgttctcaacatggaactgcagcgccaactgcttcctcgcgtgaatgccaacatggatcagctccaagcccaaatgcaagtggagattgtgcagaagctgagtgtgtttgacaaaacggtgaaggagaatattgcccaggtgtgcaagagcaaggtacgtaatctgcaagtccatctataaatgcttataattaagcgtttttttttcattacttagcaatttctggatacttttggcaagtccgtgttgattggtgttcaaaccagcctacaaaccgccttcattgaatctatgagcagcaccttgattccagcttatgagaagtcctcgcagaacatgtttaaacaactgcatgacgctttcagcgtgggcataaaagactgttagtatataatcattacaatcataatggatacataaagctccttcttttgaattccagttatggtccagtttaacacctacctgcagcacatgccacagccccaagccgggagtggcaatacggaggagataaacaacaagttgtccatgcttaagcaattggtagagagcagcttgcacaagcaccgcactgaactcacggacgccatgctcgagacacaaagagaagtgaagagcttagagattttgctggcgcgtcaggtacaggaaacgatcagagcagagctacgcaagcacatggaagcccagaacgtggcaatgcgttcgcaggcagctacgcctgcaccaccttacgacctcagggacagcattaagcagcttttgatggctggacaaatcaacaaggccttccatcaggctctattggccaacgacttgggcctagtggagttcactctccgacacacggacagcaaccaggcattcgcaccagagggatgcagactggagcaaaaggttctactgtcgctcattcagcaaatatccgctgacatgaccaatcacaatgagcttaagcagaggtgagctaggagaactaaacaagtaacaaaacattacaaagaattacattgatgatgtacctttttcatttgtagatatctcaacgaggcactgttggccatcaatatggcagatcccattacccgcgagcacgctcctaaagtgctcaccgagctgtatcgcaattgtcagcagttcattaagaacagccccaagaattcgcagttcagcaacgtccgtctgctgatgaaggcaatcataacgtaccgcgatcagctaaaatgatatcaagagaactataacctggccagtggctggttttgatagattacccatccgatccccatccaagatagttaatctatgaccacaaacacatttataaatacacgcttgtagttaagtccaaaaagaagttagtatgctaaaaagctctcagctaagttcatcccttaaaaagttgaaattgaatctatgcctttcattttattgtttatttgttttgtgcgtgatttgtttatagtaaggccgtatatctaatgtttatgtcgctatatcaaaattgtattatctttataatgattcgcctactaaattgcaatatatttttttattattttatttttgcgttccttttattttcctttttatctttatgacgcttaatgaacaaaagaaaacacacaaaaacaagaataggagctgtagaaacttatttaaaaattattttcaaaactaaagcaaactttattatgacggacaaaacaaaaaaattattagattgcaaatgcaaaaactacaagtaaatcgtagaatttaagctaaaaaaaaaaaaaaaaaacagaaagcaaaagtcgataataaaaaagaataaatgtatgtacttgaaaaaatctagaaacagttctttttgaattatcgtaaccatatgattttggttaagtgtatagttgcataaagcttttacccttagcttggctagtaagtggtcatatatttctcaatggtatgcaaatcgtacaaaaattgttggcctaatgactaaaaaacacctaactattttgatatccacacagacgaaagaaagttaagtaagattatttttgaaaggaatgcacatcactcaaggtctgaatcagctgagtagggctagcagctctgaggtgcgctccaagcacttgcagccacacgtagcacagacattgtgtttctgaaagttaaacaagaaaatagcaaacatgaatatatttatatccataaatccataaatccaaatccatacatc

SEQ ID NO: 13232 - DNA, 4289 bp, DROSOPHILA
cacacgccgctacacacctctatggttttgcggcaaaaaaaaaaaagttttttgcgaaaatttgtgagtttacgagaagcagccaactaaatggtttagtttcgctaagtagacgatcaattgctggaggccagttttaccaagtaccggctgggtgcatttagcaggagtaaaggagaccattcgactgctgcgtattgatagggcagtcagccgatgtgtcaatgttaatcgcgctcttcgcgcttgcacacttgccaatctttcgtaagacgcctttgtcagcctcctcctccccgccgccgtctgtccaccggtcgccaaggtgtggcaaagcaagtaccgcgtaccatccaccgccagcagacgcctgcatcagcattactgcttcagccattgacgcagcatccgggatgagcaacagcgccgaacaggacaagccgattgccgccaacggcaatgcggcagagccccaggaaatagaagtcatccatttccaagcgcaagagaagcagtgttgccgcgttattagatccaataagaccaaggtcctcacatccggcggcgttcacacacgcggttcctccaaggtcaagctaaagaacatcgtcgactacaagtgggagcgcaagtactactatccgggtcacctggtcgctgtccaccgcgatggcaagcacctggcgtacgccattaatgtcaacaacaaagccaccggaatggagggcatggtgcgcgtatgcaacatagccaccagtatgcgagccttgatcaagggaatgagcggcgaggtcttagatctgcagtttgcccatacggattgtgagcgtatattagctgtgatcgatgtcagttcgctgtttgtctacaaagtcgatcaaatcgaagggaacctgctgtgcaatctagtgctaaaggtggaggaccccatcgccaactatgtgccggagtacgatatggtctcctggtgtccctatgtctgcagcagcagcgccaccgttccaatcaacgacgatgacgatgagaatcagctgctcatttggtcgcgaagctctcaatttcaatgctttcaagtgaagatgattgtctctgaacatgggcgcggcaagatccaaccagcagccctagaatctggatatctgaagattgaggaggactcgttgatcacgtgcgccgctttgtccccggatggcaccactgtggctgctgcttgcgccgatggcttggttcgtttctaccaaatttatttgttcgatgtgcgcaaccatcgctgcctgcacgagtggaagccacatgatggcaaaaaagtctgctctctcttttttctcgacaatatcaacaagcctgtggaagaatcctactggcagcacgtgatcactacgagcgatgccaataccgaaatcaagctctggaactgctcgctatggaaatgcctccaaactatcaatgtggtggccagtccgtcatctttgcagcccagaaactttatcgcgggcatagatcgcagtgcgaactacttggtgttgtcttgcctggactctctggccgtgtatgtaatgcagattggcagtactggcggcgcagactccgagaataggagtagcgatagcgaaggagaaggctgcgacacttccaaacgcattcagaatgttgccgaattcaagctgagttcggggattctctctttttctattgtaaacgctagtatgcgtcgcgttaagaactccatcgagagctactatcctattgaggagcccgatgacttcgatgacgattccaattccaccagtgcccttgtgctgcacatgtttgtggtgcaggcaaagagcctgcaggaatgtcaaataatctaccagccatgtgtggctgaaaagacggagcggagcagcctaaacagcaagcgatcacagacgccagaagacaatctgctaatcaaagaggagccggaatcccccaacagtggaactgtgggtgctgttcagctggatgcattattcgcaaaatccgcaaagagagcttcaacgggcagttcatctgccatggtggccgtggcggcagccgcggctgcggcaccttcggccatcctgcaggacgccactaaggaggcggccaagtcagagtccccgcaactaagcagcgcgtatacgcagcaggttaatctcatgactccagatgccttcagtgcaagcggaaccgcagcggcagcagctgtatttgtgtctaccagcaccacaacttcaataggaactgatagctctaccaccaccagcggtcaggatagatccattgattcagcggttctgcaaactatacgaatgctggccacggtaacgtccaagacttccgaaaaccccaatgccgaggtactcctcaacctaatgaacaacaccctaatcgaagatcgcgagcaacaaaagctgaaggaaaagcttgacgctcgcaagaagttcattgcaattgatcgcaatccagagcggaatgtggctgagaacttggccagcggcagttcgagtccgagtcgagaggtgcaggagataatggccacacaggacgatgccgatgcctacgaagcagagctagagaatctggacgacgatgatgacgatgaggaagaagagctggcaaattcatcaccgctcccggaagctgttgacggaacatggcccattgtcaagctgtcatcccactcagctgagctccagaatgctgcccagatcatgtcccaggcggtgcagaacaccaacaatggcaatgtgccgcctacgctaggtggagggcacaataataacacaagtgtaggcagcaatagcaacaacaacacggctacaactcttagcaccagcaacaccagcagcagcaacaacgcgggcggaacatgcgttgattcaagtggaactggagagctaaatgccaaaatggaactactcatagatctagtaaaagcccagtccaaacaaataaacaaattggagaacgaagtcaacaagctacaaaagcagcaagaagcggcggcggccctgcatagcaaacaagacacttcattggagcctaaaaatcttagtcagctagcatataaaattgagatgcaactgtccaagctaatggagcagtatctcaagcgatatgaaaacgagcataagaagaaactgacggaattcttggcggcgcgtgagagccaaaaccgagagctacgtgactccgtgctgcaggtactaaatcagtatgtcatgaaccactttacggacattattggcaacgttctcaacatggaactgcagcgccaactgcttcctcgcgtgaatgccaacatggatcagctccaagcccaaatgcaagtggagattgtgcagaagctgagtgtgtttgacaaaacggtgaaggagaatattgcccaggtgtgcaagagcaagcaatttctggatacttttggcaagtccgtgttgattggtgttcaaaccagcctacaaaccgccttcattgaatctatgagcagcaccttgattccagcttatgagaagtcctcgcagaacatgtttaaacaactgcatgacgctttcagcgtgggcataaaagactttatggtccagtttaacacctacctgcagcacatgccacagccccaagccgggagtggcaatacggaggagataaacaacaagttgtccatgcttaagcaattggtagagagcagcttgcacaagcaccgcactgaactcacggacgccatgctcgagacacaaagagaagtgaagagcttagagattttgctggcgcgtcaggtacaggaaacgatcagagcagagctacgcaagcacatggaagcccagaacgtggcaatgcgttcgcaggcagctacgcctgcaccaccttacgacctcagggacagcattaagcagcttttgatggctggacaaatcaacaaggccttccatcaggctctattggccaacgacttgggcctagtggagttcactctccgacacacggacagcaaccaggcattcgcaccagagggatgcagactggagcaaaaggttctactgtcgctcattcagcaaatatccgctgacatgaccaatcacaatgagcttaagcagagatatctcaacgaggcactgttggccatcaatatggcagatcccattacccgcgagcacgctcctaaagtgctcaccgagctgtatcgcaattgtcagcagttcattaagaacagccccaagaattcgcagttcagcaacgtccgtctgctgatgaaggcaatcataacgtaccgcgatcagctaaaatga

SEQ ID NO: 13233 - protein, 1291 aa, DROSOPHILA
MSNSAEQDKPIAANGNAAEPQEIEVIHFQAQEKQCCRVIRSNKTKVLTSGGVHTRGSSKVKLKNIVDYKWERKYYYPGHLVAVHRDGKHLAYAINVNNKATGMEGMVRVCNIATSMRALIKGMSGEVLDLQFAHTDCERILAVIDVSSLFVYKVDQIEGNLLCNLVLKVEDPIANYVPEYDMVSWCPYVCSSSATVPINDDDDENQLLIWSRSSQFQCFQVKMIVSEHGRGKIQPAALESGYLKIEEDSLITCAALSPDGTTVAAACADGLVRFYQIYLFDVRNHRCLHEWKPHDGKKVCSLFFLDNINKPVEESYWQHVITTSDANTEIKLWNCSLWKCLQTINVVASPSSLQPRNFIAGIDRSANYLVLSCLDSLAVYVMQIGSTGGADSENRSSDSEGEGCDTSKRIQNVAEFKLSSGILSFSIVNASMRRVKNSIESYYPIEEPDDFDDDSNSTSALVLHMFVVQAKSLQECQIIYQPCVAEKTERSSLNSKRSQTPEDNLLIKEEPESPNSGTVGAVQLDALFAKSAKRASTGSSSAMVAVAAAAAAAPSAILQDATKEAAKSESPQLSSAYTQQVNLMTPDAFSASGTAAAAAVFVSTSTTTSIGTDSSTTTSGQDRSIDSAVLQTIRMLATVTSKTSENPNAEVLLNLMNNTLIEDREQQKLKEKLDARKKFIAIDRNPERNVAENLASGSSSPSREVQEIMATQDDADAYEAELENLDDDDDDEEEELANSSPLPEAVDGTWPIVKLSSHSAELQNAAQIMSQAVQNTNNGNVPPTLGGGHNNNTSVGSNSNNNTATTLSTSNTSSSNNAGGTCVDSSGTGELNAKMELLIDLVKAQSKQINKLENEVNKLQKQQEAAAALHSKQDTSLEPKNLSQLAYKIEMQLSKLMEQYLKRYENEHKKKLTEFLAARESQNRELRDSVLQVLNQYVMNHFTDIIGNVLNMELQRQLLPRVNANMDQLQAQMQVEIVQKLSVFDKTVKENIAQVCKSKQFLDTFGKSVLIGVQTSLQTAFIESMSSTLIPAYEKSSQNMFKQLHDAFSVGIKDFMVQFNTYLQHMPQPQAGSGNTEEINNKLSMLKQLVESSLHKHRTELTDAMLETQREVKSLEILLARQVQETIRAELRKHMEAQNVAMRSQAATPAPPYDLRDSIKQLLMAGQINKAFHQALLANDLGLVEFTLRHTDSNQAFAPEGCRLEQKVLLSLIQQISADMTNHNELKQRYLNEALLAINMADPITREHAPKVLTELYRNCQQFIKNSPKNSQFSNVRLLMKAIITYRDQLK

SEQ ID NO: 13234 - DNA, 2974 bp, DROSOPHILA
tttttgatatgatattcgtatctatgtattactaaaaaaaaaccattaaaatattctactacattggtaaatgtaggtcgttccaaatcgaacgacaatattcattgcaaataatgtgagtacatgctcaatcggatttagtaaaataaatcttcaagttattttcaaggtttgttagttagtaatttaatgaagtatctatgtattctgaatttcgcccttgctggtcttatctggatattttaatccgttcagccagatgcagttgctcagacttttagcggtgtgaaatgagtcatcggctgagttatccggactgttctccactggcggaagatcctttggtctacgaatctttcgtggcgtgaagaagtcgcgatctgtgattaaaggaaatcgctggctttcatttggagcaaccgcaggtaagctgatctgcggctggagtgtcagtgagtcctgtttcagggtcattcttccgaagttccggatgatggcaatcgcctccacgtccaccattgtggtgtcctcccagtcctccattgtggcgtgctctcccagcggcttggtgccagctactctctgaatcgtctccatcatttgcagactttgacgaatctctcggccctttccaccccgcgtgccatatccaagcagatcctcgcgggctgtcaaaagctcataggtatgaatgggaacggattctgagaattcctctttcttcctcagttcataggcgatctgtccatggaccagattaaagtgcggctccaactgcaccagatcgtgctcgaatcgtgatgtgggaacccaagccatgatgatttcagttgcttatagtattctcacagccttattttcatttcccggaaatgcttttctcaagtagactgcgcaaatattttcgaagattagaaattcaaaatcacacattcctatcgatagcgataaaaacgtttaaacgcttacaggtgaatcgcaacttatcgattgtcagtcggcaaatagaacaataaacagttttttaattaatccaatttggtttacttaagcaataaggatgatttgtatgcggctccgggtgttgcgtaatctcaatcgcagcgctttaaatggatttagaaaagattacatccgatcaaccggtgtgaatgtcaattattcagctgtcaactttccggccgccattagaacgctgaaaacttttagcaattctatcctaaccaaggaaccgaaaccaatctttgcatttatcgcatctcagcggcagtattcttgcgaaaaagtaggcaaaacaatggaggagcactgcgtagttccggatgtgatcgccaaggcaccggcgcagacagctgtggtggaatatcccggcgatattgtcgtgaagccgggtcaggtcctgacccccacccaggtgaaggatgagccgtgcgtgaaatgggaggcggacgccaataagctgtacaccctctgcatgaccgatccggatgcgcccagtcgcaaggatcccaagtttagggagtggcaccattggctggtgggcaacatacccggtggagatgtcgccaagggcgaggttctctccgcctacgtgggatccgggcctccaccagacaccggactccatcgttacgttttcctgatctacgagcagcggtgcaagctcacattcgacgagaagcgactgcccaataacagcggagatggacgcggtggcttcaaaatcgccgagttcgccaagaagtacgccctcggcaatcccattgccggtaacctctaccaggctgagtacgacgactatgtgcccatcctctacaagcagctgggcgcttagtttctacgccaaaaaccatgcttatataagccagtctgaattggattcaaatctattgtaacctagaaattaaagacacctatgaacactctgtgaaaccctctgttgctggcaataaaattgttaaagacatattaactaagccactgtatcttattacacattttcaatattttcatatcttatcttgttaatttgtctgaagtaataattcggttaccctttgctgaggcaaaacagtttctgtgctggttatgtatttattattcattccaattacaatctacttctttatcaataggattcttctagcgtcatttgtatacatacagatttcatgaacttgagtttatatctcgccaaaatacatgctttgaagatacaagacataattgctatcggaccttccaaataggaagaacgtttctgatcagtattatagttatttcccagggcgcaagagacgcccatctgggtaagttatttatttgtaaaagcattgcgacataattacaatctacttcttaaagtcaagaggatggttcttcatgtgtgcaataataaaggtctctaatacaactagatgcagactcatacaatccataaaataatgctgaagaagaacccacgctctatttcctcctttgatgggtccagtgcatattcggctgttgagaaggaggggaggtgtctagtttccaaattactttactctatagagggaaagacagtgcgatggtctttccattcggtttcgctgattgcctataaaaagcaaggtcggagttagttagtatgaaataggctgcatgactatgttaccaacttaccactagctcgtcgaaagcctgtttggccagccagtggaagcatggactcttccattcgcgcgcaatcgcctgctgatccttgacgtcgtcctcggcggtggacttggaattggtaatggccttgtacttggcccacaggaagaccatgctgcgcaacttgtaaacccacaggtcattgggtatgccgcgaataatgtcctgtatttccaccatgttcaactccgtaaggttatccaggaaggtgcggttcatcaacgtaaagatcgtcttcattgtgtcgtacggcacgtcggcattcttctcgagacca

SEQ ID NO: 13235 - DNA, 974 bp, DROSOPHILA
gcaaatagaacaataaacagttttttaattaatccaatttggtttacttaagcaataaggatgatttgtatgcggctccgggtgttgcgtaatctcaatcgcagcgctttaaatggatttagaaaagattacatccgatcaaccggtgtgaatgtcaattattcagctgtcaactttccggccgccattagaacgctgaaaacttttagcaattctatcctaaccaaggaaccgaaaccaatctttgcatttatcgcatctcagcggcagtattcttgcgaaaaagtaggcaaaacaatggaggagcactgcgtagttccggatgtgatcgccaaggcaccggcgcagacagctgtggtggaatatcccggcgatattgtcgtgaagccgggtcaggtcctgacccccacccaggtgaaggatgagccgtgcgtgaaatgggaggcggacgccaataagctgtacaccctctgcatgaccgatccggatgcgcccagtcgcaaggatcccaagtttagggagtggcaccattggctggtgggcaacatacccggtggagatgtcgccaagggcgaggttctctccgcctacgtgggatccgggcctccaccagacaccggactccatcgttacgttttcctgatctacgagcagcggtgcaagctcacattcgacgagaagcgactgcccaataacagcggagatggacgcggtggcttcaaaatcgccgagttcgccaagaagtacgccctcggcaatcccattgccggtaacctctaccaggctgagtacgacgactatgtgcccatcctctacaagcagctgggcgcttagtttctacgccaaaaaccatgcttatataagccagtctgaattggattcaaatctattgtaacctagaaattaaagacacctatgaacactctgtgaaaccctctgttgctggcaataaaattgttaaagacatattaact

SEQ ID NO: 13236 - protein, 178 aa, DROSOPHILA
MEEHCVVPDVIAKAPAQTAVVEYPGDIVVKPGQVLTPTQVKDEPCVKWEADANKLYTLCMTDPDAPSRKDPKFREWHHWLVGNIPGGDVAKGEVLSAYVGSGPPPDTGLHRYVFLIYEQRCKLTFDEKRLPNNSGDGRGGFKIAEFAKKYALGNPIAGNLYQAEYDDYVPILYKQLGA

SEQ ID NO: 13237 - DNA, 4522 bp, DROSOPHILA
atgaagttttcggtccattgaaaggaagaggaggagatatcggtggaataaccgaggaacagttgatcagtaacctaattagcattcataatgcagaaaactggttgggcttggaaggagatcaaatcgtatcaggggaaataaaagacgtagcagcaagtacttcagtagtagaggctccctcagtagttcaggctcctattaatagtgaaactgaaaagcctgtgatttcaaaaaaccttgaaccaagtaacgatgtaagtaacttaaaatagttgtacaagtctggagaacacaatgcttataggctactgcacagattgccacccaaacgtgctatgaggaaccagacaggtcctttgattccaagaagacaacttcggatccgcaatgttctgaatgcaagataaactacagagaccccggcacaaaggatctcataatgtacttgcatgcatggaaatacaaggtcagtttcaaactatacatttttaaagatttaatttcaaattaaatcttattttcagggcgttggttgggagtacgaaaccgaattgccggaatgggcgtgtaattcgaatattgattacgataaagtataaaggaaaaattgattgcaaacacgacgctttagtaaaaagaaatatttttacagagtttaacaaattgtgtttccattttatcttcatttgtagcattgttttattactttgccgaattactttatcattttgcggtgcaaggggatgtcctcgtggagtattatttatcgtcgtgcagtggatgtcctaggatgccaactatcctggataatactttgcaagaacttcacctgaacactctgctcacagtggtttcagttaactgcagttctgcgaatttttaaaatttaaaaccacaatcagttggcgggaagggaatgcccctaattctatcgattagttggttcttatcgataacggacggggcaggatatgtgtcatctctgtcggacatctggcgcaaatgaaatacaaataccgaattaaagcagcaaaacaatgatacacgatttgttattggcttgccggagccacaatccggagcagctgggtataaaggcattcaatgtaagtaaaatcgttggaaataaataatttcgaaagccttacaagcgaactttctaggaaaccacagtcattgaccagttcatacatccttgcgagcgggagatatttatggacattataaaaatcattaaggtttaccaagaagttgagcagtttacccattcatcgggaagaaagtccgacacacatggcgaacttccaggtataaatggaaggttgcatagtgtttttaagatttcaaatgtgtatttctatcgcagatagtttgcatggttactacttgctcaatttggccaagggcattgaaatggctctggaggagtactacgctgagatcggacgtctggagaagtattgtttgggtaacgagcgcaattcgctctcatatgtctacaatgccctgtacgccaagttcccccttctggtcttcatgcgtaatctcatcacagagatccatgtgctgaatctgcgaggatgcgtcttgctccacaatctacatcagcagtgcgagcacggcgatattcaactggaaaaagcaatcaagatgcaagtgatagccaacacacaacgccttgtttccataatccaaatgctcttcattatgcagaattatgaagcctgttaagaacgcatttttctccagcctggctcactggctgttgtttggagtgattgacgatgtccactcggaattctttattaagtttaccccaacggatgcagttgatggtagctcattcagcaaatcagccacttgctcacttctggtaacaacttaacaagcgattatccttaccctatattataaatagcatatctatatccagagcgcagagaaaaaccccgaggattacatatggcaatatgaggtgaatatgtctcagctgccaggatttttctccatcgttttagccgaaaaagttctgttcgtgggacaaacagtgctggtcttcaaaatggggcgcaacgtaaaagttaaaaacaaaaccgacccactggcggcaaaactggctgaattggattcagatgatatctatcagctgtggagcggcagggagtccgagttcttcaaaatggtcgttgatttgagcaacgaggacaccatcaatgtgtttcgcctcgagaaggttattatcgatatcaagaattacgttagcgcccggctgtcggagatcgctgtgaacgaagtggatctggagcggcaaatgggactgattaaggacttctttttgctaggcagaggagagttctacttggagttctgctcccaaatggtcggtaccatggaaacttatcgcgaagaacgttttaaaaacgtcactagatcatttgaggtactaattacgcataatgttgttaaatatgtattttagatttacatttttaactcatactcagctggcagctactgtcacgggaatcacagatgacttggacaagttttcactgatctgccagagaagcacgtctgaaccagacgatacctccgactttaattttctgcaaggcctcagtctaaaatatgagtatgagtggccattgaatcttttgttctccccaacaacgatcgagcggtacaacaatatattccgatttttactgatcattcgaacatatcaatacgaaatacaaagggtctgggccaagcagacttggagggcgaagagtgcaaaggatgtgcctccaaataacaaaatcataactcttcgcaactatctaatgttctttctgaacaacatgcagtattacattcaagttgatgtgctggaaagtgagtttttgagcgcaatacgaaattgatcgaaaataactcacattttgttacaggtcaatttggaattttgatgaatgtgatcaagagcaggagtgatttcgaagttatacaaagggctcacactgtatttctggcaaatgttctttcgcattgcttcctgcttaacgaatcagagacccaattgaatgtcaccgggagccaaaaccgaaatcccatttatggaacccttcttaaactctttggcatatgtgagaagtttgcgcatatgacccaaacgaaagatccgtctgatgacttagaggatgaagtcgaccaacttaatgaaaggtatgtctttacattttggataagtgggttattattgtataataataaaacgttgttttcttatagttttggtgttcaaattgcgagccttatccaactattagtcgatgtaaaatcagcttcttgtttgggtccgctttcgcagctgcttttgcgtttggatttcaattgttggttcagtgccagtcataatacgtccgcatgaatacgatgtttttgcctaaagttgtagccgcttaatgtcttctatacgaaagtcatttctgaaaaacaaacaaacgattaataaactgaagaaaatgttatattttaaataaactttcttaccttaacgttaaaaatgtgcgaacttcgttaggtgtgagatgccaagatgacatctctttgttattctccggattccagtactccgatagctccgtaatcttgtccagattgaggagcgtagctatttgggatatacgtgtcatcttatctcgaaccgaccacgatgtagctcctgttagataacttcccaaggcacgaacttcctgatcaagcaccaaaccgccaagcttttgaatagaacataatccattattattctaattccacaaggtaaatttgacctgctgagatacatactctattaaagctgattttcttaatagcccgttccaattgaatagtcacttcggtcgccaaaatgctaacgagtgcatcatagttgcgcggactcaacgagttcttaaaagagttaagtagtccatccaattgcactatgaagaactggacaaatgtctccccagcttcgtaagcagcaagttcctcctgtaaaaacagattgcattgcgttctcataaagatactttagtccatacagatacttacctcattcaaattgtgactgtagttcaggaactgattgatccagggattaaggcgtggctttatgacactggatcgcagctgctgcattccaaaatcaacggtggctttcaacgcgtcccgcacagctttaagttccgtgaggcaactgtccagcatttgacgctccacctgggtcgtttgtggaaatgtgccagcaatttcctgttccatcgtctgacacaaggtctcaatatactctgtcgatatgtcggcattgttcagctgaaccaagaaattggctcgacctcgatcggcatcactggaatgtagttttccctgctgcagcgatgtttgtatagcattatatgcctgggccaagtcgatgtagcccgagggatagccgcttttcaagggcgccttcagtgcgttcacaaaatcaccatccaggcaggcagccacgttg

SEQ ID NO: 13238 - DNA, 2094 bp, DROSOPHILA
cgcaaatgaaatacaaataccgaattaaagcagcaaaacaatgatacacgatttgttattggcttgccggagccacaatccggagcagctgggtataaaggcattcaatgaaaccacagtcattgaccagttcatacatccttgcgagcgggagatatttatggacattataaaaatcattaaggtttaccaagaagttgagcagtttacccattcatcgggaagaaagtccgacacacatggcgaacttccagatagtttgcatggttactacttgctcaatttggccaagggcattgaaatggctctggaggagtactacgctgagatcggacgtctggagaagtattgtttgggtaacgagcgcaattcgctctcatatgtctacaatgccctgtacgccaagttcccccttctggtcttcatgcgtaatctcatcacagagatccatgtgctgaatctgcgaggatgcgtcttgctccacaatctacatcagcagtgcgagcacggcgatattcaactggaaaaagcaatcaagatgcaacctgttaagaacgcatttttctccagcctggctcactggctgttgtttggagtgattgacgatgtccactcggaattctttattaagtttaccccaacggatgcagttgatggtagctcattcagcaaatcagccacttgctcacttctgagcgcagagaaaaaccccgaggattacatatggcaatatgaggtgaatatgtctcagctgccaggatttttctccatcgttttagccgaaaaagttctgttcgtgggacaaacagtgctggtcttcaaaatggggcgcaacgtaaaagttaaaaacaaaaccgacccactggcggcaaaactggctgaattggattcagatgatatctatcagctgtggagcggcagggagtccgagttcttcaaaatggtcgttgatttgagcaacgaggacaccatcaatgtgtttcgcctcgagaaggttattatcgatatcaagaattacgttagcgcccggctgtcggagatcgctgtgaacgaagtggatctggagcggcaaatgggactgattaaggacttctttttgctaggcagaggagagttctacttggagttctgctcccaaatggtcggtaccatggaaacttatcgcgaagaacgttttaaaaacgtcactagatcatttgagctggcagctactgtcacgggaatcacagatgacttggacaagttttcactgatctgccagagaagcacgtctgaaccagacgatacctccgactttaattttctgcaaggcctcagtctaaaatatgagtatgagtggccattgaatcttttgttctccccaacaacgatcgagcggtacaacaatatattccgatttttactgatcattcgaacatatcaatacgaaatacaaagggtctgggccaagcagacttggagggcgaagagtgcaaaggatgtgcctccaaataacaaaatcataactcttcgcaactatctaatgttctttctgaacaacatgcagtattacattcaagttgatgtgctggaaagtcaatttggaattttgatgaatgtgatcaagagcaggagtgatttcgaagttatacaaagggctcacactgtatttctggcaaatgttctttcgcattgcttcctgcttaacgaatcagagacccaattgaatgtcaccgggagccaaaaccgaaatcccatttatggaacccttcttaaactctttggcatatgtgagaagtttgcgcatatgacccaaacgaaagatccgtctgatgacttagaggatgaagtcgaccaacttaatgaaagttttggtgttcaaattgcgagccttatccaactattagtcgatgtaaaatcagcttcttgtttgggtccgctttcgcagctgcttttgcgtttggatttcaattgttggttcagtgccagtcataatacgtccgcatgaatacgatgtttttgcctaaagttgtagccgcttaatgtcttctatacgaaagtcatttctgaaaaacaaacaaacgattaataaactgaagaaaatgttatatttta

SEQ ID NO: 13239 - protein, 648 aa, DROSOPHILA
MIHDLLLACRSHNPEQLGIKAFNETTVIDQFIHPCEREIFMDIIKIIKVYQEVEQFTHSSGRKSDTHGELPDSLHGYYLLNLAKGIEMALEEYYAEIGRLEKYCLGNERNSLSYVYNALYAKFPLLVFMRNLITEIHVLNLRGCVLLHNLHQQCEHGDIQLEKAIKMQPVKNAFFSSLAHWLLFGVIDDVHSEFFIKFTPTDAVDGSSFSKSATCSLLSAEKNPEDYIWQYEVNMSQLPGFFSIVLAEKVLFVGQTVLVFKMGRNVKVKNKTDPLAAKLAELDSDDIYQLWSGRESEFFKMVVDLSNEDTINVFRLEKVIIDIKNYVSARLSEIAVNEVDLERQMGLIKDFFLLGRGEFYLEFCSQMVGTMETYREERFKNVTRSFELAATVTGITDDLDKFSLICQRSTSEPDDTSDFNFLQGLSLKYEYEWPLNLLFSPTTIERYNNIFRFLLIIRTYQYEIQRVWAKQTWRAKSAKDVPPNNKIITLRNYLMFFLNNMQYYIQVDVLESQFGILMNVIKSRSDFEVIQRAHTVFLANVLSHCFLLNESETQLNVTGSQNRNPIYGTLLKLFGICEKFAHMTQTKDPSDDLEDEVDQLNESFGVQIASLIQLLVDVKSASCLGPLSQLLLRLDFNCWFSASHNTSA

SEQ ID NO: 13240 - DNA, 4414 bp, DROSOPHILA
gtaaccaagtacacctgttggaagttctccagcgatccattagcgggatgtggatggaatatgtccagcagaccgattacgttctcatgatccatatgctttaaaagtcgaagctcccggtacgtcctctttgcatggacagctgattgaaaaggcctggcaagctttttaatggccacatgcatattggtgccacgaacaactgcctttgacacctgtccgtaagctcccgatcccacgggctgcagatcctggtatatatccgggatctcccattccgttcgatttatatccaacttgtaaaacttttttgtaatggacactgacatggtattgcttgaggaagggcgtcgtcaccttagttaatggtgcctataagcgagatatgtattgattcttaaaatgccatgcgaacgataattccatgctgattacgtttatcttgaggcagctctgcgtcagtagtacttacctctgttccacgcccaagaatatcaacaactaagtactggtccctggcatttttcctatatttgcgctattactccattccgatgcgtgttaggcattcatgaatcagatcgtcagtggatcagatcgatcagaagcgacacacgaatgcgctacatttgatcagagtaaagttgttaaaatcatttttggcacgatattaaaaaaaatccttaatatataagtaaataaataaaataatatattaaccatatcattgcattgtaacaagtctctttttccactcttatcgatgtccttaaatgtgaataaagggattaaaattaaataattttgttagtttttaataatattctaaaaattaggtaatataatatatttttaaagcccatataccgtaaaatttggagtgtagagcgtttaaatgaaaataaacacacggcgttgccagaccgtcagctgacagttcaataagaatttatcgaataagtatttgaatcagctgtctcttgtttttcctgcaaatttgagcagcaccatcccctgacccattttttgttgcacttttggtgtactttgaatgaaaaatagtcagagacactactcgcgcctgcgcagtttcaacgccggggttatcaaataagctaatctaatcgttccgtaaacgcagcctgacattccgccctaccattctccgacgaacagttagtttcgcacgcaagccgctcccgctcgcatcgtaacctagaaaactttagcgtatgtacataagtaaattgacgagtttatctgaatgatactgaatatattagcggtataaaagataaacattacatggtttaacgagtgttcgcttgaaagcctaaatgttagaccgcaggggagctggaagaagccacttcaaccgctgtgaactgcgacctttggaacctggactggcaaacatgcagattttctgtagtccactatctcagatagcgggaacattgttaacatcgatggcatgttcagcacaagtaaaagatctgcgaaccgaatgcgattagatagtccggggggttcaaagtatggtttgaagggttgctataacttcaacccctgaaccgtttttcttttaatattttcgaggaaaacttcacactccccaaaggcgtgtataatttttggtagataacccacagttcgttatcttccattatagctcatcataaaatgcaaaactatcatgtttctttctctttgcagacacaaaatgacttcaaagctactgcccggaaacattgtgtacggaggtcctgtgactgaacgacaggcccaggatagcagatccttgggtcagtacatcctcgacaagtacaagagctttggcgaccggacggtgctggtggatgccgtcaatggagtggagtactctgccagtttcatgcacaagtccattgtacggctggcatacatccttcaaaaactgggagtcaaacagaatgacgtcgttggtttgtctagcgaaaacagcgtcaacttcgccctggccatgttcgctggtctagcagttggggctacggttgctccccttaacgtaacatattccgatcgtgaggtggaccacgccattaacttgtccaagccaaagatcatattcgcctctaagattaccattgatcgtgttgccaaagtggccagcaagaataagttcgtcaagggcatcattgcgctcagtggaacttccaagaaatttaagaacatctatgatcttaaggagctgatggaggacgagaagttcaagacacagcctgacttcacgagccctgcggccaataaggacgaggacgtgtctcttattgtgtgctcttctggaaccaccggacttcctaaaggagtgcagctgacccaaatgaacctgctggccactctcgactcacaaatgtaagtttaataatatgctataaaggcgtttcttttaaatgatttttctttaatagccaacccactgtcattccaatggaggaggtcactctactcactgtcattccctggttccacgccttcggctgtctgacgcttatcaccaccgcctgcgttggcgcacgattggtatacctgcccaagttcgaggaaaagctcttcctttctgccattgaaaagtatcgcgtgatgatggccttcatggtgccaccactgatggtctttttggctaaacaccccatcgtggataagtacgatttgtcctctttgatggtcctgctgtgtggagcagctccactcagtcgcgaaactgaggatcagatcaaggagcgtattggagtgccattcatccgacagggatacggcctcagcgaatcaacgctgagtgttctggtgcagaacgatgagttctgcaagccaggcagtgtgggcgttcttaaggtgggaatctatgccaaggtgatcgatcccgacaccggcaagctattgggggccaacgagcgcggcgagctttgttttaaaggcgacggcatcatgaagggctacatcggagatacgaagtccacgcagaccgccatcaaggacggttggttgcatactggcgatattggctactatgatgatgattttgagttcttcatcgtggaccgcatcaaggagctgatcaaatacaagggataccaggtgccgccggcagagattgaggctctgctgctcaccaacgacaagattaaggatgcggcggtcattggaaagccagacgaggaggctggcgagctgccgctggcatttgtggtcaaacaggctaatgttcaactgaccgagaacgaagtcattcagtttgtcaacgacaacgcctcgcccgccaagcgtctaaggggtggcgtgatctttgttgacgaaattccaaagaaccccagtggcaagattctgcgtcgcattctgcgggaaatgcttaagaagcaaaaatccaagttgtaagggatttctccccttaagggtgtgtgtacaaacaatttactatgtgtatgttttattattgctaaactttgttttataaactaccaactggttgggtttcgatttactcatatttggcttttctttcgaagtattcgcttaaaacttaaatacaaataaaaactgatggatttccatgtcgcagatagcatgtgacatcgctgaagctctagaactcaactccagctttaattacgtagatgcctgaactatcaataacaagttatatataaacaactacatacattcgttctcaacttgtaacaaacatgtattttttccatattgttgtcgcttttatatagactcattattaatttcgtatggtgtatacatatatttatatatttatttgaaatatttaactactcatctgctctgctttgtaaatagttgtttaacattttttgttttgcttgggaaaagtttctatcttgctttgtcgcagcaaattgcatatattgggttcatttgtgtttccagtatataaagaggtttatatgtctgtctctagcattagtttactaattattgtgtatgaaaccttaaatgtaagagaaatgccttggtttctataacggaaatatcatagtttgtgtaaaatcctaaatactgctcatccagcacaggcgcacccccgtcaaaatcctgcttccaatcttttcgagctgcgctgctaccagtgcttatttgcagtacatacttattgttgcaatgctaatcgacttggtgcacgatttacacttaaacctagttcgacaaattagatgaataaattcagttgttcacttcgttagtttcttttcgtttaactttacatagttaaataaaaacggtgcattttaaaattagctcgctcttttttcttttaccattggtacaattctagttttctgcttttggcacaatcctgacaacaaattggttactctgattgtcacttgtgaacgaaactaaattg

SEQ ID NO: 13241 - DNA, 1872 bp, DROSOPHILA
agcagcaccatcccctgacccattttttgttgcacttttggtgtactttgaatgaaaaatagtcagagacactactcgcgcctgcgcagtttcaacgccggggttatcaaataagctaatctaatcgttccgtaaacgcagcctgacattccgccctaccattctccgacgaacagttagtttcgcacgcaagccgctcccgctcgcatcgtaacctagaaaactttagcacacaaaatgacttcaaagctactgcccggaaacattgtgtacggaggtcctgtgactgaacgacaggcccaggatagcagatccttgggtcagtacatcctcgacaagtacaagagctttggcgaccggacggtgctggtggatgccgtcaatggagtggagtactctgccagtttcatgcacaagtccattgtacggctggcatacatccttcaaaaactgggagtcaaacagaatgacgtcgttggtttgtctagcgaaaacagcgtcaacttcgccctggccatgttcgctggtctagcagttggggctacggttgctccccttaacgtaacatattccgatcgtgaggtggaccacgccattaacttgtccaagccaaagatcatattcgcctctaagattaccattgatcgtgttgccaaagtggccagcaagaataagttcgtcaagggcatcattgcgctcagtggaacttccaagaaatttaagaacatctatgatcttaaggagctgatggaggacgagaagttcaagacacagcctgacttcacgagccctgcggccaataaggacgaggacgtgtctcttattgtgtgctcttctggaaccaccggacttcctaaaggagtgcagctgacccaaatgaacctgctggccactctcgactcacaaatccaacccactgtcattccaatggaggaggtcactctactcactgtcattccctggttccacgccttcggctgtctgacgcttatcaccaccgcctgcgttggcgcacgattggtatacctgcccaagttcgaggaaaagctcttcctttctgccattgaaaagtatcgcgtgatgatggccttcatggtgccaccactgatggtctttttggctaaacaccccatcgtggataagtacgatttgtcctctttgatggtcctgctgtgtggagcagctccactcagtcgcgaaactgaggatcagatcaaggagcgtattggagtgccattcatccgacagggatacggcctcagcgaatcaacgctgagtgttctggtgcagaacgatgagttctgcaagccaggcagtgtgggcgttcttaaggtgggaatctatgccaaggtgatcgatcccgacaccggcaagctattgggggccaacgagcgcggcgagctttgttttaaaggcgacggcatcatgaagggctacatcggagatacgaagtccacgcagaccgccatcaaggacggttggttgcatactggcgatattggctactatgatgatgattttgagttcttcatcgtggaccgcatcaaggagctgatcaaatacaagggataccaggtgccgccggcagagattgaggctctgctgctcaccaacgacaagattaaggatgcggcggtcattggaaagccagacgaggaggctggcgagctgccgctggcatttgtggtcaaacaggctaatgttcaactgaccgagaacgaagtcattcagtttgtcaacgacaacgcctcgcccgccaagcgtctaaggggtggcgtgatctttgttgacgaaattccaaagaaccccagtggcaagattctgcgtcgcattctgcgggaaatgcttaagaagcaaaaatccaagttgtaa

SEQ ID NO: 13242 - protein, 544 aa, DROSOPHILA
MTSKLLPGNIVYGGPVTERQAQDSRSLGQYILDKYKSFGDRTVLVDAVNGVEYSASFMHKSIVRLAYILQKLGVKQNDVVGLSSENSVNFALAMFAGLAVGATVAPLNVTYSDREVDHAINLSKPKIIFASKITIDRVAKVASKNKFVKGIIALSGTSKKFKNIYDLKELMEDEKFKTQPDFTSPAANKDEDVSLIVCSSGTTGLPKGVQLTQMNLLATLDSQIQPTVIPMEEVTLLTVIPWFHAFGCLTLITTACVGARLVYLPKFEEKLFLSAIEKYRVMMAFMVPPLMVFLAKHPIVDKYDLSSLMVLLCGAAPLSRETEDQIKERIGVPFIRQGYGLSESTLSVLVQNDEFCKPGSVGVLKVGIYAKVIDPDTGKLLGANERGELCFKGDGIMKGYIGDTKSTQTAIKDGWLHTGDIGYYDDDFEFFIVDRIKELIKYKGYQVPPAEIEALLLTNDKIKDAAVIGKPDEEAGELPLAFVVKQANVQLTENEVIQFVNDNASPAKRLRGGVIFVDEIPKNPSGKILRRILREMLKKQKSKL

SEQ ID NO: 13243 - DNA, 4453 bp, DROSOPHILA
taggaagttaattgagtttcttaagggagaactaaccaacccgctgtagaaatgctgcagggccttgcaggtgtccaaacaggtgtctgtatctccactgcctagcgaatttatgcagcggcgcatcagttcaccagtaagatccgaaagtccaagtatatattccgtggggtctacgaaaaactggaacttctttgggctctcaacctgagctatagcctgaacatcttcgccttcagttggttcttcctttggctggctgctctcctcgacgtactgcatcaccgcctgaatggcctgccaatctgaaacgctcttggtttcgttctcgccctcagcatcctcgtggcacaggtactccatgtaggtgtaggcctcgataaactcctgcaatcctggagagtaggagctgcggaactggtagacatcctggtcgcgcagttccagggccacagccctaaagttaaccgcgatcagcttgttcagtcgctgacgtgcctcctccaggaccttctccttattctgcttacgcgagtcaatggagtgcagcaggaagatgatacgcttggactcgatggtaatgtcacggctcagcttgacaattcgctcgtggcgatcgtgtttcatgatcaattcattagaataaattcgaaattgttggacaatgggactgtcttcatccagctgggcagccggtatttggcgcttcctgggagcagtgttcctgtgaccagcacctccgtttttcggcattattgatatcttacgcgattctatttgaacggcttaaatatgtttttttttttgtttttatttttttagattttcaatcgcgtcggcaaaaaatttattgtaaacaaatgtccgataattgaggtattaaccatatcgatagttgccgacaaatatcgccacctgatatcggtgctaagacccgagaaactttcgtggcaagaatttgttaaaaatatacaaataattaaattccagccctaaggcaatgcatgatccggtcaaaaagtcggctcacttgaccgctggctccaccagcacagcggagaagctgtgcttcgacaagaatgagtttatgaaggtcagtaatccatgtcagatatgtgttcccttgctaaaattacttcgaacaggcaaacttctcggtggatgagtttctgcacaagaaccgcaatgcgcccagtctggagcagctacgcgacaacctgggcctttacctcaaaggtctgcgggcggccatgatagatttgatcaacgaggattacgcagacttcgtaaacttgagcgcaaacctggtgggactggaccagaatataaagaccattcaacagccattggagcaattccgcagcgacatcgagagcattcacggcttgatagatgagaacgtgaccgagctgcgggcccagttggaggaaaagcgtcagcttcgcgagttcaaacgcggtctgcagagcctcaagaaagtgtatgagaccattaacaagcttcaggatctaatcgaccgaaagctcagcggggaacaaccaattaaggccgttgacctggagcgcgctgctctggacctgattcaattgaagttccatgagaaacactgtttcaagcacttaagtcccgaccatcaagggaagatccaacagctagaagagcaattgcatcagcatctgcgacgcttcttcaatgacgcccttagccaggcacgcaactcggcaccggaatccttagagcgctgcttgcggatctacataactctaaatgcctgtgatcaggcagagtgcgccttccgcgaggatgtggtggcaccgtatatgacgggcgtcattggcgaacaacagttgcaaaactcgccgcagggattagctggcatctacagcaagatcctcaactttatatcgctgcatatgaccgatttgctgcgccttacgctttactctgataagtttccgggctttaacttcgtggttaatagttactggtctgatgtggagacgcgtctcgaactgcacatgaattccatatttgcgcctggcaattcggaggtgttctatgtaaaatacaagtgcactcgcgatttcctgggcaaaatagaggagctattgacctgctccggagagcaggccgtaacgttctatcgccagcacaagcaaacaaaaagttttgaggctcgctggaatcttccggtttacttccaaatatgctttcaagtatgtaaataagtttatatagtagaattttcgattaatgtgaaatgcttctaggaaattgctggtaaatttgaagcccagttggagccggtgctccaggaggatagtttaaaagataatctcaccgatagtgactacaaaatatccgcatttaatgccgcgaaggaggctatgacacggtgctgggccgagggagtttacctacccgaagtatttccgaaattttacaaacttaatgtgcaggtggtactgcgtctttcgcgctggatcacggatgcaattactcaatcgaaaggcagcaacttttctaagccctacactcgaaaccagttgcttattgccctccatgctgacattcgcaaacttgacgcgcatctgccagagcttcagcaattgattattaaatcagtgcccgttgaacagtgtacgaagatctttagcgacgttttggccaaatcgatgtcctgcctagccgacacgctaggtgcgcatttgaccaacatacaaaagaccttagtggagttgctgatcggagaatgcgagacggaaaatgtgcgacaggtaaacgacttgccgcggctgtatcgcaagacgaatcgagaggttcccacacgatgttcgagctatgtggagcaaatgctgcgaccgctgaaggcatttgcccagcagaacgagtcccagcttggcaccctggtggtggaacaaatcttggcggaagttgctagtcacataaccaaggcgtgagtataattttacgatgggttcgaatttctctgaacttttattcgcactataggtacttcaatgtggtgagcgatgtgctcacatccgtacagaaaaccgaggagtcattgcgacgcttgcgaaatgtaaaaagtggcggagccgcgactgtttcgactggaagctcggctgtaatgtctgacgatgataagattcgcgtccaactgcgagtggatgtcacatcctggaggcaggagctgtgcaaactaaactttcaggccacccagatcgataagctagtcgagctgacaaacatggtggaggacagtatcaagctaaaggataacagcgcttagtcaccaacaacgatcagttattaaacgtatacacttctttttattcttggtaaacgaattctaacgattctttaggcacaattattgattgtattaggactacgaattgtacataatatatataggcatatatgtatatcatatatttaaatgcattgaatttcacaatcgttattggtaaataccggcgaataggattcttcctcgaagttattcgctgttggaatgaaacagagaagagattgcggaaaattagccgacagaactcatcaaactgtggccacagaacgctaaagatatataaagaatattgcaaaacggcaggcaaggaaccatgcataacataactcaagcttgcaatgatatatacaaagatattaagttgtgtgcatataagaatgagcggctcaacggaagacaaacaggattggatgccaaggctcaaacaaaaacaaaactaagcttgctacattacagcttgagttcctcggtgtccggtagcttgcggaaaaaccactgcacatgttcctcagtgacatcggccagcttggttggctgccactggggcttctgatccttgtcgatgagtagggcgcgcactccctccttgaaatcacttcgctccagatgacgcacggccagacgatattccataataagacactgagccagcgacagctgtgatccgagctccaactgacggaacgtaaccttcatcgaggtgggagacatcttcgagagcgtctaaaacaaagaaaaaagcaatgtgtctgatttcaataataaaattcaactctaatagaaaaatgcaacaaggtgtggggtgtgagtttgtgagctagtgtaacttattcagttaagaaaagtcgtgcagcaactaaagcgttgctaattggctggaaacggatcaaatatttaggcgctaaaagcgcgcgtcaagcgatgattggcccagccaattaacatccgattgtgttcttatcacttagtaaactgtgccccactcacctcaagcgtcttcttggcccattcactgccatcgttctgcagattctctagaatcccctccaccgagtccgctgaaaagttcttgttgatctgctccaggacaggctgcagcgagaagggcttttctggcggggaatggtacttctgcag

SEQ ID NO: 13244 - DNA, 2291 bp, DROSOPHILA
atgcatgatccggtcaaaaagtcggctcacttgaccgctggctccaccagcacagcggagaagctgtgcttcgacaagaatgagtttatgaaggcaaacttctcggtggatgagtttctgcacaagaaccgcaatgcgcccagtctggagcagctacgcgacaacctgggcctttacctcaaaggtctgcgggcggccatgatagatttgatcaacgaggattacgcagacttcgtaaacttgagcgcaaacctggtgggactggaccagaatataaagaccattcaacagccattggagcaattccgcagcgacatcgagagcattcacggcttgatagatgagaacgtgaccgagctgcgggcccagttggaggaaaagcgtcagcttcgcgagttcaaacgcggtctgcagagcctcaagaaagtgtatgagaccattaacaagcttcaggatctaatcgaccgaaagctcagcggggaacaaccaattaaggccgttgacctggagcgcgctgctctggacctgattcaattgaagttccatgagaaacactgtttcaagcacttaagtcccgaccatcaagggaagatccaacagctagaagagcaattgcatcagcatctgcgacgcttcttcaatgacgcccttagccaggcacgcaactcggcaccggaatccttagagcgctgcttgcggatctacataactctaaatgcctgtgatcaggcagagtgcgccttccgcgaggatgtggtggcaccgtatatgacgggcgtcattggcgaacaacagttgcaaaactcgccgcagggattagctggcatctacagcaagatcctcaactttatatcgctgcatatgaccgatttgctgcgccttacgctttactctgataagtttccgggctttaacttcgtggttaatagttactggtctgatgtggagacgcgtctcgaactgcacatgaattccatatttgcgcctggcaattcggaggtgttctatgtaaaatacaagtgcactcgcgatttcctgggcaaaatagaggagctattgacctgctccggagagcaggccgtaacgttctatcgccagcacaagcaaacaaaaagttttgaggctcgctggaatcttccggtttacttccaaatatgctttcaagaaattgctggtaaatttgaagcccagttggagccggtgctccaggaggatagtttaaaagataatctcaccgatagtgactacaaaatatccgcatttaatgccgcgaaggaggctatgacacggtgctgggccgagggagtttacctacccgaagtatttccgaaattttacaaacttaatgtgcaggtggtactgcgtctttcgcgctggatcacggatgcaattactcaatcgaaaggcagcaacttttctaagccctacactcgaaaccagttgcttattgccctccatgctgacattcgcaaacttgacgcgcatctgccagagcttcagcaattgattattaaatcagtgcccgttgaacagtgtacgaagatctttagcgacgttttggccaaatcgatgtcctgcctagccgacacgctaggtgcgcatttgaccaacatacaaaagaccttagtggagttgctgatcggagaatgcgagacggaaaatgtgcgacaggtaaacgacttgccgcggctgtatcgcaagacgaatcgagaggttcccacacgatgttcgagctatgtggagcaaatgctgcgaccgctgaaggcatttgcccagcagaacgagtcccagcttggcaccctggtggtggaacaaatcttggcggaagttgctagtcacataaccaaggcgtacttcaatgtggtgagcgatgtgctcacatccgtacagaaaaccgaggagtcattgcgacgcttgcgaaatgtaaaaagtggcggagccgcgactgtttcgactggaagctcggctgtaatgtctgacgatgataagattcgcgtccaactgcgagtggatgtcacatcctggaggcaggagctgtgcaaactaaactttcaggccacccagatcgataagctagtcgagctgacaaacatggtggaggacagtatcaagctaaaggataacagcgcttagtcaccaacaacgatcagttattaaacgtatacacttctttttattcttggtaaacgaattctaacgattctttaggcacaattattgattgtattaggactacgaattgtacataatatatataggcatatatgtatatcatatatttaaatgcattg

SEQ ID NO: 13245 - protein, 710 aa, DROSOPHILA
MHDPVKKSAHLTAGSTSTAEKLCFDKNEFMKANFSVDEFLHKNRNAPSLEQLRDNLGLYLKGLRAAMIDLINEDYADFVNLSANLVGLDQNIKTIQQPLEQFRSDIESIHGLIDENVTELRAQLEEKRQLREFKRGLQSLKKVYETINKLQDLIDRKLSGEQPIKAVDLERAALDLIQLKFHEKHCFKHLSPDHQGKIQQLEEQLHQHLRRFFNDALSQARNSAPESLERCLRIYITLNACDQAECAFREDVVAPYMTGVIGEQQLQNSPQGLAGIYSKILNFISLHMTDLLRLTLYSDKFPGFNFVVNSYWSDVETRLELHMNSIFAPGNSEVFYVKYKCTRDFLGKIEELLTCSGEQAVTFYRQHKQTKSFEARWNLPVYFQICFQEIAGKFEAQLEPVLQEDSLKDNLTDSDYKISAFNAAKEAMTRCWAEGVYLPEVFPKFYKLNVQVVLRLSRWITDAITQSKGSNFSKPYTRNQLLIALHADIRKLDAHLPELQQLIIKSVPVEQCTKIFSDVLAKSMSCLADTLGAHLTNIQKTLVELLIGECETENVRQVNDLPRLYRKTNREVPTRCSSYVEQMLRPLKAFAQQNESQLGTLVVEQILAEVASHITKAYFNVVSDVLTSVQKTEESLRRLRNVKSGGAATVSTGSSAVMSDDDKIRVQLRVDVTSWRQELCKLNFQATQIDKLVELTNMVEDSIKLKDNSA

SEQ ID NO: 13246 - DNA, 2606 bp, DROSOPHILA
ggacattgtccagagagtgctcggatatgtgatgatatggattcagagccacaacagatgttccaatgtaggtctggaaatgaatatatacggaaatgtatagaaatctgaagagtgtagaactgtacggactcacatatatgtgatcgcgcttatagcgctggtggatgttgtttatgaaactatcctcggacaggttctccaacagtaccgagtcccaggtgccgatttcctgctccatcgcgattcccagctccaattacaacgtgcacggcagtagtgacaacaacgacaacggccaaaatcgagttcaccatttgaatttgaatacatcaactgcaaacggggccaaaacaagaacgggaacgatgggaagggtaaggggggttgttaatggctccaacaattgcataatttatcgcgggcctgcatgcatctgggcgaatccgtgttttgattttctgattcaattattgattttcatgtgctggcgagcaacagcctcgagctcgtgttcactcatatattccggatagatagagtccggcttctaatatccgtgacaacaggactcccgactgcccttctacgccttcgtttttagcgtattattgtctttattcgcaacgatttgcacattttgtttaccttttcagaaaagacatttttgcatccagtgggtactagtggtggcccagccatcgacgaccatatcgatatagtctctgagccaccaatcgattcgcataccctacaaagattattatatctaattttaatagttttaaaataacaattaattttatattaaattgaatggtttattaatatctgttatatttaaaaggctattattttactagacttaagctctcaaaatggttttaaaattatagtataaacattgctagggtgttaccagcgtcggtaatcgaagctggttattcttcgcggtgggtttgccatccctattgttaggataataaacgcaaaaattaccatgaatactgacgagcgaaacttcaggtccatctactatgaaaaatgccaaataaacagcgtcgaggaacaaaagtcgctgaacaaactactacaggatgacatccgcaacctgagcaagctgaaacaattctgcatgaactacacagtgccgaacaacaataggagctatctgtgggccctggtcatgggtattctcccgctccacaaagcgtccacggcgtacgtacgcgaccaaagacgcgaaatgtacgaggatctgcggcgagcggtaaccgtgctccggtttaccgaccataagcagaaggagcagcccttcatgtggctgatagaccataagaagaaagcacaggtcatgcacaccatgtggctgatagagtccaatcgactgtggcatggcaatactagtgccagtctccaggcggacgacatgcacttcatagagattgtgcgcacgttgctgcagatattcgacgacaacgtggaaacctactggatagcaaagggattctacaagtacacccgcgaactgaagaaggagtgcgtcaagctgaaggagcaaacgcagaatatactgaagcgcgaagatttgtccttgcttaagtgagtttgcatatggttagtcgggttatttgaccaattttcttcgattactccttatagtcacctggagcttctgggcctgtttgatggcaactcaacgctactggataactggtatataacctgctttgctggaataatctgtacaactcatttggtcaagatatgggacaaagtctgtggagggtcccggaagattgttgttttcctgtttgtagaactagttaaggacataaggtcctcgatactaaagcaaacatctttagcagacgtcaaaagacttatagaaacggtaagtaaataaggaaaccatttgctaagccataacttatccaaaatttgccttaggtaaaggatcttgacggtgttattatcgtaaacaaggccatcaaatcactacaaaacaacagcagcgaagtcgagtacacgcactaagtaaatctacacttttatattggacatgtatatagcagaatgaactaaatgtatttgaagaccacgtcctttttatcgcccaccgtttgcagttccaaggtcactggacactgcatccaataggagagcagctcctccgtgtaaccaataaggaagtacatttttcgcggtgtaatcgcctgccgaataagggccgcgatcctaatggtgttgtgctgtcgcttgataatgacctcggagcagacgagggcatgccatgtgccggtgacaaacttgcggatgaacacatcctctatggcggtctgggacggacgcagggcatccttcattgttgctaagatagaaggtggccatcaaaatgcttccttaataaaattttctcacaacttacacgtgttccatgagttccacgatttgcggtggccaataaaatgcggcggattggccatctcgtaggtaagaggcctgtttcgctttgtggttatgcggtatcgcccggattgcacgcgacagcacacggagctggtgtggaatcctgaccggctgagctgctgcacctcggtcgccac

SEQ ID NO: 13247 - DNA, 606 bp, DROSOPHILA
atgaatactgacgagcgaaacttcaggtccatctactatgaaaaatgccaaataaacagcgtcgaggaacaaaagtcgctgaacaaactactacaggatgacatccgcaacctgagcaagctgaaacaattctgcatgaactacacagtgccgaacaacaataggagctatctgtgggccctggtcatgggtattctcccgctccacaaagcgtccacggcgtacgtacgcgaccaaagacgcgaaatgtacgaggatctgcggcgagcggtaaccgtgctccggtttaccgaccataagcagaaggagcagcccttcatgtggctgatagaccataagaagaaagcacaggtcatgcacaccatgtggctgatagagtccaatcgactgtggcatggcaatactagtgccagtctccaggcggacgacatgcacttcatagagattgtgcgcacgttgctgcagatattcgacgacaacgtggaaacctactggatagcaaagggattctacaagtacacccgcgaactgaagaaggagtgcgtcaagctgaaggagcaaacgcagaatatactgaagcgcgaagatttgtccttgcttaagtga

SEQ ID NO: 13248 - protein, 201 aa, DROSOPHILA
MNTDERNFRSIYYEKCQINSVEEQKSLNKLLQDDIRNLSKLKQFCMNYTVPNNNRSYLWALVMGILPLHKASTAYVRDQRREMYEDLRRAVTVLRFTDHKQKEQPFMWLIDHKKKAQVMHTMWLIESNRLWHGNTSASLQADDMHFIEIVRTLLQIFDDNVETYWIAKGFYKYTRELKKECVKLKEQTQNILKREDLSLLK

SEQ ID NO: 13249 - DNA, 5583 bp, DROSOPHILA
tgcaaacgagagactattagtgggcttcacctagcacaaatcaaagtattcaatgaaatatcaatgatataaaaaaaaaaaaaaaaaaggcacacgcgtgctcgcggaaatcgccaggcagctctttcccgtttgtgcgtgcgtctgaaattgccaagcgaggtgtccctgcccttggcgaattctgacgaggaaaagggcagggcccgcgtcccaactgcactgtgagtcgggttaggggggaccttgttcactggtctttcgagaggcacgcacacatgaaacacaaactcgcacacaggtatcaatctttgctgcgactgccgcgagcacgcgggcgctaaataatagctgagcactcaaaaaaaaaaatataataggaaatgcggtgcggatcaagcgcactggagttgcatgcgcttcagcgcttgatttaacacacttcgcaagtgattgcactacaattcagacttattttcgcggaataacactccacctcagacgctgttaaaagaaagaaagagcgaaaaaagttggacaggaaacagtatggcagttggagatgggcgatagtcgtgccttattatcgataggcgggcgggcgttgccagactgtccaatttgccaatcgaaccaaatttgcgcgtgcggaaaatgtaaagatttcaacatttggtatttagtggtaaactagcaagaagctgatactggcaagccaatattatgtgcaaaatattatggctaaacttcaaaatagagactgaccccttgaacaagaaataagggtaaagaaatcatccagcttgtaattttaaatgctcaggggaaacttttcgataggcgaattaccgccttccgattttaaataacaatatgctccgatagcaccctccggctgtcgataactcaactttgcgcacgtgcatataaaatagaaataggacgttatttccgaaataatttaaaggtaaattaagtgatccccaaaaacagagcagaaatgaagagcaaggtggataaacccgtaaccaatggtgcaccaaatgcaaccaagacaaaggccaaggaggaccgcaagcgggcaaaaactcaaaaatccgaagcggactcgcaaataccggccaagattttgaagaagtccaagaaggagaagccggcggagaccgaggaaaaggaaaataccgcaagcaacgccaacctgaaggtgtctcagatcaacaaggccgtttttgtggtcttcaaaaagatgcagggcagtcaactgaccaagaagatgatcaattcgctcataacactgctgcgcgatgatacaaatgctgagcaggttggtccctaccagctgtccaagtagtttcgcttactaattgttgaaattcttcgtcctcagcgcactgcgaccaccggctacgtgctcaagcgcctgatccgctccacaggagcagatgacatgaagacggtgagcctggccgccagttacatacactgcatcctaaacgccgtgcccgccattgatgcttttgaggttctggagactctgaagcgagacctggccgttggcagccagcagaggggcaaggaggactcactagcggccgtcggtcaattggttacagccttctgcattctgcagaccccgcagttcgctaaggccgagcccaagctggttacggcagtcttccagattctggcagcccagctaaagggcagggagtacttggtgtccctgtgtggtgatatcctggcggtctcctttaaacaggttggtgcttaagcttttctgaaggagattgactacagtttcttatgattttacgtagctacccgctgcgatcttcgaggagtacgtgtggccacttctgcaacccgagctaaacaagccgttgagtggcttgaaagtgaacacttgcgatgtcttgctcgccgtgcatctgaccttttcgtccgtactgggacgggagaacattctagccagcttgtggcccaagaaaccagtgtacacacagcttttcgatttgtatttctccggttccaccattcacagcgatggcgtatatgccagattggctagttttcttgttaatggcggaaaggatatgctcgccgcctggcagcaatatatcgattctaagcagccactcaaactgaatgcagccaaggcgtgtgccatccaagtactgagccacgtgctcctcaactttaagccaagggaagaacaactcatcctggatatctttacaccgacctgtgtacagttcctgttgcatgaatgttcatctgtgaaatgggacaaaggtgagggcaagaaaccgtcgctaaagaagctgaaggagatttgcttcaagttcgagggatccttggttttgtgttacgaaaagcagttccaaaacgatgataacaaacttcacctgctgctcaaactgctggagcacacactgcagctggactcggtgatttccttgccgcgtttctgccagaaactgataaatcaactcagcgtcgagagccttcacaagctgtacgactactacaacaacaagctgtactcattggaggacgaggacagagtcagccgagtgcactgccttaaccagatgcaattgatactgaaccactcaaagcttagtcagacagccaaatggcgacagaaacagttgaactacttgttgctcgctggccttttccacttagatgccagtaagaagccgtgtgaagctgcccaagccagcgcttttagtcgccagtgcgcggcgcgttgtgaggagatattcctgggctccctgctgcacaagtgctcgggtctgccaggactttgccagttgctgcagaagacattgagttaccttaacaaagagttgggacaaccggatgcggagagcaaattgcgttcgccgagagacgaatcactgcaaaaggcatggaagcaggtcgagaaactgctggagcggcccagcaaggaatccgatgtcgttggccaatcattcgaggctcttatcctgtttgtttctttggctttgtgcacaaagattcccccatccatcaccgtgttggaagatctgattatctgccgtaagaatgcactgcaaaagagcaaggagcaagtaagtagagaacctatacttcaatgtcatcctaaatctaaaataactggtttgctctaggttaacgaagagctcaaatggcaggacgtgcttacagatgccctactccagttacttttgcaaacaggtcacttctggcgggagtttgttcaactggtggccaccgctttgattccgcaccttgagcacggtaacctagaacaggtcctcgaagtgctcaacatgaacaaaaatcccctgagcaaaaagagcgatggcgaggaggagagcgatgacgaactcgacaaggaagaatcgttgaaggattcaagcgatgattcagaagatgaagatgaagatgaagaggaggacgagggcgaggacgatgcagagtcccatttggcccaaattcgagagagcgttcgccaggctttggtcaacgatggcgacgctgatgacgatggcgccagcagcgtggattggaacgatgtggacgaggagcagggcgaacgcttgaatgctgctttggagcggtcttttcagatgttccgacccaagtcgcgcaaagcccaggagaaggagcgtcccaccaaatcggaacgcattgatagcaccaacctgctgcacttccgcattcgtgccttggatttgttggagctcttcataaccaagaaaccaactcaatcggtaatcctggacgtgctacattgcgtgttccaggtgtacagccattgcgccgcagacagcaaactacaatccttgcgagaagccagtttgaagttgctcaaaaagatactcgctaggaatatcgaactcaaggaaaatcagagcaccgcacccattctggaagccattgagcagctgatgtcgtctggcgaggagcattcagaagaggaccaagagaacggcaagcagcccgccagccgacaggccaaaagagacatcattatttggcgggacaggtgcttcgcttacctggtcagccaggcatcagcagatggcgagcccaagaaaagtgccgtctggccccttctagtcgaattcctggagctgtgggtagccaagcgacgtagtcgcctctctctggccagtttcgaagccctctttcagtctggccaatggcagggagttgctccgctggccgttgtcctggcctctcacttggacgtacagaaaacacgcagttttcggcgggcacagatactgaagctgctcagcgagcaaggtcgccggctcgaagtcgctttcaaggacaacaactcgtcttccaagaaatttgagaagcagatagccagatatgtaaatcagctagaaacgaaggctagcagttccaaggaactcaatctgctgcttaagatcctcgcccaaggaggcgagaagtggcagaaactgcgtgaacaaattcagctcgtcgccaaggatcttcaacccaacaagaaggtggcgaagcagaagaagcaggcagccgccaaacctatggtcgtggaagatgaagagtccacataacgtaaaagaaggaaacaccccaataagaaaccttacaattagatgtataaatatcttgcataatataggatactattaatttttttgttctttaaaaaattctgacgaaaagtactaaattagtattgaagtcattgaaaaaatagcaaaagtacactaaactttataaaaatgtatttttacctttatagagcaatttgagtggacgtacaactgcgctaacgttaaaaaccaaaatcacagacgaggtggaaagtacacgtgctggcgaaatgtgcttttaacattcggcaccatggactcgtcattactgcctcgctttttagacacttcgttggtgacaatcgtcaggatatcggcgatgtgttcactaaagtaacaaagaacaacttatgcattaattcggggctagcttgctttggcagctttttacctggcggaacggcgatcgatggcatcgcacaggctcccgataaaccagctacctgtttgggtgtggcgcagagcagcatatccatttaccgtggacatggcccgcagcatgtcgatgtgctggtccggcgacacggtggtcacgtctatcctaaactgaaagaggaatacgaaaatgtataggctttcccattcgacgacttcatgcttataaatctccttacgagctcatttggcttctttttatggacaagcttctcctggcaggcttgtatgattagcaacttcggtttgtagtacagggtgtcgtagctgcagagcaagtcctcgatatccgtgatcttcatggcgatgctgttggatgcgtagacggcctcctcgaagccgtggctcaggatgaagaccactagggaatcgcgcacgagcgatctatcgcacgcactgcgaatgcgctctatgatgcccatgtgatccacgttgtcgtacgcctccacattgtatcccatcgaggaaaacacctcgattagtcgttctttatccacatccgtgccatcccgtctacgcagtg

SEQ ID NO: 13250 - DNA, 3402 bp, DROSOPHILA
atgaagagcaaggtggataaacccgtaaccaatggtgcaccaaatgcaaccaagacaaaggccaaggaggaccgcaagcgggcaaaaactcaaaaatccgaagcggactcgcaaataccggccaagattttgaagaagtccaagaaggagaagccggcggagaccgaggaaaaggaaaataccgcaagcaacgccaacctgaaggtgtctcagatcaacaaggccgtttttgtggtcttcaaaaagatgcagggcagtcaactgaccaagaagatgatcaattcgctcataacactgctgcgcgatgatacaaatgctgagcagcgcactgcgaccaccggctacgtgctcaagcgcctgatccgctccacaggagcagatgacatgaagacggtgagcctggccgccagttacatacactgcatcctaaacgccgtgcccgccattgatgcttttgaggttctggagactctgaagcgagacctggccgttggcagccagcagaggggcaaggaggactcactagcggccgtcggtcaattggttacagccttctgcattctgcagaccccgcagttcgctaaggccgagcccaagctggttacggcagtcttccagattctggcagcccagctaaagggcagggagtacttggtgtccctgtgtggtgatatcctggcggtctcctttaaacagctacccgctgcgatcttcgaggagtacgtgtggccacttctgcaacccgagctaaacaagccgttgagtggcttgaaagtgaacacttgcgatgtcttgctcgccgtgcatctgaccttttcgtccgtactgggacgggagaacattctagccagcttgtggcccaagaaaccagtgtacacacagcttttcgatttgtatttctccggttccaccattcacagcgatggcgtatatgccagattggctagttttcttgttaatggcggaaaggatatgctcgccgcctggcagcaatatatcgattctaagcagccactcaaactgaatgcagccaaggcgtgtgccatccaagtactgagccacgtgctcctcaactttaagccaagggaagaacaactcatcctggatatctttacaccgacctgtgtacagttcctgttgcatgaatgttcatctgtgaaatgggacaaaggtgagggcaagaaaccgtcgctaaagaagctgaaggagatttgcttcaagttcgagggatccttggttttgtgttacgaaaagcagttccaaaacgatgataacaaacttcacctgctgctcaaactgctggagcacacactgcagctggactcggtgatttccttgccgcgtttctgccagaaactgataaatcaactcagcgtcgagagccttcacaagctgtacgactactacaacaacaagctgtactcattggaggacgaggacagagtcagccgagtgcactgccttaaccagatgcaattgatactgaaccactcaaagcttagtcagacagccaaatggcgacagaaacagttgaactacttgttgctcgctggccttttccacttagatgccagtaagaagccgtgtgaagctgcccaagccagcgcttttagtcgccagtgcgcggcgcgttgtgaggagatattcctgggctccctgctgcacaagtgctcgggtctgccaggactttgccagttgctgcagaagacattgagttaccttaacaaagagttgggacaaccggatgcggagagcaaattgcgttcgccgagagacgaatcactgcaaaaggcatggaagcaggtcgagaaactgctggagcggcccagcaaggaatccgatgtcgttggccaatcattcgaggctcttatcctgtttgtttctttggctttgtgcacaaagattcccccatccatcaccgtgttggaagatctgattatctgccgtaagaatgcactgcaaaagagcaaggagcaagttaacgaagagctcaaatggcaggacgtgcttacagatgccctactccagttacttttgcaaacaggtcacttctggcgggagtttgttcaactggtggccaccgctttgattccgcaccttgagcacggtaacctagaacaggtcctcgaagtgctcaacatgaacaaaaatcccctgagcaaaaagagcgatggcgaggaggagagcgatgacgaactcgacaaggaagaatcgttgaaggattcaagcgatgattcagaagatgaagatgaagatgaagaggaggacgagggcgaggacgatgcagagtcccatttggcccaaattcgagagagcgttcgccaggctttggtcaacgatggcgacgctgatgacgatggcgccagcagcgtggattggaacgatgtggacgaggagcagggcgaacgcttgaatgctgctttggagcggtcttttcagatgttccgacccaagtcgcgcaaagcccaggagaaggagcgtcccaccaaatcggaacgcattgatagcaccaacctgctgcacttccgcattcgtgccttggatttgttggagctcttcataaccaagaaaccaactcaatcggtaatcctggacgtgctacattgcgtgttccaggtgtacagccattgcgccgcagacagcaaactacaatccttgcgagaagccagtttgaagttgctcaaaaagatactcgctaggaatatcgaactcaaggaaaatcagagcaccgcacccattctggaagccattgagcagctgatgtcgtctggcgaggagcattcagaagaggaccaagagaacggcaagcagcccgccagccgacaggccaaaagagacatcattatttggcgggacaggtgcttcgcttacctggtcagccaggcatcagcagatggcgagcccaagaaaagtgccgtctggccccttctagtcgaattcctggagctgtgggtagccaagcgacgtagtcgcctctctctggccagtttcgaagccctctttcagtctggccaatggcagggagttgctccgctggccgttgtcctggcctctcacttggacgtacagaaaacacgcagttttcggcgggcacagatactgaagctgctcagcgagcaaggtcgccggctcgaagtcgctttcaaggacaacaactcgtcttccaagaaatttgagaagcagatagccagatatgtaaatcagctagaaacgaaggctagcagttccaaggaactcaatctgctgcttaagatcctcgcccaaggaggcgagaagtggcagaaactgcgtgaacaaattcagctcgtcgccaaggatcttcaacccaacaagaaggtggcgaagcagaagaagcaggcagccgccaaacctatggtcgtggaagatgaagagtccacataa

SEQ ID NO: 13251 - protein, 1133 aa, DROSOPHILA
MKSKVDKPVTNGAPNATKTKAKEDRKRAKTQKSEADSQIPAKILKKSKKEKPAETEEKENTASNANLKVSQINKAVFVVFKKMQGSQLTKKMINSLITLLRDDTNAEQRTATTGYVLKRLIRSTGADDMKTVSLAASYIHCILNAVPAIDAFEVLETLKRDLAVGSQQRGKEDSLAAVGQLVTAFCILQTPQFAKAEPKLVTAVFQILAAQLKGREYLVSLCGDILAVSFKQLPAAIFEEYVWPLLQPELNKPLSGLKVNTCDVLLAVHLTFSSVLGRENILASLWPKKPVYTQLFDLYFSGSTIHSDGVYARLASFLVNGGKDMLAAWQQYIDSKQPLKLNAAKACAIQVLSHVLLNFKPREEQLILDIFTPTCVQFLLHECSSVKWDKGEGKKPSLKKLKEICFKFEGSLVLCYEKQFQNDDNKLHLLLKLLEHTLQLDSVISLPRFCQKLINQLSVESLHKLYDYYNNKLYSLEDEDRVSRVHCLNQMQLILNHSKLSQTAKWRQKQLNYLLLAGLFHLDASKKPCEAAQASAFSRQCAARCEEIFLGSLLHKCSGLPGLCQLLQKTLSYLNKELGQPDAESKLRSPRDESLQKAWKQVEKLLERPSKESDVVGQSFEALILFVSLALCTKIPPSITVLEDLIICRKNALQKSKEQVNEELKWQDVLTDALLQLLLQTGHFWREFVQLVATALIPHLEHGNLEQVLEVLNMNKNPLSKKSDGEEESDDELDKEESLKDSSDDSEDEDEDEEEDEGEDDAESHLAQIRESVRQALVNDGDADDDGASSVDWNDVDEEQGERLNAALERSFQMFRPKSRKAQEKERPTKSERIDSTNLLHFRIRALDLLELFITKKPTQSVILDVLHCVFQVYSHCAADSKLQSLREASLKLLKKILARNIELKENQSTAPILEAIEQLMSSGEEHSEEDQENGKQPASRQAKRDIIIWRDRCFAYLVSQASADGEPKKSAVWPLLVEFLELWVAKRRSRLSLASFEALFQSGQWQGVAPLAVVLASHLDVQKTRSFRRAQILKLLSEQGRRLEVAFKDNNSSSKKFEKQIARYVNQLETKASSSKELNLLLKILAQGGEKWQKLREQIQLVAKDLQPNKKVAKQKKQAAAKPMVVEDEEST

SEQ ID NO: 13252 - DNA, 5860 bp, DROSOPHILA
tgacttgtcgctgaaaagcgttcgtcttggcgagcatgacatcacctatgatccagcctacaatccggactgcagggaccaggataaccaatgtgcccttccaaatctggagatcaaattggagaagatcatagtgcatgggctattcagtagcattagcaataggaacatcgaatacgatatcgccctcttacgactcaaaatgccagtgcggtgagtaatgctttcacagaaaatatccgttgatttccgttgccgaaaagttcttgcaaattcgttcagattcataatgctcatagatatttttttggtgtttcttttccagctataggacaggaatcatgccaatatgtattccaaagcacggctttttcgcgaaatccaaacttgaaatagccggatggggcaaaacaaatgagggccaatttagccaagtactgatgcacggattcatccgggaaaggtcaatcgcagtgtgcgcattaaggtttccgtatctggacctcaaccaaagcctccaaatctgtgccggcggctacgatggcgtcgatacctgccaaggggattccggtggaccgctgatggtaacgatggacaatagtagtgtttacttggctggcatcaccacctatggcagtaaaaattgcggccagattggcattcctggaatttacaccagaaccagtgcattcctgccatggataaaggcggtattgaggccctgaatgtcggcagcaatgctaagacagcttaaagtggattagttttatttttgtcaaaagaactcgtaaaatatacacaaatacacgcaggtaaatactgttacgattacaagaaaccccacaacacgcaaatgacgataaattacaatagtgactgttgacagagacattgagagaaagagataggctggcgcgggtagttccggctgcggtggccaaaaggacccaatcctccggcgccgaatcctccgcggtcagcgattagcgattagctaagtttagtggttggcatagaagccatgtcccgagttacccataaactccgtccagcgctgcgactccaccggatccagctccgagcaaacctcgcccggccgcagggagcgacaggtgcaggtgatcccgatgcgggtcaccaccagctgcgactcgaacttgggtagggtgggctccgcgtccaccagacgctcgctgaggcactgcttcaggaactgtttgcgcagcacgcgtaagttgtctatggtgtagcctggggatcgcagatatcagtggattagattaggtcatagaatctaaactaactttaagaccgcgtagacttggagtacttactcttgtacgcactgactttctcctcgacgcagctgagatcctgcggagagaagagtggcggataggcctccgattctcggatgttgaggacgaaggcaaagtccagcgaggagctgacattgcccagagctttcagcaaaacgccggtggatgagatggaagccaagtaccagtcagctcctacggaggactcctcaacaccagcggaatcctcggacgctgttgtcgtgattccggaagcactctcgcgtcttttgcgacgtttcttctgttttttgttttcctcctgggcgtccgcagctcgctcccgcgcctcgttgtccagctccagatcccacaggctcagcggggactgagctgacatgggttgtccggtggagctgggggtggcagggctggtggttatgatgctgctgccactggcttcgaggaatccactgcgcacatcccgattgccggcgctgggatatttggagcgcaggtgaatgggtcgctcacgttcactgggctctaaaagcggaggcacttcgtcgttgtacaccagttcgtactcctccggcaggcgcagcggattagcattctctggcggcagttgtagggcatcgtagtccttctgcggagttaggaaattgttttgtatgaaatttaatttaagccaaatccgtaatacttacaaattccttggggtaaccacttgccattccgaagttaggtgattcgttatctgctccctgaggcaaaagttcctgcaattgctgctccatcagcggattgggtcgatggtgtgtcttgaggcgacggttggggtgctccgtcccactacctataccattttcattgccaatttccgatccggcggccacctggcgcagcagttgctccctgtttccggccagcagttttttgagcagcttgggatgcttcagtggggatttctttcctgctgccgccggtcgttgtgtgcgattcagctgcacctccaagtcatcggtgctaaagaggaccgcacccggtggttcgatgtgcctggcaatcccgtagagcttcagcatcgtggactcgttgtaacgcagacgacaggtgtccgccctggcttggagtataatgtcgctatccggcacaaattcgtaggcatcccgggcatccggacggttgcggcactgcagctgccagtgcaagaagaagtcgcctccgaagctctgcgaaatggagacgccgccgagaagactattggcaccacctgcatccgtcatcatggcgttcagcaggggctgtccgtttcgtccgtccaggatggtggtttgcgagtagtagtataccgggaatcccggtccagtgttgtacttcaccatgaaatccgtgaccctgtcgtgattaaatagacccgggacaatggcactgacgcactcgctggccgggaacgtgtagttccacatcatggtgtagttggctccatcgaaggctagaacgctccgattaaaggcggccaccacaacatccgagataccatcgccatttagatcggttagcacggcgggcaccatcagacccgagccctgttgacgatggagcggggtgaagtgcttctcactggtgtgcgccattagggagtgcagtcgcaaggagtaaatgccacctggagtgttctgcccgccggtgacaatcagtaggagctccgtgccatccgcctgcgtgatcagctgaatgggcacgaacatctcctcgcggtacggcgttggaatgctccggattaccttgcccgtcttgcccgaaatcagctttatgtgtcccgccttggactcctcgcgctcctccagatgggcggctataacttccggcaccgaatcaccatccagatcgcgcagcacattaatcgtgtacagatccattacaatgggcgagtttgtttccacttccagttcccggaagctccagattacggagccagtgcgtccattgatggcgtaaatcatctgagtggtaaaataggaaggtttcgtaattcaaaaatcttaaatttgccatattttatacttactcccaatctaccagctgccacgcaatcggtgcccccatctccgtccacatccgcgctgcagtgcagcgagaagacattcgccacgctccacgattgccagagaatggatccgtccagtccgttcaaggccaccacgccgccctcgcagggcacctcctccccttgctgggcgcactggcagcgcggcaagggtatgccctcgtagggtatgttgtcgtccactccatagccaaagaccacgtccttgatgccatcgccattcagatcagccgctcgcagcggactctcgctgttcatgcgcgccaagctgcgagaccagcgcttctggacactgatctgggtgcagggaacaaactcactgcccagcgagctgccatatgagatgcgggaggagcctgctgagatggccgccagctgggcgggatcggggcgccaccagtgccggattcgctgcagcggcagcgggaagagcgtcagcatgagggccgccaggctgagcagggcgcacagtaccgttagagcggccagggcgtagcagaagggttcgcagcagcggcagcagcgccgcctcctgtgctgcttcattatcggagttgatcccgagccggatccgggtccggaacctggactgtgtttgcgacgcggcgccatcaggggccgcttcaatccctgctcctcgctgcgctgtgggatgaaaacagatccaggttagaattataataataatatcatggttccacagagagaaaattaatgttatattattcttctacaaattttcttattttcaaattgctgagatttaaattttcaatataaaatattccttttttaggaatttgctctattaaaagttctttttgtatccatttaaatggtaataaatcataggagtaatttatttagttaatttaatacacaagaaataaataatttaataaacaagaaatgtatgtatttaaccaaaaatgagcgcggcatatggtagcttataattttgattttattttttcaaactatattttaaaacagaaaagacatttttcgtgtgtctttcaaccaagagaatctgaagagaatcgttcacaacttttttttcctctgtacactcgaaactttgcacgaaatgtcagcactcttttctaacccttccgtgtccacacactcgagtataagatgatccttatgatcttatgatttttgatttcggtctcaccttcgccgacctggcatccttgatgaacacctcgtcctccacatcgtcgctcgcatcctcgtcgatggacgagtcccgtatggcaatcctcttggagggcacatatggccgcagtttgatcatcttgggtagggattccgctgtcgcggttgcaccaccaagctgcgcctgcaagaaagcctctgatttagccgctcgaaggatgggctgcggatatcttaaagcatcctgcggctcctgttttttcgtgcaactccaattgcagcgatgcgcgtccggcgagtgtgtaaaaatcaatagcgacgtcacggtttcgcgctcagctgtccgcgaatccggagcatgcgccctgctggcgtagcagtggaaccacccgaaccaccacccatgggagcgaacgccacgtgttggccagcggctacaggtttgtttgtcaacaatgaggtggcccacctggccagctcgctctcacactctctctctctctctatttggttctctctatctctctctctctctcatctgttgctggacagaggcaccacccacccacgcgacccatcaccacccatcatcccccagccaaaactccctgattagctccttgcgagcggttcaatgtcctcgctttgaggcttttcatgaatgaaatgggtggagttgcgatatgtgggcactgggcgttggacgttgggtgggacagcgggagttccattcagcgaacttccgcgtactgccaatgtgggtcacatcttcactgggacactgtgtggtttccccgctcgccaaatgtggcgattaatatttaatggcattttgtctgcgtttcagtggcaggaagtgaaatggaaaagactcaattggccgatacatcactgttcgactataagctggttttttaccatttgactattgtctagctaaaaagcttcttaaaatgaagatatatatttattgactgtacacccgtgtctgtctgtccaaataaacgtaagtttatttcacttatgattttttttggatttttggaattttaatattgacaaacatttttgtacgccctcataccgctcaaaactgaacaattttgaatattatgaaatacataataattctatcgaggtgttaaaatatgaaaactcgaaaacttcgaacccattcattgttttaaaagtttttgtaaactaagatattaaatccttagcaatacatataaccgccgctagatggcgctagtggccaatttaggaaaagagcagcttccttttagct

SEQ ID NO: 13253 - DNA, 3119 bp, DROSOPHILA
cgcatcgctgcaattggagttgcacgaaaaaacaggagccgcaggatgctttaagatatccgcagcccatccttcgagcggctaaatcagaggctttcttgcaggcgcagcttggtggtgcaaccgcgacagcggaatccctacccaagatgatcaaactgcggccatatgtgccctccaagaggattgccatacgggactcgtccatcgacgaggatgcgagcgacgatgtggaggacgaggtgttcatcaaggatgccaggtcggcgaagcgcagcgaggagcagggattgaagcggcccctgatggcgccgcgtcgcaaacacagtccaggttccggacccggatccggctcgggatcaactccgataatgaagcagcacaggaggcggcgctgctgccgctgctgcgaacccttctgctacgccctggccgctctaacggtactgtgcgccctgctcagcctggcggccctcatgctgacgctcttcccgctgccgctgcagcgaatccggcactggtggcgccccgatcccgcccagctggcggccatctcagcaggctcctcccgcatctcatatggcagctcgctgggcagtgagtttgttccctgcacccagatcagtgtccagaagcgctggtctcgcagcttggcgcgcatgaacagcgagagtccgctgcgagcggctgatctgaatggcgatggcatcaaggacgtggtctttggctatggagtggacgacaacataccctacgagggcatacccttgccgcgctgccagtgcgcccagcaaggggaggaggtgccctgcgagggcggcgtggtggccttgaacggactggacggatccattctctggcaatcgtggagcgtggcgaatgtcttctcgctgcactgcagcgcggatgtggacggagatgggggcaccgattgcgtggcagctggtagattgggaatgatttacgccatcaatggacgcactggctccgtaatctggagcttccgggaactggaagtggaaacaaactcgcccattgtaatggatctgtacacgattaatgtgctgcgcgatctggatggtgattcggtgccggaagttatagccgcccatctggaggagcgcgaggagtccaaggcgggacacataaagctgatttcgggcaagacgggcaaggtaatccggagcattccaacgccgtaccgcgaggagatgttcgtgcccattcagctgatcacgcaggcggatggcacggagctcctactgattgtcaccggcgggcagaacactccaggtggcatttactccttgcgactgcactccctaatggcgcacaccagtgagaagcacttcaccccgctccatcgtcaacagggctcgggtctgatggtgcccgccgtgctaaccgatctaaatggcgatggtatctcggatgttgtggtggccgcctttaatcggagcgttctagccttcgatggagccaactacaccatgatgtggaactacacgttcccggccagcgagtgcgtcagtgccattgtcccgggtctatttaatcacgacagggtcacggatttcatggtgaagtacaacactggaccgggattcccggtatactactactcgcaaaccaccatcctggacggacgaaacggacagcccctgctgaacgccatgatgacggatgcaggtggtgccaatagtcttctcggcggcgtctccatttcgcagagcttcggaggcgacttcttcttgcactggcagctgcagtgccgcaaccgtccggatgcccgggatgcctacgaatttgtgccggatagcgacattatactccaagccagggcggacacctgtcgtctgcgttacaacgagtccacgatgctgaagctctacgggattgccaggcacatcgaaccaccgggtgcggtcctctttagcaccgatgacttggaggtgcagctgaatcgcacacaacgaccggcggcagcaggaaagaaatccccactgaagcatcccaagctgctcaaaaaactgctggccggaaacagggagcaactgctgcgccaggtggccgccggatcggaaattggcaatgaaaatggtataggtagtgggacggagcaccccaaccgtcgcctcaagacacaccatcgacccaatccgctgatggagcagcaattgcaggaacttttgcctcagggagcagataacgaatcacctaacttcggaatggcaagtggttaccccaaggaatttaaggactacgatgccctacaactgccgccagagaatgctaatccgctgcgcctgccggaggagtacgaactggtgtacaacgacgaagtgcctccgcttttagagcccagtgaacgtgagcgacccattcacctgcgctccaaatatcccagcgccggcaatcgggatgtgcgcagtggattcctcgaagccagtggcagcagcatcataaccaccagccctgccacccccagctccaccggacaacccatgtcagctcagtccccgctgagcctgtgggatctggagctggacaacgaggcgcgggagcgagctgcggacgcccaggaggaaaacaaaaaacagaagaaacgtcgcaaaagacgcgagagtgcttccggaatcacgacaacagcgtccgaggattccgctggtgttgaggagtcctccgtaggagctgactggtacttggcttccatctcatccaccggcgttttgctgaaagctctgggcaatgtcagctcctcgctggactttgccttcgtcctcaacatccgagaatcggaggcctatccgccactcttctctccgcaggatctcagctgcgtcgaggagaaagtcagtgcgtacaagagctacaccatagacaacttacgcgtgctgcgcaaacagttcctgaagcagtgcctcagcgagcgtctggtggacgcggagcccaccctacccaagttcgagtcgcagctggtggtgacccgcatcgggatcacctgcacctgtcgctccctgcggccgggcgaggtttgctcggagctggatccggtggagtcgcagcgctggacggagtttatgggtaactcgggacatggcttctatgccaaccactaa

SEQ ID NO: 13254 - protein, 989 aa, DROSOPHILA
MIKLRPYVPSKRIAIRDSSIDEDASDDVEDEVFIKDARSAKRSEEQGLKRPLMAPRRKHSPGSGPGSGSGSTPIMKQHRRRRCCRCCEPFCYALAALTVLCALLSLAALMLTLFPLPLQRIRHWWRPDPAQLAAISAGSSRISYGSSLGSEFVPCTQISVQKRWSRSLARMNSESPLRAADLNGDGIKDVVFGYGVDDNIPYEGIPLPRCQCAQQGEEVPCEGGVVALNGLDGSILWQSWSVANVFSLHCSADVDGDGGTDCVAAGRLGMIYAINGRTGSVIWSFRELEVETNSPIVMDLYTINVLRDLDGDSVPEVIAAHLEEREESKAGHIKLISGKTGKVIRSIPTPYREEMFVPIQLITQADGTELLLIVTGGQNTPGGIYSLRLHSLMAHTSEKHFTPLHRQQGSGLMVPAVLTDLNGDGISDVVVAAFNRSVLAFDGANYTMMWNYTFPASECVSAIVPGLFNHDRVTDFMVKYNTGPGFPVYYYSQTTILDGRNGQPLLNAMMTDAGGANSLLGGVSISQSFGGDFFLHWQLQCRNRPDARDAYEFVPDSDIILQARADTCRLRYNESTMLKLYGIARHIEPPGAVLFSTDDLEVQLNRTQRPAAAGKKSPLKHPKLLKKLLAGNREQLLRQVAAGSEIGNENGIGSGTEHPNRRLKTHHRPNPLMEQQLQELLPQGADNESPNFGMASGYPKEFKDYDALQLPPENANPLRLPEEYELVYNDEVPPLLEPSERERPIHLRSKYPSAGNRDVRSGFLEASGSSIITTSPATPSSTGQPMSAQSPLSLWDLELDNEARERAADAQEENKKQKKRRKRRESASGITTTASEDSAGVEESSVGADWYLASISSTGVLLKALGNVSSSLDFAFVLNIRESEAYPPLFSPQDLSCVEEKVSAYKSYTIDNLRVLRKQFLKQCLSERLVDAEPTLPKFESQLVVTRIGITCTCRSLRPGEVCSELDPVESQRWTEFMGNSGHGFYANH

SEQ ID NO: 13255 - DNA, 3139 bp, DROSOPHILA
tcttaaaatgctaccgaaattgctgtgggcctattacatgattcttcaggggtgtcttcaaattttaagaattctcacgatctttaaaagatcaaggatcagaatagtttgattttcttcttatgcaacaagtcctgcctgcagttctttgaagatttccagattttccagcaactgctgttttcgtttctgatttcctgatcgaaaacttaacaaattataagcaattttgaacattttcacacgctgaaaattcattttcccataacgtcccaaagggccaacaatgaaaggatcaaagacagaaaattctcacgaattttcccagtgcttccacatgtgctagctacctgctctatcacattttcattcgatttcccgtagtggcgtgctaattttactgtcagcctgttagatattttccgaggtttcccaagcatctctaatatttcacacggtcagcccgtgtcaagagatcttttcatgattttgggactacaccaaccacgattttctttagcctgtgccgatcattgttctcacgcatctgccatccagattgtggaatcgggacggggaatgtggaaacgttagaatgaaaacccacacacaaagcgatctctggttttatgtgactccaaattcgaggaattatttctaaggcttggaatgttgcagcggtccctttgagtggctcaaattccagaaatggttcgtgcgggtacctgaaaaaggtccaaatccagtttgtcatcttattttgcgttggtactcaagagtccactgaaatgattctgtgctcctggtgaattggttggaactggcatctttccttttttacttctttttttttcaaaattgataaaccaagtaataaaccacgaggctttataatttggatggagcaggtggtgctacgaattcgctttataatcttcataaacaatacaatgtttacccagctggcagtttttggtgctaattaaagaggctataaaatctttttaactatatgtacttatttatcttggttttgcttaataatctacttagtttatatatttttattaattcgcttctggaaacagcacttcaagttttcttatcaaaactttatagagcaaagtacatatttataatgctggtaatagtatttatatttatttaaacatcaaaagctatacaaattaataaatgctgtaatattttcattgactcgaatgaatttgatttatgtaaggatactttaactgctgatcaggacctctacacagctcatagcattggttacaaacttgaagggattccggatggtatcgttgcgaggattgatctccgacagagaaacatatgacttattcggacacgattgctcttcaaaggatccacagatcaccttattggaaatgcaggagtcgatgagttgcagcgccagttccactttggaggtaatagagtacacctggccaaaggagcactgccaggagttcctaatgcgattatcagccgtgcattccgaactcttcaggttggtattgaaagtattctgtgtggtgatggtatacttattggcatcaccaatctgcaagtgtaaaaagaagtctcaggattctgctcttaataatatagaaagttgtaatacttaccaccttggttacacagagtgtgtaatttaactgggcagttggatgaagttttaggcattgtgccaaaccattcttcacgttatttttatagtagttattcagggtgttgtaggtgctctcaggtgcatttaaaatgccactaatactttccttacacttgataatggagtccctggccacggtgatcgttggtatagtaacactatagttctgtacgcattgtttgctccaggaatcgatcaggataatgggatccaggtgagcggaggcttgttccaattttagctgcatcgaatctgcttgcacatcgagcgcattgatttgcttctgaaatagctgcttaaaattggctaattcatctgccagctgtttgatcttcgcgtcatattgccgctgattctggagtatatagagatccatggactgggagctgttctgcgcctggctagccaccaggctcagaagagccagaatgattgctactcccagaaagctctgcatcttgactgtgtgccgaacgattgggaagcctctgtttatatatactctctactttcttatcactctacgtacttcccctgcaaaagtcgtcgtatcagctgcggctcccccataatgaattttatttgcaagctccgaaatccgcctctatatttaattggctttcatttacttttcaactcaagaattgtttacataaggtttggccgttgttcctaagaatttgtgtggttatcctctcttatcggggccttttataggcgaaaagttaaaaattaattacgtgtgccaacttaaagctctaaacaaggttatttaatgggaacgtcaacgtgtgtcaataaggaagtttttattgattggggactcacacaaaaacagtttgtatgaatggttcaaaatatcatattacaaaatggcaagaacattccttctgttgggtctggtcaggaagtgaatactatgcgaacatttgtaattgtttcgtaaattgtattttttaacaacctaataagttgtgcgataactttgaaataccagcgtttttttcaactcgaaaaggttgttcaaagtgtagagcagtttcgaaaatgagttcctgaatgaatgttcaatttgctttccaaaattttataatttaaaagtgtttgtattttcaatggacaaatcagtgggaagtcacacggcttaatcgcgacataatgaatgtgagtattatcagcgaatgatgcatatatgtaatttgtaatctaaatgctgttttccatacacctcataaaaggcaatccccatttgttgttgatctcaacaaatactataataacaatttttaaaaacgctttttcttatttgttttattattttgcttgcaaattttaatcgaatctcaataaaaagtttgaaaattctttctcgcactttcacttgctgtaatggatatctgattaacaatatgtcgatataccttgctatttaaatgattttgcaaacct

SEQ ID NO: 13256 - DNA, 1075 bp, DROSOPHILA
ctttctgggagtagcaatcattctggctcttctgagcctggtggctagccaggcgcagaacagctcccagtccatggatctctatatactccagaatcagcggcaatatgacgcgaagatcaaacagctggcagatgaattagccaattttaagcagctatttcagaagcaaatcaatgcgctcgatgtgcaagcagattcgatgcagctaaaattggaacaagcctccgctcacctggatcccattatcctgatcgattcctggagcaaacaatgcgtacagaactatagtgttactataccaacgatcaccgtggccagggactccattatcaagtgtaaggaaagtattagtggcattttaaatgcacctgagagcacctacaacaccctgaataactactataaaaataacgtgaagaatggtttggcacaatgcctaaaacttcatccaactgcccagttaaattacacactctgtgtaaccaaggtgattggtgatgccaataagtataccatcaccacacagaatactttcaataccaacctgaagagttcggaatgcacggctgataatcgcattaggaactcctggcagtgctcctttggccaggtgtactctattacctccaaagtggaactggcgctgcaactcatcgactcctgcatttccaataaggtgatctgtggatcctttgaagagcaatcgtgtccgaataagtcatatgtttctctgtcggagatcaatcctcgcaacgataccatccggaatcccttcaagtttgtaaccaatgctatgagctgtgtagaggtcctgatcagcagttaaagtatccttacataaatcaaattcattcgagtcaatgaaaatattacagcatttattaatttgtatagcttttgatgtttaaataaatataaatactattaccagcattataaatatgtactttgctctataaagttttgataagaaaacttgaagtgctgtttccagaagcgaattaataaaaatatataaactaagtagattattaagcaaaaccaagataaataagtacatatagttaaaaag

SEQ ID NO: 13257 - protein, 208 aa, DROSOPHILA
MQLKLEQASAHLDPIILIDSWSKQCVQNYSVTIPTITVARDSIIKCKESISGILNAPESTYNTLNNYYKNNVKNGLAQCLKLHPTAQLNYTLCVTKVIGDANKYTITTQNTFNTNLKSSECTADNRIRNSWQCSFGQVYSITSKVELALQLIDSCISNKVICGSFEEQSCPNKSYVSLSEINPRNDTIRNPFKFVTNAMSCVEVLISS

SEQ ID NO: 13258 - DNA, 6347 bp, DROSOPHILA
taaccaataaggaagtacatttttcgcggtgtaatcgcctgccgaataagggccgcgatcctaatggtgttgtgctgtcgcttgataatgacctcggagcagacgagggcatgccatgtgccggtgacaaacttgcggatgaacacatcctctatggcggtctgggacggacgcagggcatccttcattgttgctaagatagaaggtggccatcaaaatgcttccttaataaaattttctcacaacttacacgtgttccatgagttccacgatttgcggtggccaataaaatgcggcggattggccatctcgtaggtaagaggcctgtttcgctttgtggttatgcggtatcgcccggattgcacgcgacagcacacggagctggtgtggaatcctgaccggctgagctgctgcacctcggtcgccacctggggcaacagctgcaatagattaggttattttaatatataatttgtcctgtttgttgttatttaacacacctttttcaagaagttcattattttgcggcagaaacaattttgcgtccagcaacagctgattgacgtgacgtaacggttcgctagagatggacaaatttatagataagtattcgatattattattgtgtagtgaaaatattttctataaaataaaaaacaacattgaaggaagtagttaaataaaaacacagaaagattaatttttagttgtgtaaatgccctttttagttcttaaatgcaatacttggatctctattgcattgattaaaatcgatttttattttgttttaaagcggggcagagttgtcaacagttgtcggtgggaaaatgtaataatgtaatgtaataaaattattgcacgcttatttaaaatatataaataaacaacattttgagagcttccttaataaatagagttaactttgtattaatccctttattcgaaagaactttgactgatcattgaacttgggcagaactagctataaattagcttaatcggtagcactggagcgctgagcctgcgcgcttggaaaatggcttaaacgcaggccatctcaaacaaagatcgaggatctcagatcagaaggaactacctgttgaagcgaccgtgcaacaggactcatccagaagcaaagctgcaaaggtttattcccagaatccctggtatccgaatgcactaataggtgaggatacattcaaagtaatgacgctgaacgagagcgacgctactcgcctggagctgacgcgcaacttcctggaactgtctcgaaatccggaaacatgcaccgccctgcgcagctcggactgtatccagcttctggtgcagattctgcacgccaacgacgaaggcctctccacggcgaaaaagtacgccagccaggcgctgcacaacatcgtccacaataatccggaggagaaggagcgccagcgggaggtgaagatgctgcgcctgctggaccagatcctcgactactgtaactttctgcacacccagttgcagagcggcggtgaggctatcgcagatgatgaagatcgtcatccgctggcggctatgaagctcctgatgaaagccagtttcgacgaggagcaccgccagactatgtgcgaactgggagccctcaaggcgattcccaatttggtccaccttgatcatgcggtccatggaccggctgccggtagggaacagtgcaacgccctcaggagctacggcctcatggccctcacgaatctcaccttcggagacgagaacgtccataacaaatcgtatctgtgcggtcagcgacagttcatggaagtggtcattgctcaattgaacacggctccggatgaactgctacaggtgagtttaatcttggagattaagaaaaaaagatcgtaatttaattaccgttgatctcatcaggttcttgctggtgtgcttcgcaatctttcgtggcgcgcggacaaacacatgaagactatctttaacgagctgggtactgtgacctccttggctcgagcagccatgcaaaacaagaacgagaacactctcaaggccatactttcagccctttggaatctctcagcgcactgcagcaccaacaaggcggagttttgtgcagtagacggagcactggcatttttggtcggaatgcttagctacgagggtccgagtaaaactcttaagatcatcgaaaatgcaggcggcattcttcgaaatgtatcgagccatattgcggtgtgtgagccgtaccgacaaatcctaagacggtacaattgccttgccattctgttgcaacagttgaaatcggagagcctaaccgtggtaagcaactcctgcggaactctgtggaatctctcggcgcgctgtcccgaggaccagcaatacctcattgaccacaatgccatcccgctcttgcgggccctaatcagctccaagaactccatgattgcggagggcagtgcctcggctttgaaaaacctagttaatttcagggccactcaggagcttatgcccaatggagatggtgggtcactgccactagacaaggaagctggccatggaggtacgctgccacggagattcagctcactgcgcctaagctcaaatcccacgggatcgcttaagaaagtgcgaccctcaacagtcagcacaactggctttctgaacagaaaatgtgagagccgagagtccatttactcgggcaaatccgattccactaaatactcaaccaagtcggagggagcgaagaatcccttcgaaattgtgacacccactgaagagcagcccattgactactccatgaagtacatggagcacaaacccaatagcagtaagacctttgagatcgacttggatcagccaacggatttcagtgctagatataaggagagacgatccgctcagacggcacagccggagctgaagtcggagaccaatgagattagaagtaaggagttgcaactgacaaagtcctcctcggccacggagctgcgcaatagtcctggcctggtggcggtttcagcagctaagcagaaaattgccaccgaaacggagacggaaacggcagagcgaccaataaactactgtgaagaagggactcccggcagcttcagtcgcttcgactcgctcaacagcctcacagagaaaccggagaaatgtatgccgccaaaaactccaacgaaaactgcggttctcccggtgcacgttgacggaaatacgcctcaaaacatcgattccgcactagaaactccattaatgttttcgcgtcgcagctctatggactcattggttggcgacgacgaaacggttgcctgcgaggacaatggatccgtgatcagtgaatacagccggatgcagagtggtgttatttccccctcagagctgcccgattcacccacccagagtatgcctcaatctccgagaagggacagaaaagtgtccactcaaaataacttggacacacctgaacagaagcccagtactgtgtttgaggacaagttgaacagattccacgtggagcacacgcctgctgccttctcctgcgccaccagtctaagtaatctgagcatgatggacgactctaatgcaaacgctattcgaggacagcgtggaaatgacatcaacggcaatggggatgctcctcgcagctattgcacagaggacactactgccgtgctttccaaagcgccaagcaatagtgatctgtccattttgtccatcccgaatgatctaaatgcgaatgaagcgcagccagtgcctgctccgcgagctgatgttaccggaatggacactcggatgccggcagaagatgcaatctctaagatgcgctgcggtggcaatgcattgcccagttatctgccagtgtcggatgaaatgagcaagtactatgtcgaggacagtccctgcacgttttcggtcatctcgggactatcccatctcactgttggctctgctaaggctgggcctgttctgaagctgccaatgaggactgcagaagaggctcaggcacccaaacttcctcccagacgtagtgccgttcaaggagatgcggagccacgcttaccgccgaagaaaagcgactcactgagctcattgtccatggactcggatgacgactgtaatcttctaagtcaggtgagaaaaggatacttcattcaaaacacttgatatatttcaccatataaacattttgtgagagactcactcaaaaataagtgtctttgtagatttagcaatcggaatgttgatatttcacaaaagttaaatttaaaatgcagtcagaaaattctcgctaaaatcagaaatattaaagttgttccctctttttataggccattgctgcgggaagttgtcgacctcagcccagcggtgccagtaccagctccagcctggcgaacgctagtaccagcactctatgcagggaaaatgggcagtcaaagaagcaggtggagcatggcgataagccgaactacagctcagatgactcgctagacgacgacgacgatgatgcacggtccaagtcgctatttgagcagtgcattctgagcggcatgcataagtccaacgacgccttggagtcggagggtgagccgccggggcagcgccaggagatcagtgcccgggatcgatttgtcagtaaccaggtgcgccagattgagtccatgttggctgggcgtcagcactagaagcggatggttggttaattgagaagcgcatgcatttgtttagtggcttttaatcttgtctacgcaataatattctcacggtctcaattttcctatagttcagattaaaaatttgcacttaaatttaactctccaacacgtgtaatattatgtttaccctctcactaaacaattaaggaaactaaaaagggtgataagaaatgggatacagtcgcggtataaatataaataaaagttgcgatcaactgaggtccgggtaactcctaacatgatgctactgtgatgaactagctagagagctcagtagaaacgttttcgcgcgttgcgatccttgaagtaggagatggcgaagatggccactgcagccgccacgacaaccacgaagagaaggatgaagaagatcttggcgttggacattcccggcttgggatcttctttgtgctcgcgcgggggctcgaatgtcttggcattcggtatgatattggagcgccggataatctcatcgtgctgcgaacaagaaagaaagtaaaaagatggttattgcaacaagaaagtaaaactggttttcagtaatatgatataaatattataacacacggcttataaagataaacatgattaggcatcaaacaatgtgtttaaagccagctgcttaattattacaagttgcagcaattaaaaacaagttcactcttttttctttatacgtatacgcagttattgaaacttaagtccgcttttgggttccttgcactccttatcgcgttagccaaatagcagacagctgagtaatgcttacttcgcttccgaagtttggcaaacaaaagtgaacttacatttacgttcaagtccaggtcatagaacttgaaactgtgaatatcgtgattgtcggacagatcacccgtcgtcgcagacatgccgaagtggtagcccgtgggtagctcaacgttggccactacaaagcagttcttccattcgttgcggttctccagatctgtggaaaccgacagaatgtcgttttcgtatcgaatgctaaccagcgtctcgtactccacattgcggaaacgaacttcgcagccggccagctgagtgtgcgttccatcgcgatcgtggtcgtagctccagctgccattgttcaccatggcgctgagatatggatgttggtgctacaaatataatgttaatacatttacattcaatgccttgcgtaatgacatacgttgtgtggaccattgtgattgctataggtgtccagaatgatggccagtccggagaagtgatccttgctgccaaagaccggcccggtttgcatgcgctcctttgtgtaccaaatggcaaatccgtcgccgaacagttcagttcccttgccgtgcaccttaaagccaacgtgcacttcccaattgcgagtcatcacgggctttggattaaacattaaacatcaataactattgaactgcaaaaagtcgctgagagagaccaactctcctgcttaccgagtagttccaaagtgcaccgctcttggactgtaagtccggcgtcagtcttatatagttgctggtcaccatcgtgttacccaggaagtcccagtgtggcaggatcacgcctacgcctgcaatagagcccaagccatgttagagatacacgtacactccgtatcatcagtgaccaattaccaac

SEQ ID NO: 13259 - DNA, 4087 bp, DROSOPHILA
ggtagcactggagcgctgagcctgcgcgcttggaaaatggcttaaacgcaggccatctcaaacaaagatcgaggatctcagatcagaaggaactacctgttgaagcgaccgtgcaacaggactcatccagaagcaaagctgcaaaggtttattcccagaatccctggtatccgaatgcactaataggtgaggatacattcaaagtaatgacgctgaacgagagcgacgctactcgcctggagctgacgcgcaacttcctggaactgtctcgaaatccggaaacatgcaccgccctgcgcagctcggactgtatccagcttctggtgcagattctgcacgccaacgacgaaggcctctccacggcgaaaaagtacgccagccaggcgctgcacaacatcgtccacaataatccggaggagaaggagcgccagcgggaggtgaagatgctgcgcctgctggaccagatcctcgactactgtaactttctgcacacccagttgcagagcggcggtgaggctatcgcagatgatgaagatcgtcatccgctggcggctatgaagctcctgatgaaagccagtttcgacgaggagcaccgccagactatgtgcgaactgggagccctcaaggcgattcccaatttggtccaccttgatcatgcggtccatggaccggctgccggtagggaacagtgcaacgccctcaggagctacggcctcatggccctcacgaatctcaccttcggagacgagaacgtccataacaaatcgtatctgtgcggtcagcgacagttcatggaagtggtcattgctcaattgaacacggctccggatgaactgctacaggttcttgctggtgtgcttcgcaatctttcgtggcgcgcggacaaacacatgaagactatctttaacgagctgggtactgtgacctccttggctcgagcagccatgcaaaacaagaacgagaacactctcaaggccatactttcagccctttggaatctctcagcgcactgcagcaccaacaaggcggagttttgtgcagtagacggagcactggcatttttggtcggaatgcttagctacgagggtccgagtaaaactcttaagatcatcgaaaatgcaggcggcattcttcgaaatgtatcgagccatattgcggtgtgtgagccgtaccgacaaatcctaagacggtacaattgccttgccattctgttgcaacagttgaaatcggagagcctaaccgtggtaagcaactcctgcggaactctgtggaatctctcggcgcgctgtcccgaggaccagcaatacctcattgaccacaatgccatcccgctcttgcgggccctaatcagctccaagaactccatgattgcggagggcagtgcctcggctttgaaaaacctagttaatttcagggccactcaggagcttatgcccaatggagatggtgggtcactgccactagacaaggaagctggccatggaggtacgctgccacggagattcagctcactgcgcctaagctcaaatcccacgggatcgcttaagaaagtgcgaccctcaacagtcagcacaactggctttctgaacagaaaatgtgagagccgagagtccatttactcgggcaaatccgattccactaaatactcaaccaagtcggagggagcgaagaatcccttcgaaattgtgacacccactgaagagcagcccattgactactccatgaagtacatggagcacaaacccaatagcagtaagacctttgagatcgacttggatcagccaacggatttcagtgctagatataaggagagacgatccgctcagacggcacagccggagctgaagtcggagaccaatgagattagaagtaaggagttgcaactgacaaagtcctcctcggccacggagctgcgcaatagtcctggcctggtggcggtttcagcagctaagcagaaaattgccaccgaaacggagacggaaacggcagagcgaccaataaactactgtgaagaagggactcccggcagcttcagtcgcttcgactcgctcaacagcctcacagagaaaccggagaaatgtatgccgccaaaaactccaacgaaaactgcggttctcccggtgcacgttgacggaaatacgcctcaaaacatcgattccgcactagaaactccattaatgttttcgcgtcgcagctctatggactcattggttggcgacgacgaaacggttgcctgcgaggacaatggatccgtgatcagtgaatacagccggatgcagagtggtgttatttccccctcagagctgcccgattcacccacccagagtatgcctcaatctccgagaagggacagaaaagtgtccactcaaaataacttggacacacctgaacagaagcccagtactgtgtttgaggacaagttgaacagattccacgtggagcacacgcctgctgccttctcctgcgccaccagtctaagtaatctgagcatgatggacgactctaatgcaaacgctattcgaggacagcgtggaaatgacatcaacggcaatggggatgctcctcgcagctattgcacagaggacactactgccgtgctttccaaagcgccaagcaatagtgatctgtccattttgtccatcccgaatgatctaaatgcgaatgaagcgcagccagtgcctgctccgcgagctgatgttaccggaatggacactcggatgccggcagaagatgcaatctctaagatgcgctgcggtggcaatgcattgcccagttatctgccagtgtcggatgaaatgagcaagtactatgtcgaggacagtccctgcacgttttcggtcatctcgggactatcccatctcactgttggctctgctaaggctgggcctgttctgaagctgccaatgaggactgcagaagaggctcaggcacccaaacttcctcccagacgtagtgccgttcaaggagatgcggagccacgcttaccgccgaagaaaagcgactcactgagctcattgtccatggactcggatgacgactgtaatcttctaagtcaggccattgctgcgggaagttgtcgacctcagcccagcggtgccagtaccagctccagcctggcgaacgctagtaccagcactctatgcagggaaaatgggcagtcaaagaagcaggtggagcatggcgataagccgaactacagctcagatgactcgctagacgacgacgacgatgatgcacggtccaagtcgctatttgagcagtgcattctgagcggcatgcataagtccaacgacgccttggagtcggagggtgagccgccggggcagcgccaggagatcagtgcccgggatcgatttgtcagtaaccaggtgcgccagattgagtccatgttggctgggcgtcagcactagaagcggatggttggttaattgagaagcgcatgcatttgtttagtggcttttaatcttgtctacgcaataatattctcacggtctcaattttcctatagttcagattaaaaatttgcacttaaatttaactctccaacacgtgtaatattatgtttaccctctcactaaacaattaaggaaactaaaaagggtgataagaaatgggatacagtcgcggtataaatataaataaaagttgcgatcaactgaggtccgggtaactcctaacatgatgctactgtgatgaactagctagagagctcagtagaaacgttttcgcgcgttgcgatccttgaagtaggagatggcgaagatggccactgcagccgccacgacaaccacgaagagaaggatgaagaagatcttggcgttggacattcccggcttgggatcttctttgtgctcgcgcgggggctcgaatgtcttggcattcggtatgatattggagcgccggataatctcatcgtgctgcgaacaagaaagaaagtaaaaagatggttattgcaacaagaaagtaaaactggttttcagtaatatgatataaatattataacacacggcttataaagataaacatgattaggcatcaaacaatgtgtttaaagccagctgcttaattattacaagttgcagcaatt

SEQ ID NO: 13260 - protein, 1067 aa, DROSOPHILA
MTLNESDATRLELTRNFLELSRNPETCTALRSSDCIQLLVQILHANDEGLSTAKKYASQALHNIVHNNPEEKERQREVKMLRLLDQILDYCNFLHTQLQSGGEAIADDEDRHPLAAMKLLMKASFDEEHRQTMCELGALKAIPNLVHLDHAVHGPAAGREQCNALRSYGLMALTNLTFGDENVHNKSYLCGQRQFMEVVIAQLNTAPDELLQVLAGVLRNLSWRADKHMKTIFNELGTVTSLARAAMQNKNENTLKAILSALWNLSAHCSTNKAEFCAVDGALAFLVGMLSYEGPSKTLKIIENAGGILRNVSSHIAVCEPYRQILRRYNCLAILLQQLKSESLTVVSNSCGTLWNLSARCPEDQQYLIDHNAIPLLRALISSKNSMIAEGSASALKNLVNFRATQELMPNGDGGSLPLDKEAGHGGTLPRRFSSLRLSSNPTGSLKKVRPSTVSTTGFLNRKCESRESIYSGKSDSTKYSTKSEGAKNPFEIVTPTEEQPIDYSMKYMEHKPNSSKTFEIDLDQPTDFSARYKERRSAQTAQPELKSETNEIRSKELQLTKSSSATELRNSPGLVAVSAAKQKIATETETETAERPINYCEEGTPGSFSRFDSLNSLTEKPEKCMPPKTPTKTAVLPVHVDGNTPQNIDSALETPLMFSRRSSMDSLVGDDETVACEDNGSVISEYSRMQSGVISPSELPDSPTQSMPQSPRRDRKVSTQNNLDTPEQKPSTVFEDKLNRFHVEHTPAAFSCATSLSNLSMMDDSNANAIRGQRGNDINGNGDAPRSYCTEDTTAVLSKAPSNSDLSILSIPNDLNANEAQPVPAPRADVTGMDTRMPAEDAISKMRCGGNALPSYLPVSDEMSKYYVEDSPCTFSVISGLSHLTVGSAKAGPVLKLPMRTAEEAQAPKLPPRRSAVQGDAEPRLPPKKSDSLSSLSMDSDDDCNLLSQAIAAGSCRPQPSGASTSSSLANASTSTLCRENGQSKKQVEHGDKPNYSSDDSLDDDDDDARSKSLFEQCILSGMHKSNDALESEGEPPGQRQEISARDRFVSNQVRQIESMLAGRQH

SEQ ID NO: 13261 - DNA, 4938 bp, DROSOPHILA
gggccttgactgcggatgatcgcaatttgctgatttcgcgactgcagcaagtcatcagcgacggtactcaaactcatatcatccatccaatggtcggtcggtcggtcggtcggtcctccgatctcgtgtccccagctaatgaagaccgacggacggattagttatggccttatgataaattggtctgatccaattgtctggtcgtttgggcagtcatcgaattagtgacaacatcggatagcagcaacaactttcgccacagatctcaatcagtggcgtactgattaaatgaaatttaatgacccatgattgccaccttggtttcttctcgcactgagtgattcttgagtgagtgggttttcttttttttttttctggtagaggttatcgtcgaggtattgattgatcgtctgtttgattaggtcatccggcttaggatataggtcatttattttggttacagcggatgactatatcaggtagacaagtcggatatcatataaatatcacagaataatcaaaatacttctatgtgaggtataaattaaatgatttaattatgatgacatagtttgtgctataaaatatgtaacttataaaacaaaaacccatatttaacataatctcgtaaaatgccaaaggtagacagtaaaaactcctttgaggatatatcattacagcaccccaaatgaaaaaagggtttccctccaaccttggacacattatctggttaaacttattaacccctgggccgcaaaactttaattagttaaccctgtgcccgctggaaactcggaatgcgagtaaatcaggttgatgagtgactgactgactggctggctgactaaccgacagtccgttggctaccggttcacggagttcggacaactttaattagatctgcatatgcaatgaggactcgagggttcgttccggtaaacaggttaacgaactgccggaacggacaagtggccaacagtttgcgtttggcggcgaaaggatgcgctgtctgtggattctgattgtggctttcatatccctggcgatggccacctcaattcccattcccattgccaacccagcaccactcagtggatatgagatgcaactgaaaatattgctacagaaaatcctgtgggtggccaatgtgaagagatgctttgccgtcattacggatgatctgcattatcccatatacgatcgaatatttttcgaatcggtgggtcgacgagtgatacccttctttgtgatgcgaactaatgaaagtgatgatctacagcgaccttccagacaagttgaactctttgttaaggccatcaaatccagtgattgtgaactaaatgtgatcaccatactgaatggctggcaggtccaacgatttcttggctatatatacgataacagatctttgaatatgcagaaaaagtttgtattattacatgatttgcgactttttgagagcgatatgattcacctatggagcgtttttatcgatgccattttcctcaaaaggcagctggacaacaagtgtgtgaactaaacaaaatccccttaattattgttattaaatttggttattatttttaaaaaggtataccatttctaccatagcctttccgggcattttaagtggcgttttggtaatgaaaaatattgctaattgggagttgggaaaaggtctgaatggaaggattctatttgcggacaaaacaagcaacttattcggtgagttacagttaaatattatttaatattacttaaataagtgattttatatatgacattttcttaattttatttaaaatattattaacttttctaggaacctctttgccagttgccatttccgagcacgtgcccatggttctatgggcaaatgcaaccaagagcttccaaggagtcgaggttgagattatgaatgccctgggcaaggcacttaatttcaagcccgtttactacaagcccaatcaaacggagaatatggactggacggagctggatggtggtgctagtgttgcctatggaagtggtaatccggatggatatgcacagaatgggacacacattgactcgatgcttgtggatgaggtggtaagtggggattaaaatgagcccttcgaatgtgattaggatatgtcattagccaaactgttgacttattaatatttcaatctgaacaggctgcgcacagtgcccgctttgccattggggatttgcatctgttccaggtgtaccttaaattagtggagctaagtgcgccgcataatttcgaatgcctgacctttctcacaccggaatcgtcgacggataactcctggcagacctttatcctgcccttcagcgctggaatgtgggtgggggtgctgctctcccttttcgtggtgggcactgttttctatgccatcagttttttgaatgccattatcaacggcaatgtgtcctctgagttttttcgttgcctacgaccaaatcgcaacgtgcccatggatccaaagatctatcgtcgcattagttttcgcattgccatcagtcggtatcgttcatctaaaggagatcgaatgcctcgcgatcttttcgatggctataccaactgcatcctgctcacgtatagtatgctcctatatgtggccctaccccgaatgcctcgaaattggcccctgagggtactcactggttggtactggatctactgcatcctcttggtggccacatatagggccagcttcactgccattttggccaatccagctgccaggtaagcttatcatccttttatcatatttgtatcttgagaaagttatttattattgatcatagggtcactatagacacactggaggatctgctgcgatctcatataccgccatccaccggggcaactgagaatagacagtttttcctggaggccaatgatgaggttgctcgaaaagttggcgaaaagatggaggtgttcggctacagcgatgatttggtaagacttaaatactctaattattcataagactaattagaccattcaatttcgatttgaaccgtttagaattagggaaaaatcgtataaacttgcatgatttataaccgctcttgttatcaacattttgtagcaatgaactttataccaccagatagaaaaacaaaaaccagtttcaacttgtttccaacgaaaaatatcttatctatgtgataagcgtatttggcaacatttttaatttaacggtattaattcatcaagttggcaaaataatctagtgtgatatgaaaagcattccggcgacttaatggctttgtggggataacattgttttgcatttgaaacgcgttcggaaagagggtcatggctatttggttttagtagtatatataatatataatttaaatttttaaatattatttattttcgtagacctctcgcatagccaagggacagtgcgcctactacgacaacgagttctatctgcgctacttacgagtggcagacgaatccggatcagctctccacatcatgaaggaatgtgtcctctatatgcccgtagtgctggccatggagaagaactcggctctgaagccacgggtagatgcctccattcaacatctggcggagggtggtcagcattcagtatttaaatcctgactgaatctcatttatcatttgacatcttccacaggtctgatagccaagtggctcaaggatgccatagagcatctaccggcggaggcacttgctcaacaggaggccctaatgaatattcaaaaattctggagctcttttgtggccttgctgattggttacgtaatctcaatgcttacactgctcgctgaaagatggcatttcaagcacatagttatgaaacatcccatgtatgatgtgtacaacccaagcttgtattataattttaagcgaatatatccgcagcattaatgtcaaggtttctgcctagaaatatatatatttttttttgcacatcacttagaaaacattccattcaattcaatcgccctaagtacataatctcaagtactgcaagttgtcaatcgagcacaacattccataaagtaatgatatatgcacacacatgcccaatatttataattggtgggcagcaaatgacaaatgtatctgggtacttgagtaccggaatggcaattgagaaactgaaaagtcttcattgacgtactgagaagaaatgtaaggggccttggcaaatgcgatcgatgaatatagtgccatttatcacgaggagccaagtggcctcaagtatcagtggcaatgtggtgaataaattcaagagtttcaagcgattccttcaatcacttttcgtaaatactgatttgcattgtttatgagttaatgcacattaggcattatttgtttatggccatatcacaaatccctgggaaagttgaaatgataaaagcccataaataaagccatttttaagtgccagactaaaccccaaaaacacaaaaattctatataaaaaccgaaaatcccctcgagaatccccgcgagaattgggagctcacgggcacttcaaaacatttttgaatggaaacggaaattaaaattcgaaattttcatgtgatgaggtagccagccagaaaccagacgtgctaagtaatgcacaatccaaaggttaataacaatcataataattaataggcttttgcttggccatctctttagaagtttttcatatctcgttttttcctcgtttttgaggtgaggcaatagaaaatttcttgtatcgaggaactggcttatttatctacgaaattaacaaatcactctggccattttgtctaataatattttataactcttaaagttgttgctgaaatctgtttaaaaattcaacaaaaagtgtaagttttgtaaagcccttacagtttatcctaattgatttaattacaaaatcatttattttcctgtttttcttt

SEQ ID NO: 13262 - DNA, 1863 bp, DROSOPHILA
atgcgctgtctgtggattctgattgtggctttcatatccctggcgatggccacctcaattcccattcccattgccaacccagcaccactcagtggatatgagatgcaactgaaaatattgctacagaaaatcctgtgggtggccaatgtgaagagatgctttgccgtcattacggatgatctgcattatcccatatacgatcgaatatttttcgaatcggtgggtcgacgagtgatacccttctttgtgatgcgaactaatgaaagtgatgatctacagcgaccttccagacaagttgaactctttgttaaggccatcaaatccagtgattcctttccgggcattttaagtggcgttttggtaatgaaaaatattgctaattgggagttgggaaaaggtctgaatggaaggattctatttgcggacaaaacaagcaacttattcggaacctctttgccagttgccatttccgagcacgtgcccatggttctatgggcaaatgcaaccaagagcttccaaggagtcgaggttgagattatgaatgccctgggcaaggcacttaatttcaagcccgtttactacaagcccaatcaaacggagaatatggactggacggagctggatggtggtgctagtgttgcctatggaagtggtaatccggatggatatgcacagaatgggacacacattgactcgatgcttgtggatgaggtggctgcgcacagtgcccgctttgccattggggatttgcatctgttccaggtgtaccttaaattagtggagctaagtgcgccgcataatttcgaatgcctgacctttctcacaccggaatcgtcgacggataactcctggcagacctttatcctgcccttcagcgctggaatgtgggtgggggtgctgctctcccttttcgtggtgggcactgttttctatgccatcagttttttgaatgccattatcaacggcaatgtgtcctctgagttttttcgttgcctacgaccaaatcgcaacgtgcccatggatccaaagatctatcgtcgcattagttttcgcattgccatcagtcggtatcgttcatctaaaggagatcgaatgcctcgcgatcttttcgatggctataccaactgcatcctgctcacgtatagtatgctcctatatgtggccctaccccgaatgcctcgaaattggcccctgagggtactcactggttggtactggatctactgcatcctcttggtggccacatatagggccagcttcactgccattttggccaatccagctgccagggtcactatagacacactggaggatctgctgcgatctcatataccgccatccaccggggcaactgagaatagacagtttttcctggaggccaatgatgaggttgctcgaaaagttggcgaaaagatggaggtgttcggctacagcgatgatttgacctctcgcatagccaagggacagtgcgcctactacgacaacgagttctatctgcgctacttacgagtggcagacgaatccggatcagctctccacatcatgaaggaatgtgtcctctatatgcccgtagtgctggccatggagaagaactcggctctgaagccacgggtagatgcctccattcaacatctggcggagggtggtctgatagccaagtggctcaaggatgccatagagcatctaccggcggaggcacttgctcaacaggaggccctaatgaatattcaaaaattctggagctcttttgtggccttgctgattggttacgtaatctcaatgcttacactgctcgctgaaagatggcatttcaagcacatagttatgaaacatcccatcattaatgtcaaggtttctgcctag

SEQ ID NO: 13263 - protein, 620 aa, DROSOPHILA
MRCLWILIVAFISLAMATSIPIPIANPAPLSGYEMQLKILLQKILWVANVKRCFAVITDDLHYPIYDRIFFESVGRRVIPFFVMRTNESDDLQRPSRQVELFVKAIKSSDSFPGILSGVLVMKNIANWELGKGLNGRILFADKTSNLFGTSLPVAISEHVPMVLWANATKSFQGVEVEIMNALGKALNFKPVYYKPNQTENMDWTELDGGASVAYGSGNPDGYAQNGTHIDSMLVDEVAAHSARFAIGDLHLFQVYLKLVELSAPHNFECLTFLTPESSTDNSWQTFILPFSAGMWVGVLLSLFVVGTVFYAISFLNAIINGNVSSEFFRCLRPNRNVPMDPKIYRRISFRIAISRYRSSKGDRMPRDLFDGYTNCILLTYSMLLYVALPRMPRNWPLRVLTGWYWIYCILLVATYRASFTAILANPAARVTIDTLEDLLRSHIPPSTGATENRQFFLEANDEVARKVGEKMEVFGYSDDLTSRIAKGQCAYYDNEFYLRYLRVADESGSALHIMKECVLYMPVVLAMEKNSALKPRVDASIQHLAEGGLIAKWLKDAIEHLPAEALAQQEALMNIQKFWSSFVALLIGYVISMLTLLAERWHFKHIVMKHPIINVKVSA

SEQ ID NO: 13264 - DNA, 24419 bp, DROSOPHILA
gagattactgtgcacacacaagtgctaagtagaccataaacccagagtcatgcctactactagctggctgtaatctccggttagattctccgcgccaccggcagcgattgctgtgccatgtgaagctccggctgttgcaatggacgccacttacctgcggtcggctggacaatcagcgagtctcgcggcggcggtttctgctgcgggccgctgccctccggatcggcgcctccaaagtactggttaatattgtcctcaaactcgttctgcatttagaaaatgaaaaaaaaaaaaaacaagttcatctttagtggcgcagatagttcctcacatcgaatttctcaagttttgcttacccgcacaaagcgcaggttctggtcgcgaaaattgtcgttgccctcaatgaaattggaacgacgcgacattttgctgcacgatttcaattgccagttacgagttaatccaatgcaaatgctatttttgcgctgagcgacgagcgaaaaacgcaaattttatttgccagaatggagctgtcaactcgattgaaatgaaaactaatgtgacagtgtgaacgccggtggaaaaacatttaatgccatgcgataggctaaaaatactagataggcgttttccctgtacagggtgctcattaataaaaagtaaatgacaagaattttcgagaataattgctatgaatttctatatgaaactttaaaagcttaatccaaatttaagaaattcatttgtatttttgctgttgcaaatgcaattgatttctacttgcttctactaagttttccaagcaaatgtattttaataatttatgtacaaaaattacaagtttcacttaaatcaatataaacaattaaaataacacgcagtgcagaattatacactcattttccatccgacacccactgtgcccgcgaaataccagaaaaatactagcaatcaacttcccactgtcacgattagcggttgttgtagttgtgcggcttgggaaggaacagctgttggcccgaaaatatagatccgtttatttccttgccgctttacagttaccacatcgcccgatatagcatacgcatatagcccaattgcacgtggaggaggttgccgagcagtcgagtaaccatggcggatgacactagttcgccgatggacagattctgcggatccacgttctgggtgagtgcatcagcagtggtgttcaatccgaatgcatagtgtaaatgtatggtttccgtgtgtccaacgaacagaacgcaacagagacatggtataccaacgatccggactttacgccctgctttgagcaaacggcgctggtctggacaccctgcgccttctactgggcgttcgtgatctttgacttttactacctgaaggcgagtttggacaggaatataccgtggaacaagctgaacgtgagcaaagctctggtgaatctgggtctgctggtaatcactgccctggacctaattatggcgctggtcaagaagggcggcgactctgagctgccgctctacgacctggatgtttggggtcccatcatcaagttcgccaccttcctgttgctcttcatattcatcccgctgaatcgaaagtatggcgtgcagaccacgggatgtcagttcatcttctggttcctgctcactgtgctgtcgattccccgctgccgcactgaagttcgactggacgcggagcgccagaagattctgaattcgcaacagccatccgagcaggacttttcctgggaggagtatcagttcgttagcttctttatcttcttcaccttcaccagcattatgctgatcctgaactgcttcgcggacggaatgcccagacaaaccaagtaccagaggggtgagaacgagattcccgaactgtcagccagtttcctttcccgcatcacctatcagtggttcgacaaaatggccctcaagggctatcgcaacccgctggaggagaaggatctgtgggacctgaggccgcaggacagctgctccgaggtcatgcccatcttcgcccaccactggaaccagaacgtgcgcaagaactacaagaacaaggcgcgcgtagaacccaaggcgcagtttagcaatggcaacgtgacctttgagaatccccacggtgagaagaatggccgcaagaagggcatggccagtattatgccgccaatttacaagtccttcggaggcgtctttctgttcggcgccctaatgaagctgttcaccgacaccctgacatttgcccagccccaagtcctgagtttgatcatcagcttcgtcgaggcccaagatgccgagcccgaatggaagggtatcttatacgctgtcctgcttttcgttttggccgctgcacagacctttattctggggcaatatttccaccgaatgttcattgtgggcctgcgaatcaggacagctttgatcaatgccatctaccgcaaggccctgcgcatttcgaactccaccaaaaaggagtccaccgtgggcgagatcgtcaacctgatggccgtggatgcccagcgattcatggaactgacaacctacttaaacatgatctggtcggcgccactgcagatcggtctagccctgtatttcctttggcagcaactgggaccgtctgtgctggccggtttggctgtgatgattatcctgatccctgtgaacggagtgattgccagtcgcatcaagacctatcagatcagacagatgaagtacaaagatgagcgtgttaagttgatgaacgaagtactgagtggcattaaggtgagtggcactaggactagggattaggtagaagcctaatctcttaagtataacaattatcctctgtcatgctgactgctgtcagaagtcgatgctatgtcgattctatgctaaccgtttttataatccacataggtgctcaaattgtacgcctgggaaccgagtttcgagaagcaagtgctggacatccgtgacaaggagattgcgacgctgcgctccactgcctacttgaacgcgggcacttcgttcttgtggtcctgtgcaccgttcctggtaagatatgccagccctgcagggctctgagtcctccgagatttctttacagctgactgagatgagttggacgtgtagcattggactaatctggcaaatatatgtacttcgtgtccgaacaaacaaaggtttccttggtcacgttcgccacttacgtgctaaccagcgaggcgaatcagctgagcgtcgagaaggtgttagtctcaatcgccctcttcgacctcatgaaactcccgctgaccatcctgcccatgctgagtgttgacatagccgaggtacagctcccgcgatggcgatggattaacaacctcttcggctatggtgcacctctccgcctctcctatatccatcaacttcagatcaaggatcaagaacgaacattttatcaacgccttaaacgaaattgtgtattatcttttaggtttcattagttacattcgccacttacgttttaattgatgaaaataacgtgcttgatgccaccaaaacctttgtctcattatcattattcaacattctacgatttccgctaacaatgttgcccatgctgatcaccaacctggtgcaagtaagttacgcccgattgcaataccaattactaccactctagtcgatcacagtgtggctgagggattccactttccttataacttttgccgatccccggcgccactgtgatcgtcgattttgtgccgttttgtgattgtgatttatgtttatttacttaatttgaattcttttttagccaaatcgaatttacaccgaaatgtattcccctaaccaaagatcctcccccctaccctgcattaaatccttacactcatttataccgaaattgtatgctcatcgtcacaatcgtgtgggattgaaagttgtccgaaccaaaccagttccgaatggtcatatatctggtggttgggtacccatttcatccgtttcaatagcaaccatttgtttggatctcgaatatgcgcttgcagagggcatttaagggggatttaattaaagatataacgatgttatggaaatttgtctgaaagaaaaatgtgaaaatgtgaaatgcaagttggttgcagacatattatagggcacttttaaatatgatacaaaatccctttttagagttagtcatattaactcttcgcatatggcaattccttgcccatctgcaggggtatataaaatcctcggaatagccgagtatattccatattcattcagatttggattgatgcatttttccacatatccacattatcttccctttctttgcccaaacctattactaacatattttgtgtatgaaaatttacctatttggcgaaacaattttaactgatatcccatattgcatgtgcgaacgaatagacgcaagtttccgtgaatcgtatcaataagttcctgaacagtgaggaactggatcccaacagcgttctccacgattcctctaaacgtaagaaaattcaagaagtttgtaaagatcttgaagttaaaatatatcccttatacatacagcccatccaatgagcattgagaacggcgagttctcgtggggtgatgagatcacgctgcgcaacattaacatcgaggtgaagaagggcagcctggtggccctggttggcacggtcggttccggcaagtcgtctgtagtgcaggcattcctcggtgaaatggaaaaacttgcgggcgttgtcaacactgtgggcaagttggcctatgtaccgcagcaggcgtggattcagaatgcgacggtgagggacaacatcctcttcgggcagacctacgaccgaaagcgctacaacaaggtgatcgacgcctgtgccctgcgtgccgatatcgacatcctgtcagccggagatctcacggaaatcggtgagaaaggcattaatttatcaggtggccaaaagcagcgcatctcgttggctcgtgctgtgtacagtgatgccgatctgtatctgctggatgatcctctcagcgcagtggacgcccatgtgggaaagcacatcttcgaggaggttatcggacccaagggtatattggcacgaaaatcccgcgtgctggtcacccatggtgtgactttcctgccccaggtggacagcatctatgtgataaagatgggcgagatcagcgagagcggcacattcgatcaattggtcaagaacaaaggcgcctttgccgacttcattatccagcatctgcaggagggcaatgaagaggaggaggagcttaatcagatcaagcgccagatctctagcaccgcagatgtccctgagctgttgggcactgtcgaaaaggccattaagttggcgcgcacggaaagcttgtccgattccatgtaagtacatctttataaaggactttaaagtaatcatttgactaaataaatgaactttattttttagctccgttacatccgctgatagtttaatgggcggaggaggaagtcttcgccggcgaactaagcgacaggactcccacgattccgttgcctcagccgcttccctgaaaaagaagcaggaggtcgagggcaagctgattgaaactgagaaatcgcaaaccggtggcgtggagttcgcagtgtataagcattatatcaagagcgttggcatttttctatcggttgccacattggtactcaactttgtattccaagctttccaaatcggctcgaatctgtggctcactcagtgggctaacgatcaaaatgtcgccaacgacactggcctcagggacatgtatctgggtgtttatggtgccttcggatttggccaaggtaagtccattgtgattcgatttacttttgaaattcttcgtttgaagttattcttctttcatgttcgttttgtccatttggttgttttattttaagtttgtttcgttataattttatacttttaactgtattgcatgagttttgctgctttattttgccctttatgtttatgttttttagtttgcatttttgtttccgcttcatttgtaagaaaaatggtttcaaaattttaaaacaaattgtatgaggtaatacgaagagctttaacttataaagaactttaaaacgattagtatcaaatgttttcaagctttgaaaccatattttctacatatttttaatgtattctatgtttggttggggtttttcatttatgttttgcttacctaattgctttcttactttggcgccaagagaacacatgctgctcagcttccagtaggcggtttgaataacattcagtcccgattagaatacctaactagctaacactttcttcggctttatacacaaaatttaagaaaatgcacacatatcctaaagcactaacaacaactcaaaacaaattagattttatattgctgcacgcttggcaaactgaacacaaaaggcttttcatattaataactgctattaatattactaccacacaaaaatgttttgaaaatcgatttttggttatcgatctatttagattgatataatcgtatatcagaacattgtagtccgatcactatactaacagttctccttttgtgtgtgtatgtttgtgtgcgtaaatgtgttgcatagtaaataatattattcaccaataatattgtgaataccttccgaccctacctaaacaaaaaactaaaatgatcgaaaaaatcgaaacaaaaatcgattaaatatcgaattctagtcgcgacgaacttcttctcatccctcgccatctcattgggttgtctcaagtgctcgcagttgttacatcagaccctactatactacaatctccgctggccaatggaactcttcgacacgacaccactgggaaggattgtcaatcgcttctcgaaagatatcgatacaatcgataatgtgctgccattcaacattcgtgtcgtcattggtcaggcatatatggtaattgattggagttgatccatgcacggcaatatttaatctatctggaatatcggatcattctgtaaatcatggacaggcttggcttatcatgcactaccatacaaaactaatattaaccaaacccgtaataatcttccttcgtgctctttattttaatgaaattacattttttgaattgcgttgatttttttatcatataaataattaataatgatttaatagttatttaatgtatgagtttgttaaaataagagcacgtctgaatatacttcgtcggtggacaagaggttctggtaactaatcggtatacccgtgttgtcgctctcttcgaagttgttacagggtatctatccaccctgatcctttcattgggctgcgtttatagcgcccgctacatgcacaacgtgctgctccatggcactttgcgttggcccatggaaatgttcgacatcacacctctgggtcgcattgtcaaccgtttttccaaggacgtagatacaattgacaatacactgccactcaatttgcgggtcgtcattttgcaattgtttgcggtaattattcccaaaaaaaaaagtatatgtccgatacaaatcgccatcgcccatactcagatgcatctgagttctgagtacagctcttctctgtaggttgtcaaagctttttagaatgttttgtccacgcttttgcctagaaaatcaatttaaattaaatcgaaaaaaaaaaaatacagtataattcgcttagctgcctcgagtactttgcacaatgcctcgatgcaggtaacttaaaaatgcagctaacttaatttttttttttctattttctattttctattcacacaaaaaaatggaaaaataatgcagatatcttgccgatgcagctaactatcgatgcagctaagcgaattatactgtacatttataatttaaccttccagttacctcgtacttcttttgctctctcacgctggccctcggatgcatcttctgctccaaggtgctgcacgagacgctcctgtcatatgtattccgatggcccatggaactgttcgataccacgcccctcggccgcgttgtcaatcgcttctcaaaggacgtcgataccatcgacaatgtcctgccgatgctttggcgcatggtcatcagtcaagcgtttgcggtaaatgtctattaaggagcgcgtttcgaagctgcaaaagttttatatcctcatttctttcataaaaacaaaaaaattgcattagttccacggacagattttcaaattggctgattagtgcaattaaaaatatgaatcttttctaaacttattgtaagaaacgctccgtgcacgaatctgaatctcacgctttttgttagatacggttgaaggaaatcctagggtatgtgatagtttgttgcacaaaccctttcccttagaatatatcgatgatacacacactaactggtttcaattggcacaatcccaatggaaaatcctatcctaatgctatgtggcactaacttcaacgatatatgttgtgtatttatatgtaaatatgaacactaacctgtttaaggtggcttacacaaacaatgtttagcagcatgatcagttgaatcttaagttctgtttagaaagttagtttctccctaaatcccaaatgtaatgcatagcatctaaaccgatttacgttacatgcagtgctatccaaatatttatcgggcctcgccttggccatcggaggactccattgctcaatgaatgtattcaacaagctgctgaacacaggcctcaagtggccaatggaactgttcgatacaacgccattaggtcgcattctgagtcggtactcgaaagatgtcgatacggttgacagtgtactgcccgcgataaccgtgcagttgttgaacacatgtttcggggtaaagattgacccttaaccttcagcctccactgcctgattctaatggaagtgggagatgcttagcttccaaccctgaaacctaacaaaagctgcataccactaactatgaaaactgcacgattcttttaatttactaattatatttcaacctgcattctatttaattccttgcaacatctttaattctcactttatgccattctttcccaaagcatttcactatcaaacaaactatcataaaccctacccttcttcaccatttaagccttatactagatttcattagtgccttgcaagatattttgccttttattttggatcaaaagcgcctttacttattattctattcatattaattagaaagcccatattttggatgtgcgagttgtgtgtgcgcgacagcccgaaaggggaactcaaactacttaagcttaagcccattcttaatcagggggcagggtcaccaaaaaaaaaacactctgcagatgtactggtctcagagccctaagtgttaaggtttatttataagtgggagctgccattatgcttaggttgaacggccagttagctaaatgatatttgtaaaagatcgcctcattccgtcattcgaatatcgagtatcccagacattcaccgagtgctcacgtgtgcacacctgttccgctcttccatatttccgattgtcccaggtgtgctagcctactttgcggtggtcatcgtctacctgggcggcttccaggcggcaaagaccattcacaatgagctactggccgtcataatccgaggctccgtgtgccgcttcttcgacatcactccgatcgggcgactcttgaacagcttcagtggcgacatggatgttgtcgacgaagagttgcccgccaccatggactcctttatgacctttatctttatggtatttgcataattgatttcgctcattttttcagtatattttttctttttcaaaaatacaattcgatcgccgacgtgtgaagacgtttttatcgtgctccgcacaaaatcggttgttttgagtgaagtgaacgccaaataaaataaactaaataaaaaatctgaaagcgaaagagacgctctatgcgatgcaagatcgcttaaatacatagtgaattgttatcttaaataataaaactatgagtcagaatgacactcgcgcccagcgtcagcgcgagcatgacgaacgccgactctcaattcagcgcaacaacgcgtacttctcctacgtctcaccgacaatcccaaacgcagacatcgagcggtcaataacccatagcccaggaaaccttcttctaccaacaaatcaagaaagagcccgctcctgctctcccgctctattggctccgacagaagccccgctacctccaacaacaacagctggagagggaccggcagcccgctctgcctcgtcatcggctgcacccgctcacgggctgactaagtcagcgaaagcaaaaccgctagcaataaacggtactgctgcactgccagcaaaacaaaacgaaaacgtaaacaaaaaagctgggtcgacctggcagactggaatggaccgctacattacaataaagcgaaagctcagcccagaaaattcagatttgggaaacaagccgaaaaatacaccgcgaataactctaccttgatcaaaaatgtagcccctgcaaatccaacagatttgccttgctggtagataccgctgaggaccgtgccgctgggatccgttaatatcgaaccgaagaaaacaaagcctcccgcccaatatacatccgcgagaagagcacaagccgtcttgtaaatactttgattggccttattgggaaagatagctttatataactcccctcgtaagaggtactatcaacgaaatcaaacttcagacgaaaacggaggacgactacagaaaagtcacaaactattttaccgcacaaaaaataggcttctacacctaccagcttaaaagcagcaagggcctgcaagtagtcctgaagggcattgagtctgatgttacgcccgaagagataactgaggcgctaaaggaaaagggattttacgccaaaaacgtgttcaatatcaaaaacagaaacaggcagccccaaccactcttcaagattgagcttgaaccagaaaacaagcctcctagaaaaaacgaggttcacccaatttacaaactccagctccttttgcaccgtaggatcacggtagaagagcctgcacaaacgcaacgctcctgtacaatgtacaaactgccaagagtatggccacacgaggtcatattgtacacttcgcccggtgtgcgtagtctggggagatctccacgactccaaacagtgtcaaattaacaaagaaaatgcatgcgagaaaaaatgtaataacctgcgggggcaatcacacagcaaactacagaggctgtccaatctacaaagagctgaaaatccgtcttcacaaaagaatgaacaccggcgcgggcacaccaaggatcaagctccctgataccatcagagacaaatcctgaagtaattttctcgaaagcagctagtttcgctccctggcctacattcaacactaacaagacaacatttgctaacgttttaaaatcaggtatgacgccttcaacccaaaactcccgaactccacatgaagtgcacacaaaattagacacacaacaaaactatcaccccagctgcgcagcaggaaacaaaaactgaagctatgatgcaagccttacaacagagcatgatggaatttatgacatttatgaagaccaccattcaagacatgatgcgtaatcaaaaccttttgatacaaatgcttgtagcccaacaatcaaataaataatggctaccttacgcatagctacgtggaacgccaatgggcgtctcacagcgcaaacttgagctagctcaattcctacatgagaagcatattcgacggtaatgcttctttcggaaactcatctcacaagcaaatacaattttcaaataagagactccatttctacggtacaaatcatcccgcggaaaagcacacggtggaccgcccatactcataaggaaccgatgaagcaccactttacaaagaatttgcggaaaatcatcttcaggcccatctatcaacattcagctggatgacaacactctccttacactagcggccgtatactgcccccccccgtttacagtattagaagctcaattcctggatttcttccaagcactagggccacacttcattgcagcaggcgactacaacgctaacatactcacttggggatcgcgacttgtgaacccaaaaggaaaacagctttataagacgataataaaagccactaataaacttgaccatgtttcccccgggagtcctacatactgggccatcagacctcaataagctgccagacctgatcgacttcgcagttaccgaaaaatatttcccgcagtttggttaaagctgaatgtctgccggatctctcatctgatcactcgcctgtactaattcacctccgccgatacgcagaaaacgtgaaaccaccaaccagattgacctctagcaaaacaaactggctaggtataaaaaatatataagttcacatattgagctaagcccaaaactcaatactgaatctgatatagagagctgcaccgtgtgcattgcaatccatccttactgcagcagctcttactgcaacacccaaaataacaaataatacaattaattcaaagaagaccaacgtacaaatcgagcaactcggtccacgtaaaacgtcgcttcgcagagaatggaatcttccagatccccaactgcaaacaaaagctaaaagtagcccacggaaactggccaacggctctgaaacaagaagaggacgacgatcagcgccgatacatagagcaactcacaccaacaggcacaaaacaaaagtcactgtggcgagcccactcaactcttcgcccaccgactgaaacccgttttgccgataaggaattcatcaggggctgggcccgtagtgatgaagacagagccaacacatttgccggctcacctacaaaatgtgttcacggccaaaccaggctactagcacattcgcgctaccgtcctatcccgtaaaccgccatcagcaacacaccccaatttgtgtttcgtcctaaagaaataactaaaataatcaaagacaatctcaacccgaaaaaatcccccggctacgaccttatacaccggaaatgatcatccaggctgccacattctgcagttcgctacataaccaagctctttaatgccatcaccaaacttggtacttccacaacgatggaagatgatgaagatcataatgattccaaagcctggtaagaaccacacagtcgcttcatcttacagaccaataagtctactctcatgcatttcgaaactatttcgaaaaatgcctgctgatccgacttaatcaacatctgatataccacaatataatcccagcccaccaatttggatttcgcgaaagccacggaaccattgaacaggtgaatcgtattacaacggaaataagaactgcatttgaatatcgcgaatactgtacagcagtatttttagacggtatcccaagcattcgacaaagtctggctcgacggcctaatgtttaaaattaaaacatccctacccgaaagcacacacaaacttctaaagtcttaactctatgacagaaagtttgcagtgcgggtgcaacactgccacttccactgttcatacaattgaggctggagtccccaaggcagcagttcttgggccaaccttatacctcatctatacagccgacatccctacaaatagtcgcttaacggtatccacatttgccgacgatacagctatccttagccgttcaaggtcccctatccaagctacagcacagttggcactgtacctcatcgacattgagaagtggctctctgactggcgaataaaagtaaacgagcaaaaatgcaagcacgtgacgtttacgctaaacagacaagactgtcctccgctcttgttgaacagcatacccactcccgaaagcagacgaggtaacggtaccttaggagtacacctagacagaagactcacatggcgcaggcacattgaagccaaaaaaacccaacttaaactcaaagccaacaacttacactggctcatcaactctggttctccgctcagcctagatcacaaggtcttgctctacaattctatattgaaaccaatctggacctatggctcacagttatggggcaatgccagcaacagcaatattgacatcattcagcgagcacaatcaaagattctgagacccatcactggggccccgtggtacgttcggagtgaaaacatccaaagagacttaaatatcccatcagttaccaacgcaatcacggaacttaaggaaaaataccatagcaagcttcacacgcaccccaaccacctagcgcgaggtctaatccagctcagcagccgttcccgtctccggcgaaaggacctaccaacccagcgaataaattattagggccgtttaaacatagaacagttggaaaaataatacaactgttcaaaaaatacttgttatagttaagatttttaaacttattgttagttcttatacaagaagattcaataaataaaagcaaagtaaaataaaaaaaaaaaaaaattttttctttccacccctttattgttattattgatcgataacctttgatttgtagcccttaaaagagttacggtttgtacttgcagaactttcgttgtagaaagattttgcccacgttttcattcatatctctagcatttgatatatctctctatatctcatttgatctctctatctctctatatatatttctttaaaccacatcgaatcaagctaggtctttgcaattacggcgccgccatatcacttttcacagccaccctacacgcctcatccagagttttccatcgactctttaacaacattatgcattgtccctccgagtttttcgataccacgcccaagggtcggattttggatcgctgctccagcgatgtcaattgcttggacttggtaatgccgctcaatataagaatggtcatgagcacggcatttcaggtaatctctatatgcagagttcagcaagcatgttttatactttgacctattcttttttttttaccaaagtttgtcatcaaattgggaatttaaagcatcagaattttcagttttgtttcaagggccaaacaaaatatttcagccatttcaaatgtacctcttagcagaagctttgtttcattttgttttgtaccaaaaagaatcgttaaccttaatactaatttgtcttctaacccttgtcccaaatcttgtattcagtcgttggaaaatagaccaccaaatctgtttaaattacattccgatcttataaggataaattccctttaatatcccaagtcttcagctatataggcagtgtggttatcgtttacctgggcgccctgatcggtacccggaaaatatttatccagctattcggaaacattttgcatgccccacaagcctatttcgacataaagccccgggcacgaattctcgatcgtttggcaaacgatatatacaaattggatgtggtattgccagaactaatacgcgtgtttaactcgcaagtattccgggtacgttcgctgtgactaaccaacaatccaagcactaactgatttcgactaacaaatggtataaccatcattgtacaaacactcagcccgtagcaatttggagctccctggcattccacatccctagagcgtagtatgtaaataagcattccaaacaacggggcgggcgcatgttgtaatctcgttcttttgttaatttatcttaagattacttttcctgtggttgtctttctttttcttggaatcgtatcttgtgggccaaggactcgaaaaactagaaaaattactgcaattttattcaattcttagcaaaaactaatactttaatgtagcaaatcaacagaaaagttaccaaatcgattttcaaatgcaataaccaagtagaatgattaaaattcagtgaatttttttagtttgagagtaagccaactctgtagtcttttggggaattggcaggccgacctctatacgattttcctactcgaagagaccttctcgagcatcgagttcagccggttgggctattgctataccaatcgatgggaaacctaactcttcattcatactgaattgcctaatcgcaggtttcacgtcattcttttcggacctggctccggcgctgggtagtttgcatgccgcaaaagtcctgcactcgatgctcctcgaaaatgtgctgagagcaccaatgaccatgttcgatacgacgccggtgggtcgcatcttgtcccgattctcgaaagacgttgaatcggttgaccagaaaatgccgcaggtcattaatgattgcatttggtgtgcattcgaggtaatttcacagcactatgcactaggaaccgtcttcaaattgctacaaaacatcgaaaataattccagtgacattaaccctgtgcatataaaacgactaactagtccagattaataatcctcattaggcggcgccacatggcatccccttctctatatcctttcttatccttattttcgacatcatcgagtaaagcgtttgatccaaaacaaaggcgattccattataaatttctattcatcatgattttcctattaacaccctgcacttttccgcacgtatgatcccttcggtttgactgaacagcatttacttacattgctattttgctattggttaggttctggctaccattgtggttattagtctgtccacgccaattttcctggccgtgatcgtgcccatcgccttcctgtactacttcgcccagcgtttctacgtggccacttcccggcagctgatgcgtctggaatccgtatcccggtcaccaatctactcgcatttcagcgaaactgtcaccggagcatcgactattcgtgcctacaatgtgggagatcggtatgtatttggatatcatctagaaactaaagtctaatgatttttatttatttcattgcttcagctttattgaggaatctgatgccaaggtggacaagaaccaggtttgcaagtacccgtccgtgattgccaaccgttggctggccattcgtttggagatggtgggcaatctgattattctgttcgcatcgcttttcgccgtcctgggaggtcaaaccaatcccggcctggtgggtctgtcggtaagctacgccctgcaggtgacccaaaccctcaactggctggtgcgcatgtcatccgacatcgagacgaacatcgtgtccgtggagcgcatcaaggagtatggcgagacaaagcaggaagctccctgggagctggagcaggacaagaacaagcccaagaactggccacaggagggacgcgttgagttccagaacttccaggtgcgctatcgcgaaggcttggatctggtgctgcgcggtgttagtttcaatatccagggtggcgagaaggtcggcattgttggtcgcactggtgccggcaaatccagtctcacattggccttgttcaggtaagcatattatggcttttggtttacgttatcatcattaattcttgatttgcatttagaataattgaagctgccggtggtcgcatctccatcgatggcgtggacattgcctcaatgggtctgcacatgttgcgttcccgcctgacaattatcccccaggatccagtgcttttctctggttcgctgcgcatcaacttggatccctttgaaatcaaaaccgatgacgaaatctggaaagctctagagctgtcgcatctcaagtcctttgtaaagagtttggcagctggtctgaatcacgagattgccgagggtggtgagaatctgtcggtgggccagcgccagttggtttgcttggcgcgtgccctgctgcgtaagaccaaggtcctggtgctggacgaagccactgccgctgtggatctggaaactgatgatttgattcaggtgggtgttatatacttatatacattttaattgctataaattttttttttttttttttaatttttattatttattgaatcttccctttgtgttaagagactaacaataagtgttcaaatcttaatctaacttaattaactttcacttagtgatagtttttttttttcattaatgccctaataagtttattgctgggctgggaggtcgttgcggtgcagccggctttgactgcatactcggattagttttcttgcgaggggatttgtatgggtggtcagcttttcgttatacttcgtttttttctcagctattacttcgattactaatttgatttttaggtctctgtgtatgttttcgttccgaaggtaccacgggcgctccagtgataattctcagaattcttgactgtgctcgctgaataatgtctatgttacttctggatgcgttgccccacagctcggagccataagtccagataggttttaagacggagttgtatagaagagctttaactccagactaagtggagagcgagcatttatgagccagtggaggttccttgctttaagtttaagatgtttcgatttggcttctatatgtttgcgccaagtgagccgcctgtcccagatgaactcccaagatatgttacctcgtcggcttgtggaatgcatatgtattcaagaccagtgggtgggcatgtttgtttgtttaaggtaaaggtaacctgcttgcatttttgaacatttattgaaattctccagtcggcaagccatcgttctacagatgttaagtgtcgggataggagtgccgggcttttattgggcatttcgagcgactgagtatcgcggtatcatcagcgaacgtggaggttgttagattgtagtctatggggaaatccgcccgtatacagggtgtataagattggacccagtacactgccttgcggcactccagcttcgattgcgcaatcgcgtgaagtgcttgtatcgcatcttattgcaaacactctgttatataggtatgacttcagagcttatgtgtgttttggggcaacagcttgattattttaaacaaaagtccatcgagccacactctgtcaaatgcctgcgcgacgtctagaaaaatggctgtgcagtattctcgatgttcaaaagcagtaccgaatttctgacgtgattcggttgacctgttcgatggttccatgtttttctctaaagccaaattgatgtgttggaagtgtgttgtttattctaagatgagggctaatccgaggagtagcattttttcaaacagctttgaaagacatgttagtaagcttatcggtctatatgatgatggctgcgttttatcttttcctggctttggaatcattactatggtcgactttttccatttttgagggaagtatccaagcttggcgattgcgttgacaacaggcagatgtgaagaatagcacactttgggagttcaatgagcattcttggagttattaggtcgtagccaggcgattttcttgggttcagttgctctttgataacctttgctagttacatggtcggaattcaaagggttcttgaggatctagattggctgctattaaaggagggagaataaatgtgttggtagagggatttggtcggaatacattttgtaaatggtcagcgaaagcacaggctctttcttcatcacttcgaaaccaggtgccagagggacttcggagtggcataattggcgctatttggagtctttaggtttctgtgagctctccaaagagggtacttagtgctggtgggagagagttgctcgatatatgaacgttggctgtttttttcctcttgtttgagagcattggaagcctgcgtgtggctatcttaagcatgtgcttttgtaattggtgatctattagactgccaatcccttcgtaggcgtcgtttatctaataccagccgctcgatttcgcgattagttttgatgtagtttggttttgcatacgtcactggcggggttgaagcctttgcagcccgaaactaaaaatgttttcaagagtttccgttgacttgtctatatcctcctttgtagataatgcccgtcgttagttctatgtgtgaacagacaatacttttgataccttggccagtttgttctaaaatttgtgagtctatacggggggtcgaccatgtgggggcgagttagcatatttagaaaaacaggtgagtgatctgatgataaatctgctagtgcttcggcggtgaccatgttgcgggggacatgtttagtaattgcaaaatcgatcaggtctgggatttttcttgggtctgctggccagtatgtaggcttacccggggatacatagtctaacttggtttctggcttcgtaagcgcattgtacaattgcttaccctttggcgacacaagtcgagatccccaatggggtgtgcttggcgttatagtcacccgctgcgatgaacctgtcacctagtgtgttaaagaattccatgaattgatcctcagagattggaaagcgcggtgggcagtagactgcggctagagtcgttgaaccattgttgagttgtaaggctatggacgtagattgtaagtagtttttgtcaaaattgtttaagtggtggtgttttatgcgatttctgatgagtattccagtgcctccatgagctttaggtcgtagccaggcgattttcttgggttcagttgctctttgataacctttgctagttcacatggtcggaattcaaagggttcttgaggatctagattggctgctgatgatttgtaccatagaacaagtatcctggtatatgaaaattgtttttatttgtgaggtgcgtttctgatagtagcattacgtcgatgtttttttcgtaaatgaactgtgtgagctcttgggtatgcccgggaaacgccatttgcgttccacagagatatccgtagggaagcccattatggggattttgaagatacaagaagttgaatcaggatattttggtttttcatgagctcttgcaaagtattttgcatgaacgtcataaagtctttcatgctttgctgtagggatagcatcatagcttcgatgccactttgttgtgtttgttggatgtttgtcggtgtatgttcggaatgagcagttcttgtcggtggggcgggcacttctagtccggattttagggcgctagcgaaagaaattgttggagtagtgcttgggacagttaggggtggttgaaaaatcggttgcggagagtagaaattgactttgttgtatgtatgtgctggggcaatacgtttgtttaggcggctcttcaattctttggacacccacacagcctctgtagtttgcagtatgtttttccccgcagtactgcatttcttcacagacttatcgtccttgtttttggggcagtttgcggtagtatgaggttcgctacagacaacacataccggacttaagggtgcagtatgccttggtgtggcccgtattcttggcaattagtacattgaactggattgatccgtttgtgcggctcctcccggtgatcctccgatgtagcaagtactgcaaattgtatattgggtgcacttcgtttttctttagtgcctggagctctggttcgagttctattttgaatagtggctgcggaactttgtctttgtttaaaatattaatagctgtctttgcagaaaagtttttggccttcagagcctcaattatctcagctggtgtcactgttgcttcaatgcccttaagtactacctgtagccctttgcaactttttaattggatgtgtagtagtttttaccagccatcatttaggatttagtcactataccggtggtctgcttctgttggatctgtagttttatttcatgaatatttccttttttaagtgggataatgtggaacttgctgtcaccaatcaaagcaacgagtttatttacaagtgcatttgtactttggtctcgtatgaaaattggtggaggcctggtcttttttggttcccctaccgttttttcgttgggttgttcggtcgcagaatcagccaagatagcatatcggtttgaattatttactgcagagttttcattgccgttgttggttcgattgattttgggttgattacctgccttattggtttgagggctgagctttctttgatttggatgtagcgatcccatgccagtctgcacagtcgaaatcggacttctgcttttgttttgattcttctttacgtgcattattgttgttgcaaacggtcagtgctgctgaattatttacagctggcacagcgataattagttgggccgctgacgaagttgatgttgtggcagttgccagtgaggtcactgcactcgttattgcagtgttacagttacccgggacggtcgtttggcgctgcgagaggagcggggtaggagaggcggtctcttcgctccacgacttgtgagccgaagcaggcagagagggagagcaagaacgcggtctgtcgttcgctgagggcaaaagtttcgagttagttgaaggtgagggtgctcgatcaccgatttgcggtgagacgaaagaaaagtatgcattgttgcgttgtaaagagagccgacgctcgtcttgttcacattgtcgctgagaacgtatgtcgttttgattcattgttctaagtccacatataacaattaccagaacaatatggaataattatttattttagtaaataattactatagtcaataattgttagttgtgcaaactgcactttacactttgtgtttaactttcactatactgttgtagtttttagaacttgctattcgtagcttgaaagaaacacgtctccacccgaagactgtagcaatgccgaattgctataaatggactgaatttatttcctatagaaaaccatccgaacggagttcaaagaatgcactgttctcaccattgcccatcgcttgaacactattttggactcggacaaggtaatcgtgctggacaagggccagatcatcgagttcgcctcgcccacggagctgctggacaatcccaagtcggccttctatagcatggccaaggacgccaatctagtttaagatccatgaatgttaacttgaaactccacgaaactcaaacggaagagtgagtgccccaaaacaacaaactttaggaatatagatgtacgaaaagaaaatcattcaacggtagctttaagccatttggcactgacagctctacctcatggctagaacaagcaactatgagacaaagcaagcaaacaaacacaacaatggaacaataagcgaaagaaattagcaaataccaactaaatgttcattagactaagcgaaataattcaagccagttgcgccttcgtcggttacgctatgttcgtttttattatgtatatgtatgtatttacatagtcaagtgtatttttctattgtctattgtacttagttttctatgcaacaagaaccggtaacagcaggagagatggcaagttggagcattataccgtaaagaaaaaaaataactcttatgtatgccacatatttatgtacttaaattaacaaatcagaagattgagatactacttaaactccctcaagaatttttgccttcaactgataagatcagtacgaaaaacggtcaatgtagttaaatcaatttattgaaacttttgtagattgtatacttatatcaaaaataaacaaaacaaaatcccaatgaaatttaaatgtgttctttttatcagtttacctaatgaggtagcattatcaattatgaaaaaataaacagtgcatttagctttaaatgtattgtcatcttcgaaatccttcgaatttcttttcttttttgacaacttaaagctggtagcctcacattttgcctgactaatatggcagcgaacggcccataaattatatttataagcgccgaaaagcagtataaactgtttggagacaatttccaggcacctatttacacccatccaccttgagatatatgtatttattttagatatttgccggcagccacccactgaaaatgagcattccatttgtctttatttaggcgcggacacaaaatggttgctcggaggctgcatttattgacaataaacaggtcataaattacgaattgaatggtcggcgcattagaggccgacttctttaccaaatttctaaatacaagtgcaaaaaaaaaatatttgaaaaagtccttggccaggtcttactcgtttattgtttttatttcagcatgacaaaacgaacttcaaagtgaaagttgcaaggcctttgtatttcctacttgtgggggcggctcagagggtgggggggcgtggcagcggagtgcacttgaaaacaaaaagcgtaaagttattaaaggttttgtgtgcgctttgtgtgcccgctttcatgtcacttacacttttggccatgtttcaaagccagccagcttttagccagccccttcgccggttttcaaatgtgtgtgcttgccgcctggtcttttactc

SEQ ID NO: 13265 - DNA, 5337 bp, DROSOPHILA
gaaggaacagctgttggcccgaaaatatagatccgtttatttccttgccgctttacagttaccacatcgcccgatatagcatacgcatatagcccaattgcacgtggaggaggttgccgagcagtcgagtaaccatggcggatgacactagttcgccgatggacagattctgcggatccacgttctggaacgcaacagagacatggtataccaacgatccggactttacgccctgctttgagcaaacggcgctggtctggacaccctgcgccttctactgggcgttcgtgatctttgacttttactacctgaaggcgagtttggacaggaatataccgtggaacaagctgaacgtgagcaaagctctggtgaatctgggtctgctggtaatcactgccctggacctaattatggcgctggtcaagaagggcggcgactctgagctgccgctctacgacctggatgtttggggtcccatcatcaagttcgccaccttcctgttgctcttcatattcatcccgctgaatcgaaagtatggcgtgcagaccacgggatgtcagttcatcttctggttcctgctcactgtgctgtcgattccccgctgccgcactgaagttcgactggacgcggagcgccagaagattctgaattcgcaacagccatccgagcaggacttttcctgggaggagtatcagttcgttagcttctttatcttcttcaccttcaccagcattatgctgatcctgaactgcttcgcggacggaatgcccagacaaaccaagtaccagaggggtgagaacgagattcccgaactgtcagccagtttcctttcccgcatcacctatcagtggttcgacaaaatggccctcaagggctatcgcaacccgctggaggagaaggatctgtgggacctgaggccgcaggacagctgctccgaggtcatgcccatcttcgcccaccactggaaccagaacgtgcgcaagaactacaagaacaaggcgcgcgtagaacccaaggcgcagtttagcaatggcaacgtgacctttgagaatccccacggtgagaagaatggccgcaagaagggcatggccagtattatgccgccaatttacaagtccttcggaggcgtctttctgttcggcgccctaatgaagctgttcaccgacaccctgacatttgcccagccccaagtcctgagtttgatcatcagcttcgtcgaggcccaagatgccgagcccgaatggaagggtatcttatacgctgtcctgcttttcgttttggccgctgcacagacctttattctggggcaatatttccaccgaatgttcattgtgggcctgcgaatcaggacagctttgatcaatgccatctaccgcaaggccctgcgcatttcgaactccaccaaaaaggagtccaccgtgggcgagatcgtcaacctgatggccgtggatgcccagcgattcatggaactgacaacctacttaaacatgatctggtcggcgccactgcagatcggtctagccctgtatttcctttggcagcaactgggaccgtctgtgctggccggtttggctgtgatgattatcctgatccctgtgaacggagtgattgccagtcgcatcaagacctatcagatcagacagatgaagtacaaagatgagcgtgttaagttgatgaacgaagtactgagtggcattaaggtgctcaaattgtacgcctgggaaccgagtttcgagaagcaagtgctggacatccgtgacaaggagattgcgacgctgcgctccactgcctacttgaacgcgggcacttcgttcttgtggtcctgtgcaccgttcctggtttccttggtcacgttcgccacttacgtgctaaccagcgaggcgaatcagctgagcgtcgagaaggtgttagtctcaatcgccctcttcgacctcatgaaactcccgctgaccatcctgcccatgctgagtgttgacatagccgaggtttcattagttacattcgccacttacgttttaattgatgaaaataacgtgcttgatgccaccaaaacctttgtctcattatcattattcaacattctacgatttccgctaacaatgttgcccatgctgatcaccaacctggtgcaaacgcaagtttccgtgaatcgtatcaataagttcctgaacagtgaggaactggatcccaacagcgttctccacgattcctctaaaccccatccaatgagcattgagaacggcgagttctcgtggggtgatgagatcacgctgcgcaacattaacatcgaggtgaagaagggcagcctggtggccctggttggcacggtcggttccggcaagtcgtctgtagtgcaggcattcctcggtgaaatggaaaaacttgcgggcgttgtcaacactgtgggcaagttggcctatgtaccgcagcaggcgtggattcagaatgcgacggtgagggacaacatcctcttcgggcagacctacgaccgaaagcgctacaacaaggtgatcgacgcctgtgccctgcgtgccgatatcgacatcctgtcagccggagatctcacggaaatcggtgagaaaggcattaatttatcaggtggccaaaagcagcgcatctcgttggctcgtgctgtgtacagtgatgccgatctgtatctgctggatgatcctctcagcgcagtggacgcccatgtgggaaagcacatcttcgaggaggttatcggacccaagggtatattggcacgaaaatcccgcgtgctggtcacccatggtgtgactttcctgccccaggtggacagcatctatgtgataaagatgggcgagatcagcgagagcggcacattcgatcaattggtcaagaacaaaggcgcctttgccgacttcattatccagcatctgcaggagggcaatgaagaggaggaggagcttaatcagatcaagcgccagatctctagcaccgcagatgtccctgagctgttgggcactgtcgaaaaggccattaagttggcgcgcacggaaagcttgtccgattccatctccgttacatccgctgatagtttaatgggcggaggaggaagtcttcgccggcgaactaagcgacaggactcccacgattccgttgcctcagccgcttccctgaaaaagaagcaggaggtcgagggcaagctgattgaaactgagaaatcgcaaaccggtggcgtggagttcgcagtgtataagcattatatcaagagcgttggcatttttctatcggttgccacattggtactcaactttgtattccaagctttccaaatcggctcgaatctgtggctcactcagtgggctaacgatcaaaatgtcgccaacgacactggcctcagggacatgtatctgggtgtttatggtgccttcggatttggccaagtcgcgacgaacttcttctcatccctcgccatctcattgggttgtctcaagtgctcgcagttgttacatcagaccctactatactacaatctccgctggccaatggaactcttcgacacgacaccactgggaaggattgtcaatcgcttctcgaaagatatcgatacaatcgataatgtgctgccattcaacattcgtgtcgtcattggtcaggcatatatggttctggctaccattgtggttattagtctgtccacgccaattttcctggccgtgatcgtgcccatcgccttcctgtactacttcgcccagcgtttctacgtggccacttcccggcagctgatgcgtctggaatccgtatcccggtcaccaatctactcgcatttcagcgaaactgtcaccggagcatcgactattcgtgcctacaatgtgggagatcgctttattgaggaatctgatgccaaggtggacaagaaccaggtttgcaagtacccgtccgtgattgccaaccgttggctggccattcgtttggagatggtgggcaatctgattattctgttcgcatcgcttttcgccgtcctgggaggtcaaaccaatcccggcctggtgggtctgtcggtaagctacgccctgcaggtgacccaaaccctcaactggctggtgcgcatgtcatccgacatcgagacgaacatcgtgtccgtggagcgcatcaaggagtatggcgagacaaagcaggaagctccctgggagctggagcaggacaagaacaagcccaagaactggccacaggagggacgcgttgagttccagaacttccaggtgcgctatcgcgaaggcttggatctggtgctgcgcggtgttagtttcaatatccagggtggcgagaaggtcggcattgttggtcgcactggtgccggcaaatccagtctcacattggccttgttcagaataattgaagctgccggtggtcgcatctccatcgatggcgtggacattgcctcaatgggtctgcacatgttgcgttcccgcctgacaattatcccccaggatccagtgcttttctctggttcgctgcgcatcaacttggatccctttgaaatcaaaaccgatgacgaaatctggaaagctctagagctgtcgcatctcaagtcctttgtaaagagtttggcagctggtctgaatcacgagattgccgagggtggtgagaatctgtcggtgggccagcgccagttggtttgcttggcgcgtgccctgctgcgtaagaccaaggtcctggtgctggacgaagccactgccgctgtggatctggaaactgatgatttgattcagttcaaagaatgcactgttctcaccattgcccatcgcttgaacactattttggactcggacaaggtaatcgtgctggacaagggccagatcatcgagttcgcctcgcccacggagctgctggacaatcccaagtcggccttctatagcatggccaaggacgccaatctagtttaagatccatgaatgttaacttgaaactccacgaaactcaaacggaagagtgagtgccccaaaacaacaaactttaggaatatagatgtacgaaaagaaaatcattcaacggtagctttaagccatttggcactgacagctctacctcatggctagaacaagcaactatgagacaaagcaagcaaacaaacacaacaatggaacaataagcgaaagaaattagcaaataccaactaaatgttcattagactaagcgaaataattcaagccagttgcgccttcgtcggttacgctatgttcgtttttattatgtatatgtatgtatttacatagtcaagtgtatttttctattgtctattgtacttagttttctatgcaacaagaaccggtaacagcaggagagatggcaagttggagcattataccgtaa

SEQ ID NO: 13266 - protein, 1591 aa, DROSOPHILA
MADDTSSPMDRFCGSTFWNATETWYTNDPDFTPCFEQTALVWTPCAFYWAFVIFDFYYLKASLDRNIPWNKLNVSKALVNLGLLVITALDLIMALVKKGGDSELPLYDLDVWGPIIKFATFLLLFIFIPLNRKYGVQTTGCQFIFWFLLTVLSIPRCRTEVRLDAERQKILNSQQPSEQDFSWEEYQFVSFFIFFTFTSIMLILNCFADGMPRQTKYQRGENEIPELSASFLSRITYQWFDKMALKGYRNPLEEKDLWDLRPQDSCSEVMPIFAHHWNQNVRKNYKNKARVEPKAQFSNGNVTFENPHGEKNGRKKGMASIMPPIYKSFGGVFLFGALMKLFTDTLTFAQPQVLSLIISFVEAQDAEPEWKGILYAVLLFVLAAAQTFILGQYFHRMFIVGLRIRTALINAIYRKALRISNSTKKESTVGEIVNLMAVDAQRFMELTTYLNMIWSAPLQIGLALYFLWQQLGPSVLAGLAVMIILIPVNGVIASRIKTYQIRQMKYKDERVKLMNEVLSGIKVLKLYAWEPSFEKQVLDIRDKEIATLRSTAYLNAGTSFLWSCAPFLVSLVTFATYVLTSEANQLSVEKVLVSIALFDLMKLPLTILPMLSVDIAEVSLVTFATYVLIDENNVLDATKTFVSLSLFNILRFPLTMLPMLITNLVQTQVSVNRINKFLNSEELDPNSVLHDSSKPHPMSIENGEFSWGDEITLRNINIEVKKGSLVALVGTVGSGKSSVVQAFLGEMEKLAGVVNTVGKLAYVPQQAWIQNATVRDNILFGQTYDRKRYNKVIDACALRADIDILSAGDLTEIGEKGINLSGGQKQRISLARAVYSDADLYLLDDPLSAVDAHVGKHIFEEVIGPKGILARKSRVLVTHGVTFLPQVDSIYVIKMGEISESGTFDQLVKNKGAFADFIIQHLQEGNEEEEELNQIKRQISSTADVPELLGTVEKAIKLARTESLSDSISVTSADSLMGGGGSLRRRTKRQDSHDSVASAASLKKKQEVEGKLIETEKSQTGGVEFAVYKHYIKSVGIFLSVATLVLNFVFQAFQIGSNLWLTQWANDQNVANDTGLRDMYLGVYGAFGFGQVATNFFSSLAISLGCLKCSQLLHQTLLYYNLRWPMELFDTTPLGRIVNRFSKDIDTIDNVLPFNIRVVIGQAYMVLATIVVISLSTPIFLAVIVPIAFLYYFAQRFYVATSRQLMRLESVSRSPIYSHFSETVTGASTIRAYNVGDRFIEESDAKVDKNQVCKYPSVIANRWLAIRLEMVGNLIILFASLFAVLGGQTNPGLVGLSVSYALQVTQTLNWLVRMSSDIETNIVSVERIKEYGETKQEAPWELEQDKNKPKNWPQEGRVEFQNFQVRYREGLDLVLRGVSFNIQGGEKVGIVGRTGAGKSSLTLALFRIIEAAGGRISIDGVDIASMGLHMLRSRLTIIPQDPVLFSGSLRINLDPFEIKTDDEIWKALELSHLKSFVKSLAAGLNHEIAEGGENLSVGQRQLVCLARALLRKTKVLVLDEATAAVDLETDDLIQFKECTVLTIAHRLNTILDSDKVIVLDKGQIIEFASPTELLDNPKSAFYSMAKDANLV

SEQ ID NO: 13267 - DNA, 6083 bp, DROSOPHILA
cggcagtcttggcattggcctcggcctgcttgtacatttccaggcgctgtttgataatgcttaatgtgtccacagtcgtcgtgggcagaaaggtctggacgggttcctcagaggcagctggcggttgtgcgacaggctcctcttcctctgcctcctctagaccaccgattccgctcagctcgccaagaagatccggatcgctttccaaattgtcatcatcatcatcgtcgctgacatcacgcaagctgtcggctatcattttgtccaaatcactggcgggtaacagctttgctttgggcttgggctttggcttggctccttctccgccggttatggccgcaagctctgcctccaaatcactgtcacccccatcgtcctcaccatatccagcgctgggatcaaaatcatctgggatttccgtaagaccgaactaaacacaaaaaacaaaaaagacagtccaaacgatgagtcataattaataaatagacggatctagactgtttgtttttcctctcacctgcgataaatcgtgttgccttcttttcgctggctctggcttctttctggagaacatccttgattgcacagaggctgtttattaactaaaataagtctataaagactttcaaatcctttaaatttttgcgtcgcaacagttcagccgcagacaacaataacagagtggggatcactgtggtgcaacgaaaggtgacgcaggaaagtctttgcgaattggtgacgtcagtggcacagggctacaggaaatttgttgacggttaaaaaaatatcgttaaaaataatgaagaaatgattttttcttcattcagcaacattaaattttattatagtttaatccataatgaaatataaatgaacatggtaagccaccttacaaaacatcaatcctgcggaactaaacttttgccggtaactagggctgcgaaacgctaacaggtacagggctgccgcgccagctgtctaatcgaatcgataccgcaacctatcgatatcgagagccagcgcacacacagtgcaaaagagtttgcgaaaaaaaacctggacaaaaagccaaattgattgtgcgccgagcagcttgaggcactaggtgtaccctcgtcgaccagtgccgtgaatcctctaaccatcgtggttgtggtggcaccaagaagttagcgaaaccatcgtccccgcagttctcccagcttccacctcctccaactccgtcttgggggccaaaggcagaaaatcatcagacttctggttgtgagcagcgcggggcagcggggtcggcactggcctgctgggttaaacgtggaagtaaacaaacgaattggattccgggtccaggacggacgaacggggcgtggctcgttaaccagcggcttggtaaacgaaaccagagacggcaacaagtaggcgacaggcatggacgtgtccctcactgagccggagacgcgcttctacagtgagttgttccaatgctgcgacgtggagaagacaggcaaggtgcccatgcttaaggccaccgagctctttcgctcggcggacatcgccaatgagaccgtgattgaggtaggtccaatttgtgtgatcgtgagtgattaattatctgggtctgggcttatagatcaccggtctggcggggataccctccacggcgctacacatctcgcggacacagttctactcatgcctgaagctaatcgctgctcatcaggcggccatgcccctgcgccaggagctgatcttggccacgtttccgcttccattaccgcactttagctggaaggaggcggttacagctccggtggctgtcgaaaatggattgactgccttgccaccgccaccacccacagatcgcagaaattcactgcgtcgtaactcgcagcaagagcagctgcaagacacctctgatgtgcccagcaccgactccgaggttgagcaaaacgaatcagtggacgatgcgacaggccatggacgaggtacggatggctgtggggtcgtcagcagcagcagccgcgaaaatgtcggggtttgtacttctatcttatcttgtgacatttgtaaataagcttaccattgaccgatccccgtccatgccttatctcttttagcgacgacgaggaggcggtactggtggtggatcgccagaagcctggagcactaacagtgacagccccacgcccaccaacagcgtggctgagcggccttgggcgcaggacaccctctggcagggtttgctgggcgacgagcatcgccagctgctaggcacggaggaagagtcttccgatcgccacagcagcgacgacgatgacaacgagagcgaattggtgaccatttaccagataaccccggaacagcgcgagtactataataagcagttcaggacggtgcaaagggatccgcatggtctgctttcgggccaagcagcaaggtaagttggctttaggaacgtttataactttattcttcttattattttcttattcctttttttattagaaacttttttgaaaagagccgcattcctgtggaggagctacgtcacatttggcagttgtgtgacgttacccgcgatggagcgctaagtctgtctgagtttacggccgccatgcatttggtggttctacggcgcaacaacattcccttgcccacaagtctgccccactgtttgcatcccaacgtgctacaagcagctgcgtccggcagtggacagggggtgacatcctcgtcatcggcggcgctgcctcaggagccacctgaggctgatctcctgcacctaaatgatgacgatgaggacgaccatacggataatacaatcatagcaggcaatctcagcggcagcagtacgaccagcaaaccgcgtcccaatgtgcccagcgacaagaacatcatgaatctgagcagcatatccacgtcctcgcaggctagcaacagttccaaacgtgaggcaacaccacagaattctttgggcaagaaccgaagcatctcaaactcgccgaatgtggaaaaacctgtgtcgggaactgtttcctctacggcaagcgctgtagactcgaccaacgtctccagtcagtggacaaagtttagcgaatctccaacaacaagtgcggtttcggtacagtcaaccactggggcagcacctgttgtagcagccggagcagccgcttctggcgcatctagtcccgggctcaagccagtcctgtttgatatgaagcgctcggcccaagacgtggtatccaatccgcagattctgcacccagtgccgctaagagtgacgcccattggtgagtagaagaactaaaatagtattctataaattgaatataaatataattattccttatctcatctgtaggcaccgccatcgcttcctcagctgagtcatctaacgaaaacgagagcgcggtggctcagcgcgaggatagtcccaaggccatctcttcgactactgtcaataatcagtcatctgctgttgtacccggaatatcgggagtcgctggctcctcccaccgcgatagcagcgatctgcgtgccatccaacggcctcaagccaaaaagctgccggccaagaacagtgcattgccaccgccaccgcaacgcgagcccagtatcggatccactgggccaagtgagtcgcaggaaccgcaggctgcctacgtggcatcgtctttggcgtcgaagaaggagccaccgcctctgccaccgccaaggccacatcgtcatgcacggagcagcagtctggacttaaacaagtttaaaataggcgcaacgggcggtgcccaacaggcggaggtatgttatgtcctatggaccaacaatttccaattttatctgagaatttcaatctgtgtcgttttatatgccttggtcattaaataaagccttgtaggggatagtatttcgtagatccgcacttatcccctgcaatgctataacaaactaaggaacttccaaaacattccgtgtgttccgtctctgttttcaatatttgtggtgtactgtgcaaatgaaggcgaatacagttttgctacagattcaatttattgaaatgaaaatacagtgtcttttaagagtccacaattgttaagcatttgcaaaggaaaccgtaaacttcgggaaaccgaatttgcttatattgtttttgtgttttttgtttgcttgattttgcctaactacctacctataacctgtgaaatgtatataaatatggaaccccttttgttaagatcaccgcgcaggccagcttcgatatgcaaacctcaacggggtttgccgatttcacgcactttgccgacgaaggcgccgcgaacgtcgtaagtccaatcctaaatgtatgcaactcgtaaagcattccactacaattggccgtagctccactagtgtcatgtgtccaaattcagtagcttatataaataaacgcatccatttgtatgattgtcttactaattggtactctgaccttataggtggacgagcagcagctacactccttgccgccggcagcaccaccgccacaggcagcagtggtgccgcccacaagaatcactcttcagcaggcacagcagcgcgtttctgccttcgaggtttaccgaaagccgcaaacgccacgtggatcgcaatcgccgccccagcagccgccaccgccggctccagctgttggtttgaccacccaaactggtcagctgcccagtgctgagagctttgagaagcgagtaaccgccatcagtgactcgctacgtcacgtgtccttcaaacagggtcaggccaataccacggaagtactgcaacggctgcgggagcagaacaactcactgctccacctttgcaacgatttaagtgacgaacttctgagcgtccagacgcgcaaggaggagatgcgtctcaagctggagggacttaatgccagtgatagtacagggcgaacgagctcctcgatttgcgcaccggtgacagcaaacgtgaccggtggatcctctggttcggcaggagctgcttataccaacgtttaagcagcgaaaatgatcatgtgaatgagggtgaatcgatttatttttgggcgatatgtgactttcgtttgcctgtgtgtgtatttttgcgaccattttaagtgtctcgaaccaaaatttaacattccttataatttgttatactttctttaagctattagtatatttccctcttttctgcacattaaactgcattagatacatattgggcgtaagatttcagaaaaactacgaattagtttcccttaaatttgaatactaattgaaattaccaaaaacggagaaaaaattgataacgaccaagtttaatatgaaatcctcggatttaaggcaaatagctgaaatgaattcatgctattagtattaattcatttgttcatgcactgaaagaaatcgattcacctttatgttaaacacttattttgttgtttctgtatgttgcaagcacaatttacgattcgaggtgcttacacaacgataagactgggcaaatctttgagtaggctcgtaaaatttcgttgtgaaaatatttacacagtctgcagataaatattcgccagatctgaaagttccaacagcttctatgtaactaccatttgtttactcaagagcttgctcagtcttaagcgggtagaaacaccagcgatggatctgatagctcgtccgtttatgcattgaagttgctaatttaatttgtaggctagttaaatctcaagaacacaaaacaaatcatgcgagaacaacaacaataatgccgcctctatagatatttatgcagatcgatttatatatgtatgtatatgtatatttagagatatatgtatatgcgcttctcctaattgttacgagtaaatgacacacaattctttcgcttgacagccactccgcactccgtatctcaccctcaccctagtgattaatgaaactgccacaaagtggtccaatcccaggtgtaatatttcctgctgcgaagacattttacttctccatttgctatttattactgttttgtgtatgcctcgaaaatgtcccttctattcattccggcaatgaaaattaaaaaccacaaaaaaa

SEQ ID NO: 13268 - DNA, 3208 bp, DROSOPHILA
ctatcgatatcgagagccagcgcacacacagtgcaaaagagtttgcgaaaaaaaacctggacaaaaagccaaattgattgtgcgccgagcagcttgaggcactaggtgtaccctcgtcgaccagtgccgtgaatcctctaaccatcgtggttgtggtggcaccaagaagttagcgaaaccatcgtccccgcagttctcccagcttccacctcctccaactccgtcttgggggccaaaggcagaaaatcatcagacttctggttgtgagcagcgcggggcagcggggtcggcactggcctgctgggttaaacgtggaagtaaacaaacgaattggattccgggtccaggacggacgaacggggcgtggctcgttaaccagcggcttggtaaacgaaaccagagacggcaacaagtaggcgacaggcatggacgtgtccctcactgagccggagacgcgcttctacagtgagttgttccaatgctgcgacgtggagaagacaggcaaggtgcccatgcttaaggccaccgagctctttcgctcggcggacatcgccaatgagaccgtgattgagatcaccggtctggcggggataccctccacggcgctacacatctcgcggacacagttctactcatgcctgaagctaatcgctgctcatcaggcggccatgcccctgcgccaggagctgatcttggccacgtttccgcttccattaccgcactttagctggaaggaggcggttacagctccggtggctgtcgaaaatggattgactgccttgccaccgccaccacccacagatcgcagaaattcactgcgtcgtaactcgcagcaagagcagctgcaagacacctctgatgtgcccagcaccgactccgaggttgagcaaaacgaatcagtggacgatgcgacaggccatggacgaggtacggatggctgtggggtcgtcagcagcagcagccgcgaaaatgtcgggcgacgacgaggaggcggtactggtggtggatcgccagaagcctggagcactaacagtgacagccccacgcccaccaacagcgtggctgagcggccttgggcgcaggacaccctctggcagggtttgctgggcgacgagcatcgccagctgctaggcacggaggaagagtcttccgatcgccacagcagcgacgacgatgacaacgagagcgaattggtgaccatttaccagataaccccggaacagcgcgagtactataataagcagttcaggacggtgcaaagggatccgcatggtctgctttcgggccaagcagcaagaaacttttttgaaaagagccgcattcctgtggaggagctacgtcacatttggcagttgtgtgacgttacccgcgatggagcgctaagtctgtctgagtttacggccgccatgcatttggtggttctacggcgcaacaacattcccttgcccacaagtctgccccactgtttgcatcccaacgtgctacaagcagctgcgtccggcagtggacagggggtgacatcctcgtcatcggcggcgctgcctcaggagccacctgaggctgatctcctgcacctaaatgatgacgatgaggacgaccatacggataatacaatcatagcaggcaatctcagcggcagcagtacgaccagcaaaccgcgtcccaatgtgcccagcgacaagaacatcatgaatctgagcagcatatccacgtcctcgcaggctagcaacagttccaaacgtgaggcaacaccacagaattctttgggcaagaaccgaagcatctcaaactcgccgaatgtggaaaaacctgtgtcgggaactgtttcctctacggcaagcgctgtagactcgaccaacgtctccagtcagtggacaaagtttagcgaatctccaacaacaagtgcggtttcggtacagtcaaccactggggcagcacctgttgtagcagccggagcagccgcttctggcgcatctagtcccgggctcaagccagtcctgtttgatatgaagcgctcggcccaagacgtggtatccaatccgcagattctgcacccagtgccgctaagagtgacgcccattggcaccgccatcgcttcctcagctgagtcatctaacgaaaacgagagcgcggtggctcagcgcgaggatagtcccaaggccatctcttcgactactgtcaataatcagtcatctgctgttgtacccggaatatcgggagtcgctggctcctcccaccgcgatagcagcgatctgcgtgccatccaacggcctcaagccaaaaagctgccggccaagaacagtgcattgccaccgccaccgcaacgcgagcccagtatcggatccactgggccaagtgagtcgcaggaaccgcaggctgcctacgtggcatcgtctttggcgtcgaagaaggagccaccgcctctgccaccgccaaggccacatcgtcatgcacggagcagcagtctggacttaaacaagtttaaaataggcgcaacgggcggtgcccaacaggcggaggccagcttcgatatgcaaacctcaacggggtttgccgatttcacgcactttgccgacgaaggcgccgcgaacgtcgtggacgagcagcagctacactccttgccgccggcagcaccaccgccacaggcagcagtggtgccgcccacaagaatcactcttcagcaggcacagcagcgcgtttctgccttcgaggtttaccgaaagccgcaaacgccacgtggatcgcaatcgccgccccagcagccgccaccgccggctccagctgttggtttgaccacccaaactggtcagctgcccagtgctgagagctttgagaagcgagtaaccgccatcagtgactcgctacgtcacgtgtccttcaaacagggtcaggccaataccacggaagtactgcaacggctgcgggagcagaacaactcactgctccacctttgcaacgatttaagtgacgaacttctgagcgtccagacgcgcaaggaggagatgcgtctcaagctggagggacttaatgccagtgatagtacagggcgaacgagctcctcgatttgcgcaccggtgacagcaaacgtgaccggtggatcctctggttcggcaggagctgcttataccaacgtttaagcagcgaaaatgatcatgtgaatgagggtgaatcgatttatttttgggcgatatgtgactttcgtttgcct

SEQ ID NO: 13269 - protein, 903 aa, DROSOPHILA
MDVSLTEPETRFYSELFQCCDVEKTGKVPMLKATELFRSADIANETVIEITGLAGIPSTALHISRTQFYSCLKLIAAHQAAMPLRQELILATFPLPLPHFSWKEAVTAPVAVENGLTALPPPPPTDRRNSLRRNSQQEQLQDTSDVPSTDSEVEQNESVDDATGHGRGTDGCGVVSSSSRENVGRRRGGGTGGGSPEAWSTNSDSPTPTNSVAERPWAQDTLWQGLLGDEHRQLLGTEEESSDRHSSDDDDNESELVTIYQITPEQREYYNKQFRTVQRDPHGLLSGQAARNFFEKSRIPVEELRHIWQLCDVTRDGALSLSEFTAAMHLVVLRRNNIPLPTSLPHCLHPNVLQAAASGSGQGVTSSSSAALPQEPPEADLLHLNDDDEDDHTDNTIIAGNLSGSSTTSKPRPNVPSDKNIMNLSSISTSSQASNSSKREATPQNSLGKNRSISNSPNVEKPVSGTVSSTASAVDSTNVSSQWTKFSESPTTSAVSVQSTTGAAPVVAAGAAASGASSPGLKPVLFDMKRSAQDVVSNPQILHPVPLRVTPIGTAIASSAESSNENESAVAQREDSPKAISSTTVNNQSSAVVPGISGVAGSSHRDSSDLRAIQRPQAKKLPAKNSALPPPPQREPSIGSTGPSESQEPQAAYVASSLASKKEPPPLPPPRPHRHARSSSLDLNKFKIGATGGAQQAEASFDMQTSTGFADFTHFADEGAANVVDEQQLHSLPPAAPPPQAAVVPPTRITLQQAQQRVSAFEVYRKPQTPRGSQSPPQQPPPPAPAVGLTTQTGQLPSAESFEKRVTAISDSLRHVSFKQGQANTTEVLQRLREQNNSLLHLCNDLSDELLSVQTRKEEMRLKLEGLNASDSTGRTSSSICAPVTANVTGGSSGSAGAAYTNV

SEQ ID NO: 13270 - DNA, 4461 bp, DROSOPHILA
gggccagcctcgaccagagcgcgcacatctccaccggcgcagaaggccttgtcacctgtgcccttgatgatcaccagcgacttggacttctcgcacttcttcaggtgcttgtagatcttgcgtaccatctccaagttgatggcgttaagcgccttgggccggttcagaataatcattcccttgttagaggactccgtggccagcacggaggaggaggattggcgaacggagagagccattgttgttggttttgtttgggatatcgttgctccgccgatcatcggcaattggctacaggtgcgatgaccaaatgtgtacaccaacctttgaattgggccctgctggacggcgacatcgaattgttttcgattagctaagcgcttctatttgcaggaatttgcattacttaccattttgagcggctgtcgtcagtaatgttgtgtgtggggcgaagcgagtgtttagaaattcagcgttgcgcaatagaattttagcacccgcacagctggtcattcttgtcgcggagctgccagaccgcacacatgccggaagtaaataagggtgttccagaaatcgttttccgcgtaaaatattactattaaatggacatgccaagggcagacctataccaggcgccttttaatttattaattcaaatattatatgtataagaattttagataaagatacaaattgtttaaaaatagtttaacacaaacctgttgataacaaaattcactattcattttgaactcattagtagataaacgtaaaaaagaacacacattacctacatattcataatagagcagatttgcagtctggcaacactgaaattggcaattgtacttctcgcgaataagaaaaacaaatttcgtggagttactttatcttattttgtcaacaaataaacggtgagtaaacatttgtaattagcacgcaatcggtggtcggttgtcagttaagccagggccagcaaggggctcgcaccaagattacaatgccgcagttctttaagttccgcaagctgcggacaaagcgtcatagctcttctaccacttccgcctctgttttcatgtcctcgtccacggccaccaaccagatgaactatgacggcctcctttccaagttgaccgacgaaaaactgatgctcttcgaagccgccggcgaggggaccattgtagagggtagccggatatgcggccaggatgcggatccgctctccttgccgctggtggaggacggcgccatcgaggaggagcaggcggcccccatacagacgattcatcgcactgtattcgccgttccacgcgtcccttccccctcccccgtaagcacatcaggtgccaatctgaacctcaagacggaaaacgctgcgacagcgactccgcagcgcaaaatatcgacgtcatcacgtttcatgaacgccttcagtcagctctacggcggcggcaacagcggtccgagctgcggtcacgtggagcagcacaacgaggaacccggtgacctgtcggcaaaccgtactcccaccaagggcatggagtccaagctcgtcgcaatgtggcacaatgtgaagtatggctggagcggcaagatgaggcagaccagcttctcaaaggagcagcccgtgtggctgctaggacggtgctatcatcgacgctttactccgcccgtaagcatggaaagttccatcaccgagctgcccagcggggcggataccacccccgataacgccacatcggcgttcgacagcattcaggccacatcgacatcaacctccttgtatccagcccttaatccgcagcagatcgatgagattgtggtgccccaggaactgggaatggacgcggtggagaaccaagtgggcgaacagccttgggaggagggcatcgaaggctttcgtcgtgacttttacagtaggatttggatgacctaccgtcgagagttcccaataatgaatggctccaactacacctcggactgcggttggggctgtatgctaaggagtggtcagatgctcttcgctcaaggactcatctgtcacttcctagggcgaagtaagttaaatgaacccgcacaaatatgtttgattaccaataaacctttatgcttcaggctggcgctatgattcagagtcccagttgcactcgacttacgaggacaatatgcataagaagatcgtcaagtggttcggggacagttcctcaaaaagcagtcccttctccatccacgccctggtgcggctgggggagcatttgggtaaaaaacctggcgattggtacggtcccgcctctgtttcctatttgcttaagtgagtacagatctttatcgcttttttaatctttattaaatcaaacaactcttcaacttcaccacagacacgccttagagcacgcggctcaggaaaatgcagactttgacaatattagtgtctatgtagccaaagattgcacgagtaagttcaagcagaaaggaatcccttaatcaaagattcataagataactaccatgacacattgatatgttcatgagtaattgctgcaaccttgttcgcgaagctcattactcaggggctcaattgataacgtatgtgatttgataaccgtctttgtgttgttttagtttacttgcaagatattgaggatcaatgcagcattccggaaccggcgccaaaaccccatgtgccttggcaacaagcgaagcggccgcaggcggaaactaccaaaacggagcaacaacagcactggaagtccctcatcgttctgatacctttgcgcctgggcagtgataaactgaatcctgtgtatgcccattgtctgaagctgctgctgagtacagaacactgcctgggcatccttggtggaaagccaaagcattcgctgtactttgtcggcttccaggaggacaggctcatccacttggatccgcactattgccaggagatggtggatgtgaaccaagagaacttctccctgcactcgtttcactgcaagtcgccgcggaagcttaaggccagcaaaatggatcctagttgttgtatcggcttttactgtgccaccaaaagtgatttcgacaattttatggagagcgtacagttggtaagcaaaagccaaacatttcgttttccaacgtcctattaaatatcttaatttcaacagtatttgcatcctatgcgttgcgcctcaggggcaactgtggataaggcggccgggagccatcatacgacgcctcagtcatcccatcaaaccgagcaaacagagatgaactatccattgttctcattttcccgcggtcgttgcatggatcacgagcgggacgaaatgagcgattcgctgtacaagccgctcataaaacaggtggcttctctggcccaggaattgggcgctcaactggcgccgccacagcacggcgatgagcacgaccaagatgatagtgaaagcgaagagtttgtgctgctgtagatcgttgccgccaccaccacataaccctgttgctgtgctagctgtgttatttgctcattattatttgatttagttgccagccgctgctgcttgcttgctcgcccagaaaaacccaacagacccgtatctcaaacacaaagactttgttgtacctttacgcctacgcatatagtacatagacgcatgcatgtatcttgaatatttactgatgtccacgttaatctctcttttgttcgacctgtcgtctcgcattctgccaaagtttttcagctatttccatgttcgagcagcccgatctgtttatatgtgttatatataaacctatgtaatttgcggtattattattttaaaatcatgaatctttaatggaattgaattattttacaatggtgccacaattgtcactattctttgaagtatttcatgtagcgcttagttctagagtttagttaaattatgtaagtcgtcttgtaattgttcgatcattatttagttttaacattaattgtatataccctcgagtaaatgaataaactatcctaacttatactaaatacaattagggtgtcatgagattttagctgatgggatatgaatgtatgatatagatacaatattgcacggaattaaaattaaattagactaactagttttaatgtcttttatgaataagtaatttaacccacaacctcgtctttcgtttgggattattacagcttgcgaagtgtacatacctcttattatttgcaaacaaccaagattttggttggatccatatttggatggtgggacttgaaacgcttatctctgcatgacttgcgcctccctttccaggcgttttaagagcttgctgagattctcccgggctgtcgttgctctagccgcactaatacttattgcagtccgataagcctctatagcctcctgcgtcttgtcccagcgatgatagagaactccgagattcgtgtggtacaatgtgttgtggggctccagctcaata

SEQ ID NO: 13271 - DNA, 2109 bp, DROSOPHILA
atgccgcagttctttaagttccgcaagctgcggacaaagcgtcatagctcttctaccacttccgcctctgttttcatgtcctcgtccacggccaccaaccagatgaactatgacggcctcctttccaagttgaccgacgaaaaactgatgctcttcgaagccgccggcgaggggaccattgtagagggtagccggatatgcggccaggatgcggatccgctctccttgccgctggtggaggacggcgccatcgaggaggagcaggcggcccccatacagacgattcatcgcactgtattcgccgttccacgcgtcccttccccctcccccgtaagcacatcaggtgccaatctgaacctcaagacggaaaacgctgcgacagcgactccgcagcgcaaaatatcgacgtcatcacgtttcatgaacgccttcagtcagctctacggcggcggcaacagcggtccgagctgcggtcacgtggagcagcacaacgaggaacccggtgacctgtcggcaaaccgtactcccaccaagggcatggagtccaagctcgtcgcaatgtggcacaatgtgaagtatggctggagcggcaagatgaggcagaccagcttctcaaaggagcagcccgtgtggctgctaggacggtgctatcatcgacgctttactccgcccgtaagcatggaaagttccatcaccgagctgcccagcggggcggataccacccccgataacgccacatcggcgttcgacagcattcaggccacatcgacatcaacctccttgtatccagcccttaatccgcagcagatcgatgagattgtggtgccccaggaactgggaatggacgcggtggagaaccaagtgggcgaacagccttgggaggagggcatcgaaggctttcgtcgtgacttttacagtaggatttggatgacctaccgtcgagagttcccaataatgaatggctccaactacacctcggactgcggttggggctgtatgctaaggagtggtcagatgctcttcgctcaaggactcatctgtcacttcctagggcgaagctggcgctatgattcagagtcccagttgcactcgacttacgaggacaatatgcataagaagatcgtcaagtggttcggggacagttcctcaaaaagcagtcccttctccatccacgccctggtgcggctgggggagcatttgggtaaaaaacctggcgattggtacggtcccgcctctgtttcctatttgcttaaacacgccttagagcacgcggctcaggaaaatgcagactttgacaatattagtgtctatgtagccaaagattgcacgatttacttgcaagatattgaggatcaatgcagcattccggaaccggcgccaaaaccccatgtgccttggcaacaagcgaagcggccgcaggcggaaactaccaaaacggagcaacaacagcactggaagtccctcatcgttctgatacctttgcgcctgggcagtgataaactgaatcctgtgtatgcccattgtctgaagctgctgctgagtacagaacactgcctgggcatccttggtggaaagccaaagcattcgctgtactttgtcggcttccaggaggacaggctcatccacttggatccgcactattgccaggagatggtggatgtgaaccaagagaacttctccctgcactcgtttcactgcaagtcgccgcggaagcttaaggccagcaaaatggatcctagttgttgtatcggcttttactgtgccaccaaaagtgatttcgacaattttatggagagcgtacagttgtatttgcatcctatgcgttgcgcctcaggggcaactgtggataaggcggccgggagccatcatacgacgcctcagtcatcccatcaaaccgagcaaacagagatgaactatccattgttctcattttcccgcggtcgttgcatggatcacgagcgggacgaaatgagcgattcgctgtacaagccgctcataaaacaggtggcttctctggcccaggaattgggcgctcaactggcgccgccacagcacggcgatgagcacgaccaagatgatagtgaaagcgaagagtttgtgctgctgtag

SEQ ID NO: 13272 - protein, 702 aa, DROSOPHILA
MPQFFKFRKLRTKRHSSSTTSASVFMSSSTATNQMNYDGLLSKLTDEKLMLFEAAGEGTIVEGSRICGQDADPLSLPLVEDGAIEEEQAAPIQTIHRTVFAVPRVPSPSPVSTSGANLNLKTENAATATPQRKISTSSRFMNAFSQLYGGGNSGPSCGHVEQHNEEPGDLSANRTPTKGMESKLVAMWHNVKYGWSGKMRQTSFSKEQPVWLLGRCYHRRFTPPVSMESSITELPSGADTTPDNATSAFDSIQATSTSTSLYPALNPQQIDEIVVPQELGMDAVENQVGEQPWEEGIEGFRRDFYSRIWMTYRREFPIMNGSNYTSDCGWGCMLRSGQMLFAQGLICHFLGRSWRYDSESQLHSTYEDNMHKKIVKWFGDSSSKSSPFSIHALVRLGEHLGKKPGDWYGPASVSYLLKHALEHAAQENADFDNISVYVAKDCTIYLQDIEDQCSIPEPAPKPHVPWQQAKRPQAETTKTEQQQHWKSLIVLIPLRLGSDKLNPVYAHCLKLLLSTEHCLGILGGKPKHSLYFVGFQEDRLIHLDPHYCQEMVDVNQENFSLHSFHCKSPRKLKASKMDPSCCIGFYCATKSDFDNFMESVQLYLHPMRCASGATVDKAAGSHHTTPQSSHQTEQTEMNYPLFSFSRGRCMDHERDEMSDSLYKPLIKQVASLAQELGAQLAPPQHGDEHDQDDSESEEFVLL

SEQ ID NO: 13273 - DNA, 3463 bp, DROSOPHILA
accaccaatgcgacgacaaccctaggaggaggaggaatctttagcaagccagcgggtcaggcagctgccccggcagcatcgactttcgtgggtctgggggggatcgatgtgaccgccacgcaaccaaagctgggggacaataagcaagatggcatcaaggtgctgaccatgagtctttcacagagaaacaaaataatcattttattttcgaccactccagattaaggaaacccaagtgcccgacgagataataaaaacggtggatggcctaaaagcgtatatcaaacagcagaagaccatctcctctgacattggacggacatccacctccaaattcacgaatgtcagccacgagatcacgaacttgaaatgggcgctgcagaatatggccactttagttgagggcagcaatcagcagatccgcctgatgcgccaagagaccgtcaaggcgattcaatctctggagatggcccaacgcacgcaggacaccccagccggcctgcagttcgagaacaatgctccgttccagtactttcagtgcctggtggcgaagtacgagcaggatttgatcgcctttcgccagcagatcgctctgaccgagcgccacatgcacgcgatctcgaatccgcagagtatttcgccggatgatctaaagcgtggctttcgccaacttaatgagagtttcatctcgctggcgggacgcctccacgaggtgcatcagcgggtggaggagcacaaggagcactacctaaacctcagacgctaccgcctgcgagacaccaccaacgttttcgagcggattgacaatcctccgctgccgacggtggaacctcaacggattagtagcggtccaacgcccttctccaacatctcggctctgatgaacaagtcctatgcagcggcggccagttccgccagcaatgcgacaggcaattgagaatggcactctttacaagtttcaataaatcgttatgtcgaaaggggcctagactttcactttcagttatagcatagaatatatatttcacacgcaacaatctttatttcttcaccacctggatgacgtcctcgtcggccatcacatgggcaatccccacgcgctgcggcgagtatttcgtggaggtgccccacaccagggcatacttgaactgcgccgccagcgtgcgatggatggcatggcacacatgctccacactgacgccctaaacaaggaatatataaggaattagagttgctttaccaggctgaagaaggaattggatgaatggaaaacagtctcttgcctttctcagaatcaatccatcgtcaaagtctggaggagcgcctggcttctttgtgtacactctgatgagctggagagcttcccagagcgcctccatcatgtagtccagattaagtttcatgttgcaactaaccactatcgagtttggctggcgcgccaagcggtccacctcctcgatggagatctgatcgatcttgttgtagacatacagacagggcagatacacacggttggcggtgaccacgtcgatgaactcgtcctcggtgcagtcttcgcggaagagcacctcggcgttgaagatcttgaaggagtgcaggatggtctggaccattttctcgttgcagcgcgtaagggaacaggtggcgttgaagctcaggccgccgcccttcttctgcttgaagtagatgttgggcttgcgcttgttcagacgaatgcccacgctctccagctctcgctcgagcagctcccggtgaacgttgggcttggtggcgtccagcatcatcagcaccaaatcagcggtgcgggctacggcaatgacctgacgaccacgccccttgccctgggcagcgccctcgatgattccgggcagatccagcaactggatattggcaccctgatactcaatgacacccggaatgcaggtcaaagtggtgaactcatagtttgctgtcgaaatgaaacagtgagacgcttttgggcggtgtgtggcatgcacttacccgcctccgattccgttttggtcaaagtggacaacattgtggacttccccacggagggaaagccaatgagggccacccgggcgtcgccgctcttgagcacatcaaatccgtcgcccttttcgcccttcttggatggctccagcagctgggagcgatacttggccaacttggccttcagcaggcccagatggtattcggtggctatgggagggggatgaaaaacatgcagatttagcaaacttccagctacagaatcctaacctaaattccgatggccagcgcggcactattcgcaaacctttgttcttctgcgtccgcgcgatctctcgctcgatctccgcgatcttctctaggatgcccatgctgttggctctcttagttcggggcagagcatgcaaaagttcaaattaaacaaatgttcgcttttatttattgaccagcggtgcgtcgcccggaatttcgatcagctgtttttggcagtcaaggtagtggggcggctgtggaacaactgcaacgccgtgaagttatcttaacagtgcttctcctattattttagttaaagcagtttgttgtctaaagctaaaaaaatcataaattaaggaatatatttaaccaaaaatctttgccagcggagttattttatcaagcttaacgtgtagtctataggattatctatggtatttcgtaaataaatatctcgctgttttatttccgatattccgatttataagccacgtaaagtaagccgttaagcttatcaggtgttgaaattactgcactcgcatgacaatactaacaatcgattacctcgactttcagattcccgttactcacactcgcaggcagcaaagcgaacgttttctaaagtgcacacaggctccacctagcgaagcttgacagccgacaactgatgtgtgcacgcaagcggacggagggcaatctttgccgtcgccataaaagtggctgcagtgcaaaccaatgtatggccgttacgcatctcgttgttctagtgtctttcataaaacccatataatattgtagatccactttatatttggtttatcggcttggaatacgtaattgaatttaaatgatatcgccattaaatcatttcaataacgtcataagtcagacattaataaatatcgcataaatttcctcataaagtcaaaactctcgactatctctacatttttgtaattgactcacgcgcaattgctacagttactgaatgcacttaaaagcagttgctttttaaaaacagttgctttttgaaaacagttccttgttgaaaacagttgcttttcaaagtctgagaaacaatgttcctcgtacaggaaactggttctttaatggtgatcctcatttgttgtctgatggctcatttagcttatgcttgtagatcgggtaagaacattaaagagcttggaaattgtgttataagttgactagtgagttgtga

SEQ ID NO: 13274 - DNA, 1232 bp, DROSOPHILA
cgaaattccgggcgacgcaccgctggtcaataaataaaagcgaacatttgtttaatttgaacttttgcatgctctgccccgaactaagagagccaacagcatgggcatcctagagaagatcgcggagatcgagcgagagatcgcgcggacgcagaagaacaaagccaccgaataccatctgggcctgctgaaggccaagttggccaagtatcgctcccagctgctggagccatccaagaagggcgaaaagggcgacggatttgatgtgctcaagagcggcgacgcccgggtggccctcattggctttccctccgtggggaagtccacaatgttgtccactttgaccaaaacggaatcggaggcggcaaactatgagttcaccactttgacctgcattccgggtgtcattgagtatcagggtgccaatatccagttgctggatctgcccggaatcatcgagggcgctgcccagggcaaggggcgtggtcgtcaggtcattgccgtagcccgcaccgctgatttggtgctgatgatgctggacgccaccaagcccaacgttcaccgggagctgctcgagcgagagctggagagcgtgggcattcgtctgaacaagcgcaagcccaacatctacttcaagcagaagaagggcggcggcctgagcttcaacgccacctgttcccttacgcgctgcaacgagaaaatggtccagaccatcctgcactccttcaagatcttcaacgccgaggtgctcttccgcgaagactgcaccgaggacgagttcatcgacgtggtcaccgccaaccgtgtgtatctgccctgtctgtatgtctacaacaagatcgatcagatctccatcgaggaggtggaccgcttggcgcgccagccaaactcgatagtggttagttgcaacatgaaacttaatctggactacatgatggaggcgctctgggaagctctccagctcatcagagtgtacacaaagaagccaggcgctcctccagactttgacgatggattgattctgagaaagggcgtcagtgtggagcatgtgtgccatgccatccatcgcacgctggcggcgcagttcaagtatgccctggtgtggggcacctccacgaaatactcgccgcagcgcgtggggattgcccatgtgatggccgacgaggacgtcatccaggtggtgaagaaataaagattgttgcgtgtgaaatatatattctatgctataactg

SEQ ID NO: 13275 - protein, 363 aa, DROSOPHILA
MGILEKIAEIEREIARTQKNKATEYHLGLLKAKLAKYRSQLLEPSKKGEKGDGFDVLKSGDARVALIGFPSVGKSTMLSTLTKTESEAANYEFTTLTCIPGVIEYQGANIQLLDLPGIIEGAAQGKGRGRQVIAVARTADLVLMMLDATKPNVHRELLERELESVGIRLNKRKPNIYFKQKKGGGLSFNATCSLTRCNEKMVQTILHSFKIFNAEVLFREDCTEDEFIDVVTANRVYLPCLYVYNKIDQISIEEVDRLARQPNSIVVSCNMKLNLDYMMEALWEALQLIRVYTKKPGAPPDFDDGLILRKGVSVEHVCHAIHRTLAAQFKYALVWGTSTKYSPQRVGIAHVMADEDVIQVVKK

SEQ ID NO: 13276 - DNA, 14464 bp, DROSOPHILA
ccactcccctctccaacaccacactaccaataccctgccagcacgtttgagttgcccgtatttttgggttatcgcccggtcgtatttgtttatagagaaagagagaatttttttttttgtcttttttgacctgaccacctgttgctgggcgctgagcgcctgttgcgctagcaaataatcgatcgtcagttatttattgatttctgattgatgggccaaccaagtcccatccaatttgaatccaaacgacgtggcttaagggcgggggattagcgtctgctacgtgggatcttcgtgtgtgccggggcggattagctggctttggtcatgcggctaacagaaaaacggcagcaggcagagatcgcgtcgccagtggaaatttgaataaaattaacattacaactacagtagtcggcggcacagaatgctgataagcgcttaacttatcaaatgcatacataagtggttttcgtttggttaactttagtttattcatttttgaaatgtctataacagaaacccaagaaaacatatttaaacataaacacttaggagtctaggaatcagggacgaaggtaattttgggatatactcgtatatgtaaattgttttttttctaagttttttaatttgttttgtttttttttttgtagttttgtgactgttttagcaaaacttatttagctacgccctaagcctaggcaatattatcaatttttttttttttttttttttttttttttattttacgatgatgtttttattatttgatcaacgcactgttacccatgcggcaacttaatttgatctgcttaaattattttattttacaatgtgtcttggttacttaagactaacagatttttaatcctaaaaatgatagggagaattataatagttgatataacatagtaattattatttatttgattattctaatgaattttaaaactaagactttctaggtcaaaaccaggttagggaggtcatgagggtggtgaatattatcaatacgatcgttgaaaacccaacacccgaaagtatgctataagtacgaacgcctacttgcgactgcccttgcgacacaattgctgtaccgcctgcgctgccgccaggaaactcttctcggcgcagcgcttgggccagtcctaggactcgtagagcagccgctgatagtgtggcaggacctcgtgccggtttacatgcaggctaaactccagagccacaagcacagcgaactccgacgagatcagctccttgcgattcaaccggaacacgctctccgtcttctcgatgaggctcttgagtgcgtcacccttcacgtcattcatcttggcgctgagcagcagacaggcgccggcgcacagcttgcggttgctcttgttaatcagattggccaggatgagcttctcgaagtacacgtacgcctgcgatatggtcaccagatcgatgcgcgagtccaacttgttgattcggcgcatttcgcgcttaatgctgcaagtgaaacgtaaatggataagtagtgttcctttaaatggttactgaaagaaggttatgggttcactttctcaatattactttctattgagagtaactttttccattccttttaaaagtgaaaccatagtccttcagattccttgtcacttacctcctcagcttactcagtgtgagctggatggtggggaacttctcgcgaaacttatcgttcagctccttcttaagatcggatggacgcacatagtcaatgaccgaggtcatgtaagaggtgaaggtaagcaacgtgcgatgctttccggcaatcaactccggatcgtccaaaatgctagcggagtactgcggattacgcaagacataactctagttagtaaggatatacattcatagagataaccattcaacttaccacctgaccacgcgacgagtctccgcccaggataacactctctatgtccatatccagtttcatgtctggcgtcggactggttgcactattgcgattgttgttctcataagtgaagcacctgcgaagtcaatttcgattgattaggatgcacactaaatacgaattatatgctaagatagcgcgtgatagaaggcgggattgggttagtcgaagcattgctgttcgtcggatgtgtgcgagagtgggtggctggaggtgtgtatgtggggataggtgaacttggttagtgggctagaagcttttggcagtcgaccaggctttgaaactacagcaattcaactactgaagctagtagtaacatagctaggttggctgttttgtttttgtcatattagctgtttttcaaaatttaccatttgccttgacgtttggttatggtttttgtgctgaaacgaagtagtgcaaagcgttaaatgaattagcaaaagttaatggcacataatggttttatttttgttttgttttgttttttttttttgggtcaactattaccgaaccaaagcaaagaaaacaattgaacattgtagcttatcaagcgataaaaatatctttcgattttggggattatataaatgcgaacaatgtgctgagcttcagtaaatatataattattggtttgggtaacattcgcgctcaactcttgatgagtcagattttcaggtcttgctgggtcagctttatggctgttgacaaacacgagctaaaccagtgtctccactggcaaccgagtaatgcgagaaggtaacaaagaagcattatgtttacttttcgttttaaacggaatggctacttgctcttcgatcggataaaggaattattagtttacagtggtcgttcggtatggctaaccatgcaatatgacgctcaatgaatgtttagaatggttcatgggcatgacatgacatgaaatggagctgattgaatgtgttcaacaaaaatgatacgaaagatgatccaaaatatgctggcaaacaggaagccggcaccaacctcgcaatgccatgattcttaagcgccgctgtgctcgtgatctccatttggttctcaaagatggaaggattcgccgatgcattgccatgcttcttgcgctccttttcgtactgacgtgaaggtatcagcaggtgaccatatgatatgtcctgtaaaaaacaagttgtagttaagatcagttacagttgagctaaacttattgacttacctgaccactttcggccttctgtatacccagcaaatcaaacggatcgaatggcgcatcgttgatcgagctcaaaggacgcgaagtggatggattccgacgacgacgatcctccttgcgaaactcagctctgcaaattggaacataattattataatactacactaataattagaatctagttttgcatgtcaccttccattcttgcccttgtaatagggaagtgaagagaatatgaagaacggaatcttgcgcgacacaagcaccattcgctcatcccgtgcctgtccaagtcccaatggctggccggaggttccacgccggctatcgctgatctggaccgacttgctgaggctgttccggaaactgcccgcatagtttcccgccggagtcaggctctccgtgctgctgtcgtcggtgatgtggctaacgctcgatccactcaagacataggtgcgcttcagaccgccgcccatggcaatgctcgaattggagcccacccgcatacccggcgccgtgttcaaacgtgccctccgctccggctgcaagttctgatcgcttgccccattgctgaaggtgctgcaagcgagaagcaggagatcggttagaatcgtagcgatctaaggagcaacaggcgctcaacaactcaagtagcatgaaaaacgcgcagaaaacgatacaaaaacgcgctgggctggaccttgaaggccccaagttgttgctgctttaaaatacgatttttttttggtatttataaattcaatgacaaatgttagcgaagagactagtgatgtcactttagctattaaccaaaaaaacatacttttaggatactttctttaaagaaattactttttaaatttttaaaataaaagcattgattataatgtaacattactattcatagttctactatacttattatagcctaactagctatgcctacgttcttagctctaaattgtttagcaatctgttttagtttatagctaattttagccattttatgggtatcttgtgggagcatcatctctggaactctcttcatcgcgggggcccattgtcacacccctcacgcaatgatcgatattttcacaggcccgcagaaacggagagaaaaatcagcggaggcagaaagattttcccttgtgcatttaaagggcgatcaggcccgctgcttatcgcttgtgtatttttggaaatcaaacaaacacatcaacacaaacacacacacgcatacacattcacacgctcgttggcacacacatgtgcaatgccgaagggcagccgcaacgcaagtcaattagccaactgaagtcaacatcttcacggcatctgtgcgcctggttgattaccttgggataattggtctaggtcgaggttacagtcaaaaaaagtgtggtctcttgaagcggaagggggcatggggcaggggggtctgtgcgcaaactcccctcaagttcgtcgtggtgacgattctgcgttaattagctggatgaagtgcaaggcagctcgcttttcattaaaaaaccccttgcaaacccaaccccaaaaatatgatggaagtggcgcctaggctgtcataacccgttaattagttggagcattttaacaggcgcacagaattagcagcaggaatttagttttacatgcttacaacagcagtgaagaaatgaagagggtggggatagctccaaaatgtgtgtgtgtctgcgtgtgtatgtttggccgaagaagaagaagtaaagggccgagcaaacatttatttttgtgcgtttgcttttgtgttttctgttcgtctaactattgactcgctaatgagtttgtgtgcgtgtgtgtgtgtgtgcgttgataagaggttgggcaaagtgcgtgtgcgagcgaaagggagtctatagaccaccactgcaactcaaacaataaagcaagtgagcatgtataggtccggtatttatagtttttctatttcaatttcgtttttcgaaactccgtctatgaagtgctgtgcccctgtgccaaaagcaaacaatatttaaattctaacaatagatttgatgaattgaaagaaaaatgattcagcattttttgaaccgacaaagaattggaagaaagttcgacgaattttttcaattcttcatgttacataacattcgaatatgtacagtgctatttatagatcgccagaaatgcgttagaaaattctcataacagaatcacagtactgtaattttaacagaatgttttacaaaattctttacacattctgctaatagcataatgtttaaaacatgaacaatccgacttgacttctgttgttgacataaccgatatgttaaaaatataaaactcaaatcacttagcaaatttgcatgccttgtagcatataaagaaagaaatcctatagctcttatctcccagctgtgcagatctaaagatatgtacatatgtctttctcctagagactatctctctgattttattttgattgcaaatattgaccaagaactgctactaaaagctttggtaaatatacttttcacgtctgcatgcgagagagcgagcaaataaatctgcccagagtttaatcgaagaaaacacaatattttaattgcaatatctttccattttaatggctttttctttgtgtgtatgtgtgtgtgaagcaatcaaatcaactgagtcaatcgcgcttttatcagcaatcgcttttgttattgtcatcgtgccttgttgtttttgctgttatctgctggctatgtgcaaacagatgttaatggaagtaagttttattatataagtttccgtttgaccagatcacgtgcccatgagcttaagcatgcagctctgctgataaaagctttcagccagacataaacaaaaactaaaaaatagactaaattaaatatgcaaatttattaaaacatgtttgacaacaccacaacttttaaaaaaaatttctaaaaacgcccgcaaaccgctttcgaatcgctagagaaacgctagcaaaccgctagcaaatgcaaccaacttccataaaagtatgtactcatttcttatgttcataatattttaactggaaataaccactactctactattatctgaaacaaccctagtagaagatacactgaaagtaataactagcaattgccacttgaggctttgttttggcgggcaatgacgcaaattgattccaacattatcaatactagctccctttcacctcgaaacaaaagtggatttcggaacgaaatggtgttctagataaggtggaaacacatccagcgaaaaccgccgacaagcaacaataacaataatcgcgttaggaaaggaaggcgtaaccgaagaataagcgttttgtaaacaaacagtgggagcaaaacggaatgccaaaaaacgccagcgatttcgggcgagacgggcaaaaacgtcgaacgaaatgtttacacaagccgaaagtaattacataaagcaaataggcaaaaaaaaaataaaaaattgcctatttacaagtccaattgaaggctgtcgataaaaagcacaaacaaagaaacacaatgatgtgtcgatatgaaacgagtacatttgtgttccattatttgatttcaatactttgtgtgaattaaaaaaattggatgttataacacgttcctactgttttcctcttctactgacagatcttaacttcaagagcaaaaactttggcaagagcgaaaaccgagaaatcagtgaaacgggaacccattttatccgcttttaaccgcttttactaccttcaaatacaatggaacagataaaacataataaagcgacttgagaatgacgtggagttcgggcatgtgtcgattaaatatatattaagtcgcagttactagcagagaagagcattaagtttagtcgatacgaagtgcatagagctttatttatcgcaaggggttctttgttttgtgtactacatatgtgcaatgaagtccacaaaggcggtgcaataagtatatttacgaatcggattaggtgtgtctatgtcatctttgggcttatcgttcatttcttcaccgacgagagagacaatggagctttatggcggtctgtgttgactttagcagagcttacatatgcacagaaaacaattggatagctttttcacaaatttttaaaaaaaaaagtttaagaacaaagttttttccagtgtttattaactaattgttctccgtgtgtactgaaagcaaatcaagttctaggggttggttgcataaactgggatgcagtggcaaaatgcagcatgcacttcaagctttttgcaccactgacacacatttcgcaacccgccggcacaaaggaacccctttttcgaaacggcgtgtccttgaacacaaggattagaacccctgaaacgcacaagtagtgcgaataaaaataacgaaaacaaacaagaacagggaaaaccggttcctattacgtcgtcgattgcataaaactctgcctcaaggttacccagtttgatggagtgaacgggatgggagggggtacgcagaggattttctcgctgtttggacaggtttgctggctggctggggcgacattgacattgaaattggtacgaggcagggagcaggatgaggccacaaaaaaagctcaagttcaatgctaagctttgccttttgccggctgaaggtccttggttgactgttgaatgaacaaaaagggccgggccactcccctaaatcaagttaattgccatgacgcaacctttggccaaaggaagtgaaaactgagaatgaaaaagaaaaaaatgatagatggggcaataaaaaaaaattgtttacgttttcggtagagttgcggattttttttcagtttttttttttcactcttccatattcccattcattggccaactccacataaagcagctcaggtttcaaaacaaaaactggacataagtagtttgttttggttttgccaattgcgacgcagtttgtttttgcgcctgcgcagctttttgtggcaagattcccacaccgaaaaatgcggacgattccgcatagcacaatattgttgtttgcaacaatgtgcctcttcaacaaattctggcatcaacaaaattgctatcccattccggagcggaaatagtaatgaaaccctagattggtgggtaaaaaacagaacttgctttttggattcaacgaagagcataatatttttttttcttttgctgcgaaatgagcgaaactgggaatacatatttgaaatcgcttaaagactttgtaactcgatgatgtggcaagaaattcacatttattgttcacgaactgagtcatgataaagggttaatatataattttaaaatcagctgacacaaaaaataccccttaattaaagtctttaacgtcactgagatatctcatcgagtgcttttataatcttcgaggcttcgatcatttccacatgccagataaacctgctgagtgtaaaagatctcatgataggactatccgtcatatatcaagatcattctaaccaatcttatcagttgattgctttgtgtatatacatacatatgtacatatatgatctattgctagttcatcgctacgataaggtgcaaaaatatcaaaatttcaagctttcgactttatcaaaatcgatcaaagaactcattgcaaggaaccctgataaaaatgtgtacatttcactatttgcgaagtatatatttctagttttccctatgatattcattgactatttgctattcagcgtgctaagtgttatgaatttgcatttttatagctcgttcgatagtttagctttcatggcgcagttagatcgtatatgtataaatgtatatgtatattaataaacgttttatggtataattagagttatagtaatagcatccttctcaagcttttgcatagtcattgccaaactaaaaccaaatccccgggaatttgatttgccacagcaaatggcaatgacaggtcgctgacaagccaattggctgcaagccaaatgcatatctacaagtatgtaaccaacggatggatgacaataagtccccttccccacccctgcggaatccgaggaaaaacgggttagccaccagttgagtggcggcggcatgcgaaagaaaccgaaaacgaaaacgctaggcaaaaatagcgaaacgccagcggagcacgactgcaaagctgcatgtggcaaacaaggtcagttagccaaagcgcatccaacgagttcaacgaaacttgtatctggcattggaagtgaaagctctgagatgcaccttagctttgcccagctttatgcacggagaaagacaaagaaagtccccccgagtagggggggggggggtagagtggggcgtaagttcaaggcagtttgcgagcggtttacgagcgtttcgctagcgatttacgagcgattcgatggcacacgcatttggacattgcgtaattactttgcgctaatacaaccagatataatgcccatgattcaacgttgacaggccgtttaagtgcgtgacaaaatgactggcgcctcggacaaaagttccgaattaaacgaacaccgcgacgcccctcgacatgcaattcaattcaacttaattcaaacaattgtttgcacagctttcggccgggcacgctctctaatttacgttaattgagccggcacacgttgatgaatgaagccgattcgattacaggccccaccctcccatccaacgcccaaccccttgcccctcatgagatcaaaatatttgatgtgtatttttggggtaggcgatatttttagcgccaagcgaccggcaacagacagactcctaattatgcagcatcaggcgttgaaaacgtgcaaatagtccctcgccatctgcgaaaatacgtcacaatcggaaaagcgctctctcaattttcacaagcttatgtttataaataattttcgatttcagaacgcccagcgaagtgttttgctttcgcggtactttcgatcaagctgagcctttttcgtaagcaaattagagaaccagtgtcaattggctaacgtaaacttagcggaaatttcaattaacaaatttggggaggggaaaaatcgatgccaattatgacgacagcttaattgaactcaacaaaagttcagtgatcaagcggaatgattcattcattctcgtagcgtagaaattatttataaatcaacaaagagcaaaggaatattaagcgaatttcattcgtacgtgtatggttggaaaatattgcgattggactaaggaaaactgtccacttgacgtcacgtgtcaatctatttctgagtgtctacaagatagaagatcgtttaattggaaaaacataaatttgaagctgcaataacttaacacatttcctgtttgaatattttggtaggttcccttatagtcgatctaatataacatttataatattatataaacttatggtaagaatctttacagttgcctcttcatacagctaatttgattacaacttctagcaactgcttaacaaaatgctgattagaaaccataataagctaagatagttcactgatatgacaaacatgaattgtgcattgattactcaccgttccctcagcggcaatagcttgctgcccgctccgccggccacgccaccgccgctgcccagattggacaccttgagcggtatcttgacgctgtccgaatcgctgccactctcggcacccgatcctccgctgccggcggcgcaacttcgtgcctgccgctgttgctgctgcaacttgtgctgctgctgctgctgctgttggagcttattgcccatattgccattgcccggtgcctggtggttatgacgacccgacgaggtcgggcgctttatgttgcgtctctcggccggcacaatgctgctgcgattgtgatcggcggccggcaggacgttcatcaggtattgacccatattttcagtttcactaaaatgcccgtccccatcgctggcaccggtggtgcagtcctccagtcccaatcccagcccgatgccgccatcgatgcccatgtggacatcggcgctgcagaggagcggcgaacagagggcgccattctggtgttgctgctgctgctgatgctgctgctgatgttgctgctgctgctgctgctgttgggtgtgttgctgttgttgctgttgctgctgctgctgcgtgtgatgccgcttctggtggttgtggtgcgtcgccgagtggctgcgctgatggtggtgctgctgatagtgcggatgaaagccccccgagccgagtcccagcgaggatgggttcttattctggttgcagagcaggctgctgccgaatgttgcgccgaatttggtgtcccgatgggtgccatctaacgagatattcgataggaacgagatcgcagccagtctgcgcctgtgtctcgtcttgttgagcgaacttgccattaggcgatgaacccttaattaccaagcgagattaaccgaagtgggtgctgtgggtcgtttccctggatgctccgatgttgctatatatgtacctatatgtatatatagtgtgtttgtgtgtgtgtgcatatactgtgtgggaatgtgatgttgcacttttctggaacactcttcgcgattctttacgaaaaaactggtttcgaaagtgattatgctgctgttgtgtattttcactgctggttgctcacttttcttgatcgaatcaattaagttttttagtctctaacttggcagccgaattaaaaaacaaactacttgaacgcgacatggtgacgaatttttagcactttagatgacggaagatggttggaatacgaataattttatgcacttttattattaactagcgtttatgcgtcgatgcgttgctttggctgcaagtagaaataagaacagaagagaggaatggaatcaataaatgagactataaaaagcggcaggaaagctgcttttggccaagagaagctttctccgagcgtttctggaatattcgttgaagtgcagtgggtggcttaggggaaattgtggtcagcacattctcattctcagtgggcaaaatattgaatatgatataatattgttagcagaagtcatctcaatatgatattttataattagcaatgtttttaagctatttttaagtgaatatgctatggttttttcaactcttttagattatttacaatttttagacataataatcattttaaaaaatctcatttgaaaacaacgggcatttttaattttaagaattaaaagttttccttgaaataaacccgaatctttgctgggattttagccaactgaattgataaagcttttccgctggcagttaaaaaagctgcatgcggctcaaagctgcagtggttttagccgcctttgttgttgctgttgttgctggcgggcggcttagtgtgtcagtttagtgggtggcaacagtgcgaagagagggggtggcaaagagagagatattgggccacagccggcaaggaaaatctaagcgcttttccgcactttcgtgtgtgttttctgtttacattcaatacgggaggccctaaaatgcccaaaattttccctcgggcaacaagagcgagtggaaaatttttgagaaccatcataaacagctgttcgggaagcggggaaatagattttccggtggtggtttttttttacctaggatccagtctaattggatttacctggaccaattggagtgcggcggcacacacaagtttgagcctgtgcgaaaaatataaaatcaatgcaggaacaagtgtgtgcgaaaatatttatgacacccacccactcacacgctcgcacacacacacttgcaagcacacgcacacgtgtgacgtgttttttcgtgttttcccctcgtcttttacttaccactgtgcttggtttttccacggtcgttgggtattacttaaaacttaattcgattgatagtcgttctatgctgagaaatgtttcaagcgcgtcattttgatctatttttatagtgtttttttcgatagactttgattttttgcctttggctgccaactcgcctgcgctcctcactctctttggctctcttttgcacggctgtgtgtgtgtgtgtgtgtgttggtgcactcacgcagttgccttcgttgcgtaaattatgcaaaatgcaggccaattgcaatgtgtttacaaaaacagaacaaacgatcgcgttaagtgtgttttttgcgattttacgagcgcgttaactggtctctgcgaaatacgcaaacggtatgaacgtcaaaatattggcagcagcgacgaaaacatctgcagatgggcttacgaaaaattcacaaactgaggccagtgttgggcagcggacgaagggcgaaataccaattcaaagggaggcaaaatataccgcaatggtactctagaaaattcacgattgttttggtttgtccataacttcaacgtttaaataaggtgcacttagaaaattctagatgttcacaatttgtaaaaaaaatgtacacaagccaaagttatcttagttttatgaacaatttttctgtattcttaaaatattgtttacatgttaattaggatttaattactttggtattagctgcggtatcttaataccactacttttcaaaccttctggcaacgccatttcgatcagctgttttcgtgggacgcgcatgagaaaattattgtttgcggcatttcatgaaaatcgcgaaaaatggtgacaaaaacgataaaatctctgaatttagagatcaatttcgtaagtaccatgaaatatatgtaaatcacaactaacctatcaagtttttcacacacaggaagtggaggatgtgccgtatgaggaggaaatccttcgaaacgcctactccgtaaaacattggctgcgctacattgatcacaaagcgaaggcgccgaataatggtgttaacatggtctatgagcgtgctctgaaagagcttcctggcagctataagatctggcacaattacctgagaactcgcaggaagcaggtgcgcggcaagatacccacggatcccatgtacgaggaggtcaacagtgccttcgaacgtgcactggtgtttatgcacaaaatgccacgtatctggatggactacggtgccttcatgacctcgcaatgcaagattacccgcacccggcacgttttcgatcgggctctaagggctctgcccatcacgcagcacggcaggatttggccactgtatttgcagtttgtacgccgctttgaaatgccggaaacagcactgcgagtctaccgtcgatatctgaaactctttc

SEQ ID NO: 13277 - DNA, 3149 bp, DROSOPHILA
agatgttttcgtcgctgctgccaatattttgacgttcataccgtttgcgtatttcgcagagaccagttaacgcgctcgtaaaatcgcaaaaaacacacttaacgcgatcgtttgttctgtttttgtaaacacattgcaattggcctgcattttgcataatttacgcaacgaaggcaactgcgtgagtgcaccaacacacacacacacacacacagccgtgcaaaagagagccaaagagagtgaggagcgcaggcgagttggcagccaaaggcaaaaaatcaaagtctatcgaaaaaaacactataaaaatagatcaaaatgacgcgcttgaaacatttctcagcatagaacgactatcaatcgaattaagttttaagtaatacccaacgaccgtggaaaaaccaagcacagtgccaaagcaacgcatcgacgcataaacgctagttaataataaaagtgcataaaattattcgtattccaaccatcttccgtcatctaaagtgctaaaaattcgtcaccatgtcgcgttcaagtagtttgttttttaattcggctgccaagttagagactaaaaaacttaattgattcgatcaagaaaagtgagcaaccagcagtgaaaatacacaacagcagcataatcactttcgaaaccagttttttcgtaaagaatcgcgaagagtgttccagaaaagtgcaacatcacattcccacacagtatatgcacacacacacaaacacactatatatacatataggtacatatatagcaacatcggagcatccagggaaacgacccacagcacccacttcggttaatctcgcttggtaattaagggttcatcgcctaatggcaagttcgctcaacaagacgagacacaggcgcagactggctgcgatctcgttcctatcgaatatctcgttagatggcacccatcgggacaccaaattcggcgcaacattcggcagcagcctgctctgcaaccagaataagaacccatcctcgctgggactcggctcggggggctttcatccgcactatcagcagcaccaccatcagcgcagccactcggcgacgcaccacaaccaccagaagcggcatcacacgcagcagcagcagcaacagcaacaacagcaacacacccaacagcagcagcagcagcagcaacatcagcagcagcatcagcagcagcagcaacaccagaatggcgccctctgttcgccgctcctctgcagcgccgatgtccacatgggcatcgatggcggcatcgggctgggattgggactggaggactgcaccaccggtgccagcgatggggacgggcattttagtgaaactgaaaatatgggtcaatacctgatgaacgtcctgccggccgccgatcacaatcgcagcagcattgtgccggccgagagacgcaacataaagcgcccgacctcgtcgggtcgtcataaccaccaggcaccgggcaatggcaatatgggcaataagctccaacagcagcagcagcagcagcacaagttgcagcagcaacagcggcaggcacgaagttgcgccgccggcagcggaggatcgggtgccgagagtggcagcgattcggacagcgtcaagataccgctcaaggtgtccaatctgggcagcggcggtggcgtggccggcggagcgggcagcaagctattgccgctgagggaacgcaccttcagcaatggggcaagcgatcagaacttgcagccggagcggagggcacgtttgaacacggcgccgggtatgcgggtgggctccaattcgagcattgccatgggcggcggtctgaagcgcacctatgtcttgagtggatcgagcgttagccacatcaccgacgacagcagcacggagagcctgactccggcgggaaactatgcgggcagtttccggaacagcctcagcaagtcggtccagatcagcgatagccggcgtggaacctccggccagccattgggacttggacaggcacgggatgagcgaatggtgcttgtgtcgcgcaagattccgttcttcatattctcttcacttccctattacaagggcaagaatggaagagctgagtttcgcaaggaggatcgtcgtcgtcggaatccatccacttcgcgtcctttgagctcgatcaacgatgcgccattcgatccgtttgatttgctgggtatacagaaggccgaaagtggtcaggacatatcatatggtcacctgctgataccttcacgtcagtacgaaaaggagcgcaagaagcatggcaatgcatcggcgaatccttccatctttgagaaccaaatggagatcacgagcacagcggcgcttaagaatcatggcattgcgaggtgcttcacttatgagaacaacaatcgcaatagtgcaaccagtccgacgccagacatgaaactggatatggacatagagagtgttatcctgggcggagactcgtcgcgtggtcaggtgtactccgctagcattttggacgatccggagttgattgccggaaagcatcgcacgttgcttaccttcacctcttacatgacctcggtcattgactatgtgcgtccatccgatcttaagaaggagctgaacgataagtttcgcgagaagttccccaccatccagctcacactgagtaagctgaggagcattaagcgcgaaatgcgccgaatcaacaagttggactcgcgcatcgatctggtgaccatatcgcaggcgtacgtgtacttcgagaagctcatcctggccaatctgattaacaagagcaaccgcaagctgtgcgccggcgcctgtctgctgctcagcgccaagatgaatgacgtgaagggtgacgcactcaagagcctcatcgagaagacggagagcgtgttccggttgaatcgcaaggagctgatctcgtcggagttcgctgtgcttgtggctctggagtttagcctgcatgtaaaccggcacgaggtcctgccacactatcagcggctgctctacgagtcctaggactggcccaagcgctgcgccgagaagagtttcctggcggcagcgcaggcggtacagcaattgtgtcgcaagggcagtcgcaagtaggcgttcgtacttatagcatactttcgggtgttgggttttcaacgatcgtattgataatatt

SEQ ID NO: 13278 - protein, 717 aa, DROSOPHILA
MASSLNKTRHRRRLAAISFLSNISLDGTHRDTKFGATFGSSLLCNQNKNPSSLGLGSGGFHPHYQQHHHQRSHSATHHNHQKRHHTQQQQQQQQQQHTQQQQQQQQHQQQHQQQQQHQNGALCSPLLCSADVHMGIDGGIGLGLGLEDCTTGASDGDGHFSETENMGQYLMNVLPAADHNRSSIVPAERRNIKRPTSSGRHNHQAPGNGNMGNKLQQQQQQQHKLQQQQRQARSCAAGSGGSGAESGSDSDSVKIPLKVSNLGSGGGVAGGAGSKLLPLRERTFSNGASDQNLQPERRARLNTAPGMRVGSNSSIAMGGGLKRTYVLSGSSVSHITDDSSTESLTPAGNYAGSFRNSLSKSVQISDSRRGTSGQPLGLGQARDERMVLVSRKIPFFIFSSLPYYKGKNGRAEFRKEDRRRRNPSTSRPLSSINDAPFDPFDLLGIQKAESGQDISYGHLLIPSRQYEKERKKHGNASANPSIFENQMEITSTAALKNHGIARCFTYENNNRNSATSPTPDMKLDMDIESVILGGDSSRGQVYSASILDDPELIAGKHRTLLTFTSYMTSVIDYVRPSDLKKELNDKFREKFPTIQLTLSKLRSIKREMRRINKLDSRIDLVTISQAYVYFEKLILANLINKSNRKLCAGACLLLSAKMNDVKGDALKSLIEKTESVFRLNRKELISSEFAVLVALEFSLHVNRHEVLPHYQRLLYES

SEQ ID NO: 13279 - DNA, 6133 bp, DROSOPHILA
ttccaggacatagccaatgtccagtcgccaccagggctcgatgtgtatgcgcaccggaaagcgtggcaggaagtccagcggattgggccgcgacccgaagatcaaggagcgcggtgtgtgagttttcatatcgctaataagggccaggtactcgttgcggccaatgcccaagacacgcagacagtcggctgctgtaaagttgggcaaagtatcgtagcttttgtcgctttgcaaaagctgacccaaaacatccagatagtagttgaagggcgtcaccctcaagcccttggtgacgatatcggccaggtggtagggaaatgcgcccaatccattgatgctcttctgtatcaatagctcgtagtagcgttgctcccggcgaaacaccttggcggccaggttgccccggaacctcagctgattctttagactatagttaaagacgaacttctcgtagtcacgctgattgttgtgcagaaccgatcgcaggtgcacgggcagcagttcccaggtgacattcccacgcacacattgctgcagttggttttggcaattggttccagagccagtggtcgcattgccacctccgctggtggccaaatcctcttgctccgtcatcttgcgactcggattggtttctccggctggtcggactaactcattgcattcgctccggctacggaatccagtattttcttcctgcgtattatttttctttttttttcgaggaacgatagatccgataatacggacacggtgttattggtttcatacgtcgacagctgataagaccgccggtgttttgcagcactggcgagcaaccagtttttcgatagttcgattattattagtattagtcataatatcccttggagtttcacaatcacgtttaaaagtgcaaacatccaacggacgtctatcggcagtgactaacaatactgtccgataaagaatgtgcctatcggtgtgctgtcgatatcactagttcatcgatagcacatcgtttagaatgattttcaatattcgttgctgcctgcttcattcataaacacttacgctattacagtcaaaattgtcaaaacgttgacgaattatcgagctttaaaggattgctatcagattgcaaggaagtcggcgttcagcgctcgacgagcgggcaacagaggcaacggcagcggctgagtagcttcagcataagaattttaggtagccgcgacacaaaaaagggacatcaacatcgatttttttttgctcccatttcgttttgtgagtggagcaaaatcactttcgacaaacaaagaaaggggcggcggcggtgggggcgtaaagtgcgcagatttcagcgaagatgaacggtggcgggggtggcgaggatgatcagcatctgccaggtgtttccaggtgaataacttcagctacttacgttgtggcatattaaatctgattttctttgccccccatcagtgcatcaggatctgcagctggagcggtgggcgggcgagccacgcccgaaatgaagcgttcggcggtgcgcagcctaatcaagcgatacttccaccaactacaatccggctgtgggaacgccaactgcagcaatgccaattgcgcctccagcggcaaggtggcgcccatgacgcccaacgaggtggccgccagagcactgcagctcttttcacaggatgcacagctctgcgaggcgttcacatcggaggccaacaggtgagaattctcttaacaaatggaactgggtagcaaagtttccagagcaccgataagattttctataggtaattatctttcaattaaattttttcccattttagcccccaggacgtggacatgctttcgccgaacgacagtagcagtagtagcagcggcagctcgacaagcacaattacctcagccagtaccaccacgacaaccagcagacaatcgcagtcaacgccagctgccgttgtagtgcccgtatccagtccatatcttacccagagtgtgccgcaactggatatcgccggcgctgaacactcctccggcgactcggaaccgtgtacacccaccctggcgccagtccacagcttggatgccaacagtctgatagcgctctatgagcaatgtagggcggctgacagttacgacaggatttgccacgcaatcggcgttgtgttctccagcgtagatagactgggcaagagcttcattcgcagcgcagaaccagcggcttctagtagtctccaggagctgctggccaattcaccgggggctttaaacaaggagcagctacgaactttggaaggggaacacgataaagacgaagacagtacacaacaggtggacgaacaatcagaatcggcggctaatgctactgctactgcagaatcagtcgaatcagaggcggagcccgaagaagaggacgatgatgtgtgttcatcccaaagcagcgacacactggtggatctgcccggtttgcgacgagtgcagcgtctcctttttggctgtcaaatacgagctataacggagaagcttaccagcagcgttattcagctgtctgactgggtgatttacatgcgtacggattgggagagggtcattcactgtctggtcatctgctttgatctagccaccaatagtgagtttttcaattgtatgcctggaatgtttcaagttacagcttttctcataaccctttagccaataacagtgtggtggacatggactatctggacagggtgctgccaaaattgtgccaagcggcgtcggccatgccagtgccggcacaggcgcgcctggccaggatctgggctgctcattgttcagatcagctgcattcgttgatcgcagcctgccagcagcaaattactctacaggtgcttttggacgaggaatccatgcgcgagaacgaatccataatcagtgtcaccaaagttttaaaggtatttgttaggtttattatgcaatatggcttgtaatgcagttgggttaacttcttctgtgatagattgtcttctacgcgaacattctggctagcgagctggagcgaccgtcgtgtcgggtgccgctggaggatcgaacggaagcggcgaccgcatctggcagcgcagcagtggaggacgacctattcgtctacaactctttgttggagccgcacatgcccaaattcgccgaggatcagtttgaaaaggagctgcaggtgtcggcaatcgattgccggaaaccactgataccacttgaggagttctacaacgaggcactcagtgaaaacattcagatgcaccacgactacctgtcctacaagacgttagccatggagagcgagattggttccggccacgcgaactatttttcgttcatgctgtacgcctttatcctcacgccgtcaacaaaagtggatgccttgtactatgacagtcgaatgaggatgtatagcgagcgctactcctcccttcactccatcctcaacaatattggccaggtaggacaggaagataatcctcggccggatcttaagctgacggtgcgaagggaccagctcatcaacgacgcacttattggggtgtgtacaaatggttctttagtgtcctagttaacaggcgtaattaatacacgtttaattccccagctggaaatggtggccatgagcaatccaaaggatctcaagaagcagttggtggtggagtttgtcggcgagcaggggatcgatgaaggcggcgtatccaaagagttcttccagctaatcgtggaggagatatttaacccggcttttggaatgtttatacagcaagaggagaccaacaatatgtggtgggtattcaattgggataaatctgttcagttgaactatataaatatatatatatacatatgcaggttcaatgccacaccatttgagaacggagcgcaattcactctgattggtataattattggcctggcgatctataacaacgtcaccctggccgtaaacttccccatggtggtctatcgcaagttgataggctattgcggcacgttcgcagacctcagcgactggagtccggcgctgtacaagagtctgaagtccatgctggactatcagggccaggatatggaggaggtattcgaacagaccttcaagattagctatagcgatgttttcggtgatgtggtacaacacgaactggtgccgaacggccaggatgtactggtggggcagcacaacaaggaactgtttgtcaacctgtacagtgatttcctgcttaacacgaatatcgaacagcagttcaatgctttccgcaagggcttcgaaatggttacggacgaatcgccactgaagctgctcttccgtccagaggagattgaaatgctggtctgcggcagtcgtgtgagtagctaaattcaaattacgaaattcattcggttgctgaactctgaaaccttcggcaggaattcgactttgtggaactggaaaactccactgtgtacgagggcggctacacggagaagagccagtacatccaggacttctggagcatagtgcatgcgatgcccagcgaggacaagcacaagctgctcgaattcacgacgggatcggcgcgtgttccggttggcggcctgaaatgcctgcgtctgctaatcacgcgtcacggtccggatagcgatcggttgcctacctcgcacacctgcttcaacgttctcctcctgcccgagtacagcagccgcgagaagctggaggagcgcctgatgaaggccatcaactactcgaagggcttcggcatgctgtagactatggtccaaactgcaagtgcaagtctgtcatctggaactgataccaccacctctctgggaagaagatttcgaagactttgatcggtttgagttcgttttgggttctgccatttatttttgatacgacctgttcaatgagacaatatatacatacccaatatatgtgctcaatttatatggtgcgacggcgaagcgagcagaccgaacggacacgcgattttgtttcccttctttagcccagttaattgtacataaacacacacataaacacgccacatactacattatgtgaacttaccctaggaacaacacccacatttaaaaacagtacgcgctgaatattttcctaaataaatttaaagtagttcggcgaagaaacagatgtattttccatttagattggttttcgcaagtatggaatattttttaatattagatatttttaatttaaactaagattactaacaaattaaaattgtggaaaaagattcatttaaattatatttacatatttaatttagtatagaaacatcaaatacaaaacattttgtaagcaatatttcacactagctgacatttaaatttcggtgtgaagtactttttattttttaacttaaaaaataacttgttaactttattttttatttagtctagacacatttaaaaaaaaaagaggtgtgaaagccttatttcacaacagctgacttgggactagtggattttttaggccctttttttcaggcgatattttctaacggcttagccgcagccacacatttgttattcgcgtttctgagtttcttgcgggtgggactcccgatattttgtggagcggaaggtgttttgatttccttagcatttagcacaaaaaaatgcaactagtataaagtactgttcactataacaatttttaaccaccgatagcgagtgcttcactgtgtgtgcgagtaagagagagagagagcaactagctccagcatcatgagaatacaacaaagcgccttgttgttgttgctgctggccgtgacgtcgcaaggagatgccgagtccaattggaatggtttgttcttaatttctaactagaatgagttcatcagcagccatagaaaattatattgcattcatgttttcatatttttcgatcttaagtgcattccactgccgtacttattacacaaatgcacagagataaaaagggatgtgatgcggttggttttttcttatcattcttgataagaaactagaacatccttttctcgttcaaaacataaaaagtccgaaatgtagtttccccttacttttttctgtgtatgtgcagtacatatctcagagaatttgtttatgatccatataccacccgaccacatctctcctt

SEQ ID NO: 13280 - DNA, 3645 bp, DROSOPHILA
tttagaatgattttcaatattcgttgctgcctgcttcattcataaacacttacgctattacagtcaaaattgtcaaaacgttgacgaattatcgagctttaaaggattgctatcagattgcaaggaagtcggcgttcagcgctcgacgagcgggcaacagaggcaacggcagcggctgagtagcttcagcataagaattttaggtagccgcgacacaaaaaagggacatcaacatcgatttttttttgctcccatttcgttttgtgagtggagcaaaatcactttcgacaaacaaagaaaggggcggcggcggtgggggcgtaaagtgcgcagatttcagcgaagatgaacggtggcgggggtggcgaggatgatcagcatctgccaggtgtttccagtgcatcaggatctgcagctggagcggtgggcgggcgagccacgcccgaaatgaagcgttcggcggtgcgcagcctaatcaagcgatacttccaccaactacaatccggctgtgggaacgccaactgcagcaatgccaattgcgcctccagcggcaaggtggcgcccatgacgcccaacgaggtggccgccagagcactgcagctcttttcacaggatgcacagctctgcgaggcgttcacatcggaggccaacagcccccaggacgtggacatgctttcgccgaacgacagtagcagtagtagcagcggcagctcgacaagcacaattacctcagccagtaccaccacgacaaccagcagacaatcgcagtcaacgccagctgccgttgtagtgcccgtatccagtccatatcttacccagagtgtgccgcaactggatatcgccggcgctgaacactcctccggcgactcggaaccgtgtacacccaccctggcgccagtccacagcttggatgccaacagtctgatagcgctctatgagcaatgtagggcggctgacagttacgacaggatttgccacgcaatcggcgttgtgttctccagcgtagatagactgggcaagagcttcattcgcagcgcagaaccagcggcttctagtagtctccaggagctgctggccaattcaccgggggctttaaacaaggagcagctacgaactttggaaggggaacacgataaagacgaagacagtacacaacaggtggacgaacaatcagaatcggcggctaatgctactgctactgcagaatcagtcgaatcagaggcggagcccgaagaagaggacgatgatgtgtgttcatcccaaagcagcgacacactggtggatctgcccggtttgcgacgagtgcagcgtctcctttttggctgtcaaatacgagctataacggagaagcttaccagcagcgttattcagctgtctgactgggtgatttacatgcgtacggattgggagagggtcattcactgtctggtcatctgctttgatctagccaccaataccaataacagtgtggtggacatggactatctggacagggtgctgccaaaattgtgccaagcggcgtcggccatgccagtgccggcacaggcgcgcctggccaggatctgggctgctcattgttcagatcagctgcattcgttgatcgcagcctgccagcagcaaattactctacaggtgcttttggacgaggaatccatgcgcgagaacgaatccataatcagtgtcaccaaagttttaaagattgtcttctacgcgaacattctggctagcgagctggagcgaccgtcgtgtcgggtgccgctggaggatcgaacggaagcggcgaccgcatctggcagcgcagcagtggaggacgacctattcgtctacaactctttgttggagccgcacatgcccaaattcgccgaggatcagtttgaaaaggagctgcaggtgtcggcaatcgattgccggaaaccactgataccacttgaggagttctacaacgaggcactcagtgaaaacattcagatgcaccacgactacctgtcctacaagacgttagccatggagagcgagattggttccggccacgcgaactatttttcgttcatgctgtacgcctttatcctcacgccgtcaacaaaagtggatgccttgtactatgacagtcgaatgaggatgtatagcgagcgctactcctcccttcactccatcctcaacaatattggccaggtaggacaggaagataatcctcggccggatcttaagctgacggtgcgaagggaccagctcatcaacgacgcacttattgggctggaaatggtggccatgagcaatccaaaggatctcaagaagcagttggtggtggagtttgtcggcgagcaggggatcgatgaaggcggcgtatccaaagagttcttccagctaatcgtggaggagatatttaacccggcttttggaatgtttatacagcaagaggagaccaacaatatgtggttcaatgccacaccatttgagaacggagcgcaattcactctgattggtataattattggcctggcgatctataacaacgtcaccctggccgtaaacttccccatggtggtctatcgcaagttgataggctattgcggcacgttcgcagacctcagcgactggagtccggcgctgtacaagagtctgaagtccatgctggactatcagggccaggatatggaggaggtattcgaacagaccttcaagattagctatagcgatgttttcggtgatgtggtacaacacgaactggtgccgaacggccaggatgtactggtggggcagcacaacaaggaactgtttgtcaacctgtacagtgatttcctgcttaacacgaatatcgaacagcagttcaatgctttccgcaagggcttcgaaatggttacggacgaatcgccactgaagctgctcttccgtccagaggagattgaaatgctggtctgcggcagtcgtgaattcgactttgtggaactggaaaactccactgtgtacgagggcggctacacggagaagagccagtacatccaggacttctggagcatagtgcatgcgatgcccagcgaggacaagcacaagctgctcgaattcacgacgggatcggcgcgtgttccggttggcggcctgaaatgcctgcgtctgctaatcacgcgtcacggtccggatagcgatcggttgcctacctcgcacacctgcttcaacgttctcctcctgcccgagtacagcagccgcgagaagctggaggagcgcctgatgaaggccatcaactactcgaagggcttcggcatgctgtagactatggtccaaactgcaagtgcaagtctgtcatctggaactgataccaccacctctctgggaagaagatttcgaagactttgatcggtttgagttcgttttgggttctgccatttatttttgatacgacctgttcaatgagacaatatatacatacccaatatatgtgctcaatttatatggtgcgacggcgaagcgagcagaccgaacggacacgcgattttgtttcccttctttagcccagttaattgtacataaacacacacataaacacgccacatactacattatgtgaacttaccctaggaacaacacccacatttaaaaacagtacgcgctgaatattttcctaaataaatttaaagtagttcggcgaag

SEQ ID NO: 13281 - protein, 973 aa, DROSOPHILA
MNGGGGGEDDQHLPGVSSASGSAAGAVGGRATPEMKRSAVRSLIKRYFHQLQSGCGNANCSNANCASSGKVAPMTPNEVAARALQLFSQDAQLCEAFTSEANSPQDVDMLSPNDSSSSSSGSSTSTITSASTTTTTSRQSQSTPAAVVVPVSSPYLTQSVPQLDIAGAEHSSGDSEPCTPTLAPVHSLDANSLIALYEQCRAADSYDRICHAIGVVFSSVDRLGKSFIRSAEPAASSSLQELLANSPGALNKEQLRTLEGEHDKDEDSTQQVDEQSESAANATATAESVESEAEPEEEDDDVCSSQSSDTLVDLPGLRRVQRLLFGCQIRAITEKLTSSVIQLSDWVIYMRTDWERVIHCLVICFDLATNTNNSVVDMDYLDRVLPKLCQAASAMPVPAQARLARIWAAHCSDQLHSLIAACQQQITLQVLLDEESMRENESIISVTKVLKIVFYANILASELERPSCRVPLEDRTEAATASGSAAVEDDLFVYNSLLEPHMPKFAEDQFEKELQVSAIDCRKPLIPLEEFYNEALSENIQMHHDYLSYKTLAMESEIGSGHANYFSFMLYAFILTPSTKVDALYYDSRMRMYSERYSSLHSILNNIGQVGQEDNPRPDLKLTVRRDQLINDALIGLEMVAMSNPKDLKKQLVVEFVGEQGIDEGGVSKEFFQLIVEEIFNPAFGMFIQQEETNNMWFNATPFENGAQFTLIGIIIGLAIYNNVTLAVNFPMVVYRKLIGYCGTFADLSDWSPALYKSLKSMLDYQGQDMEEVFEQTFKISYSDVFGDVVQHELVPNGQDVLVGQHNKELFVNLYSDFLLNTNIEQQFNAFRKGFEMVTDESPLKLLFRPEEIEMLVCGSREFDFVELENSTVYEGGYTEKSQYIQDFWSIVHAMPSEDKHKLLEFTTGSARVPVGGLKCLRLLITRHGPDSDRLPTSHTCFNVLLLPEYSSREKLEERLMKAINYSKGFGML

SEQ ID NO: 13282 - DNA, 6801 bp, DROSOPHILA
aaatgttctagaccacaacttaaaaatttccaaacattcatgccttattattcttttgtaaaaagtttagaaatgccatcaatttaattgaacaaaatttttgaaggtccatttatcccctgccaaatgttaataaaccaatgggatttatttacaaaactttgtgctaagacttccaatcattagtatatatatatatatatatatacaatttgcagatatttgtaaatatatatgcacatctaggtataatatacctagagtataatacctaagtataataatacttaatgaacttatgaacttttttggactgcttagttattgaatgaaatttcctgaaatttcttagttcttatatgtaaactatctcaagtcgtagaaatgctacgatttgcgatgtttctagctttgaaatgacaattttctgatatattttactggtaattgggattatcagcattctatcaatcagctttcgtacggttagcatttacatatattcgaacgatcttttgaactcaccttaataaacgcaccttactgcgaagttatggttttatagtttatagttttatcgcagttactgggcccgaggttattacctcctgtttctgaagtgcaccactcagacccttttttgagttttcgatagtaatgtggattagttggttatcacgaatgcacttgtgtttgcaatcggttttcagaaaccaattaagcacttgagcaatttatggtgttaaaacgattaaatggatcaatctaaagccagtttagcaatctttaaaggaatacttaagagcgcgcatgtacatactttataagcctatcagtatttcaacccggcgaattacccgcacatacatacctacaaacgatcctaagtacaaacatatgcatatgtacatatgtgggaatacttgctcactttctcaattttcgtacattctcaagtaggtctcgagctgagtttacgatctcaggttgagcagtccgcattgagaggccgatgcgatcgtttgggtcggttggaactttctctataagtcggttgttcccgcaacctctgtgtgcctgtgtgtgtatatacatatatatatatcgtgcagtactgtgcaagtgaaaaatcaaaagttgaatgtaaagtgcacaaacgtaaataaataaaatacgaaaagtgcaatgtctgcgaagacttcggtgtggctggtgttcttttgcgccctcggctgcctgattcacgatgccgatttgcggagtattcaaccaaaagcatcccagtgcggctatcaggtaggttacttaaaccattcttagaaaaaggcatagaaatggtggggcatgcaacatgttgcttgcagccttgcaaatacagaaaacaccttctacaggttcagtttaaagtaagaatggaactgattactggtatacagtataaacgcatagggtatataaatttgccggcaatctcagcattaatttgtgaacaaatgcaaaaggtgaaaaataaaggcaaataagctattcgattttgcactgataagccttaagcaaaggagaaaaatgatataggacttgagacagttaagtgccgatacactcaactcactaaactatttcaaaatcgtaaagcagatgaaatgaatgaagttctgatatatttattgtaatttatataagcaatgcatagcttagttagaaattctgaatggcaagataaagaggatttaataaatctgaaaaaaatagatataaatattccaattttgatttttcagagctgccatccaaccaaacccaacatgttgaacgtgcacctggtggcccacacacatgacgatgtgggatggctgaagaccgttgaccaatactactatggcagcgagaccaagatccaaaaggctggagtccagtacataatcgattcggttgtggaggctctgctcagggatcccgagaagcgtttcatctatgtggaatctgccttcttcttcaagtggtggaaggagcagaagcccaaggtccaggaggcagtaaagatgctggtggagcagggaagactcgaatttattggcggcgcctggagcatgaatgacgaggccaccacccattaccagagtgtgattgatcagttctcctggggattgaggtatgtctgaatgcgctgatacatttttgtattaactattaaatgagtttttcaaatgcagacttttgaatgatacctttggtgagtgcggacgtccgcgtgttggatggcaaatagatccctttggtcattcccgtgaaatggcatccatgtttgcgcaaatgggtttcgatggcatgttcttcggtagactggactaccaggataaggacgagcgtctgatgaccaaaaatgcagagatgatatggcatggatcagcgaatttgggtacttaacttacgctcattgtaagaccttttaactaaatctacttgctatattttaggagaggaagcggatctgttcagtggcgccctctacaacaactaccaggcaccagatggcttctgcttcgatatcctatgcaacgatgcacccataatcgatggcaaacacagtcccgacaataatgttaaagagcgcgtaagaactgataccatatgtggtcttttttatgttttactctggcattggttgagcttctgttatgtctttcatttgtgtatcccattcccatcattattagatcgatacgtttttggatttcgccaagacccaatcgcaatactaccgcaccaacaatatcattgtcacaatgggcggtgattttacataccaggctgctcaagtttactataagaacctcgacaagttgatacggtaattgcatattgttatgtccttgcgcagctaactgttaaagaaagccccttcaaattccaaattgttctgtccaaaactgtgccgtccgttatcatcccagaaacctagttcaatttgactgccatgtgtgtgaaaaaacaggtggatgcattcctggcttacgtaacggaaatggccgaacactttcgcacgcccaacgtgattctgaccatgggtgaggatttccactaccagaacgctgatatgtggtacaaaaatctggacaagctaattaagtaagtaggggctttccttaacagagcttggcgatgagaaaaggcataggcactatatagttccctttttttacctacccatagatatggcaatgaacgccaggcaaatggttcgaatatcaatcttctatactccactccatcgtgctatctgaaatccctgcacgatgccggtatcacctggccaaccaagagcgacgacttcttcccatacgcttccgatcctcatgcttactggacgggatatttcacatcgcgacccaccttgaagcgattcgaacgggatggcaatcatttcctgcaggtctgcaagcagttgagtgccctggcgcccaagaaacccgaagaattcgatccccacttgaccttcatgagggaaacgctcggaataatgcagcatcacgatgccataactggaacagagaaggaaaaggtggctctggactatgccaagcggatgagtgttgccttcagagcttgtggagctaccactcgtaatgccttgaatcaattgacggtgcaatcgaaggataatgtcaaggatacgtcggccaaatatgtgtttgagttcaaaacgtgtgccctactaaatatcacctcgtgtcccgtgtccgaggcgaacgatagatttgctctaaccctctacaatccactggctcacacggttaatgagtatgtgaggattcctgtgccatattccaactacaggatcatcgataacaagggtatgttgcatagaaaaagctggaagagattcagtataaacagatgatcattactttcaggtgttactctggaaagccaagctgttccgattccccaagtgctgatcgacattaagcacagaaattccacagccaaatacgaaattgttttcctagccaccaatattccagctttgggataccgtacatactatgttgaaaaactggatagtaccgagggtaatactagatcaaaggctttgccgaaaagaacctccagcgttacagtgattggaaatagtgtaagatattaacacagttctatatatataatttatataaattaatatattttttttatgtttctagcacattcaacttggtttcgacaccaatggtttcctttccgaagtcactgctgatggcctaaccagattggtcagtcaggagttcctattctatgagggtgctgttggaaacaacgcggagttcctgaatcgatcatctggtgcctatatcttccgacccaacgagaacaagattcactttgccaccgatcaagtcgaaattgaagtctacaagggtgatctggttcatgaggtgcatcagaagttcaacgattggattagccaggtggtgcgtgtttacaacaaggattcatacgccgaattcgaatggttggttggacccattcccattgatgatggcattggcaaggaggtgattactcgcttcaactctgacatcgcttcggatggcattttccgcaccgattcaaatggtaattccgaggaaagtcataagttttaagatcagattttcaagccaaattacttctaacaggtcgcgagatgatcaagaggaaaatcaaccatcgcgatacgtggagtgtgaaaatcaacgaagccgttgctggcaattactatcccattacgactaaaatagatgtggaggatgacacagcccgcatggccatacttacggatagagcccagggtggtagctccttgaaagacggatccttggaactgatggttcaccgtcgtctgttgaaggacgatgcctttggtgtgggcgaggccttgaatgaaaccgagtatggcgatggactgattgcccgaggcaagcatcatctgttcttcggcaagtcgacggatcgggaaggtgtttccctcaagggaatcgagaggctaacccagctggagaaactgctgcccacatggaagttctttagcaatatggaggattacagtgccgatgaatggcagacagctttcaccaatatcgtaagtggctggcatacttataaaatgaattgatgttatttcaattgaaatcttatagtttagtggaatttcattggttctgccgaagcccgtgcatctgctcaccttggagccctggcatgagaaccaactccttgtgcgcttcgagcacatcatggagaacggcgaggatgcatcctactcccagcccgtgcagttcaatgtcaagaacgtgctgagtgccttcgatgtcgagggcatccgtgaaacgactctggatggcaatgcctggctggacgaaagtcgacgacttcagtttgcgccggatcctgaagaagccgcgttcaacacgtatgccacattctcgcaacccgccgaatccgttcacctactaagtgccgagaagcccatgttgggtgttaagtacgccgacgaagccttgccagctggacagctgggtgccgagagcaatcgcattaggcgcgaaacagaaacgcgacaggagaaaaaggacgagggacgcagctccaagtcgactgagggtccttacaactccttcaagtcagatagtagcaaccaggaatacattatcgagctgagcccaatggaaatcagaacattcattgtatacctaacaccagcgtaaaatacttttttttactctaaagcaacgaaagtatatgcttaataaaatttaatgagtaatataaactagagatgttttcttaagcattcattatttgtatatcacagagtgtcctgtaatttctgaatctcctgctgctgaagatactttgaatttctttctgtggatacttactagtataacaatacatctggattataaattagaatgaccaacaatgtaagtttcaaggaaggaaaatcctttgtcctcaggcgattggacttgatttatgtgttttgagatgtcttaagaggaaatgtttaaaattgcggtcagaaaagaatctgtgaggtatacatatattgaaatactttaaactagagcaacctcaggacatgggtatactatatgctacccctttttattacactgcaatgagaacttgaaaaacagacgttccaaaattgcaatgcggatgacttaatattaatcatgcattcctatttaataaccccaattttaatttttagccaggggcacgaacttacttgaatatacatgtgtggtgtaccgactgcagtcattgctcaaatgtttaataactttcgtgccacaaggggtaacaaaagtccagttagcacatataagggtgcaagtgcttgtatgtttaccctctttaataaaaaattcatctattacttttgaagcagtacgaagtagtagaatgcaaaagcgtattttaatgaaaaaagttgaaaactttcattgcaaaaggggcggcaagtcggttttgtaccatttgttcttattctagatttaattgcgtctagttttctcattcgttgggttttcagggactttaatgtttaagcacttaccatccaaagagcttttgaatatatgtttgttgcagatttgaattccttgagataaatgcggcacattttctaagaaacatttgtaaaattttatttatattcactttttccgtatatgatttttgctttacactcatataaactaatttctataaagttgtctattccgattacagtataataatatattgcctttc

SEQ ID NO: 13283 - DNA, 3461 bp, DROSOPHILA
attgagaggccgatgcgatcgtttgggtcggttggaactttctctataagtcggttgttcccgcaacctctgtgtgcctgtgtgtgtatatacatatatatatatcgtgcagtactgtgcaagtgaaaaatcaaaagttgaatgtaaagtgcacaaacgtaaataaataaaatacgaaaagtgcaatgtctgcgaagacttcggtgtggctggtgttcttttgcgccctcggctgcctgattcacgatgccgatttgcggagtattcaaccaaaagcatcccagtgcggctatcagatgttgaacgtgcacctggtggcccacacacatgacgatgtgggatggctgaagaccgttgaccaatactactatggcagcgagaccaagatccaaaaggctggagtccagtacataatcgattcggttgtggaggctctgctcagggatcccgagaagcgtttcatctatgtggaatctgccttcttcttcaagtggtggaaggagcagaagcccaaggtccaggaggcagtaaagatgctggtggagcagggaagactcgaatttattggcggcgcctggagcatgaatgacgaggccaccacccattaccagagtgtgattgatcagttctcctggggattgagacttttgaatgatacctttggtgagtgcggacgtccgcgtgttggatggcaaatagatccctttggtcattcccgtgaaatggcatccatgtttgcgcaaatgggtttcgatggcatgttcttcggtagactggactaccaggataaggacgagcgtctgatgaccaaaaatgcagagatgatatggcatggatcagcgaatttgggagaggaagcggatctgttcagtggcgccctctacaacaactaccaggcaccagatggcttctgcttcgatatcctatgcaacgatgcacccataatcgatggcaaacacagtcccgacaataatgttaaagagcgcatcgatacgtttttggatttcgccaagacccaatcgcaatactaccgcaccaacaatatcattgtcacaatgggcggtgattttacataccaggctgctcaagtttactataagaacctcgacaagttgatacgatatggcaatgaacgccaggcaaatggttcgaatatcaatcttctatactccactccatcgtgctatctgaaatccctgcacgatgccggtatcacctggccaaccaagagcgacgacttcttcccatacgcttccgatcctcatgcttactggacgggatatttcacatcgcgacccaccttgaagcgattcgaacgggatggcaatcatttcctgcaggtctgcaagcagttgagtgccctggcgcccaagaaacccgaagaattcgatccccacttgaccttcatgagggaaacgctcggaataatgcagcatcacgatgccataactggaacagagaaggaaaaggtggctctggactatgccaagcggatgagtgttgccttcagagcttgtggagctaccactcgtaatgccttgaatcaattgacggtgcaatcgaaggataatgtcaaggatacgtcggccaaatatgtgtttgagttcaaaacgtgtgccctactaaatatcacctcgtgtcccgtgtccgaggcgaacgatagatttgctctaaccctctacaatccactggctcacacggttaatgagtatgtgaggattcctgtgccatattccaactacaggatcatcgataacaagggtgttactctggaaagccaagctgttccgattccccaagtgctgatcgacattaagcacagaaattccacagccaaatacgaaattgttttcctagccaccaatattccagctttgggataccgtacatactatgttgaaaaactggatagtaccgagggtaatactagatcaaaggctttgccgaaaagaacctccagcgttacagtgattggaaatagtcacattcaacttggtttcgacaccaatggtttcctttccgaagtcactgctgatggcctaaccagattggtcagtcaggagttcctattctatgagggtgctgttggaaacaacgcggagttcctgaatcgatcatctggtgcctatatcttccgacccaacgagaacaagattcactttgccaccgatcaagtcgaaattgaagtctacaagggtgatctggttcatgaggtgcatcagaagttcaacgattggattagccaggtggtgcgtgtttacaacaaggattcatacgccgaattcgaatggttggttggacccattcccattgatgatggcattggcaaggaggtgattactcgcttcaactctgacatcgcttcggatggcattttccgcaccgattcaaatggtcgcgagatgatcaagaggaaaatcaaccatcgcgatacgtggagtgtgaaaatcaacgaagccgttgctggcaattactatcccattacgactaaaatagatgtggaggatgacacagcccgcatggccatacttacggatagagcccagggtggtagctccttgaaagacggatccttggaactgatggttcaccgtcgtctgttgaaggacgatgcctttggtgtgggcgaggccttgaatgaaaccgagtatggcgatggactgattgcccgaggcaagcatcatctgttcttcggcaagtcgacggatcgggaaggtgtttccctcaagggaatcgagaggctaacccagctggagaaactgctgcccacatggaagttctttagcaatatggaggattacagtgccgatgaatggcagacagctttcaccaatatctttagtggaatttcattggttctgccgaagcccgtgcatctgctcaccttggagccctggcatgagaaccaactccttgtgcgcttcgagcacatcatggagaacggcgaggatgcatcctactcccagcccgtgcagttcaatgtcaagaacgtgctgagtgccttcgatgtcgagggcatccgtgaaacgactctggatggcaatgcctggctggacgaaagtcgacgacttcagtttgcgccggatcctgaagaagccgcgttcaacacgtatgccacattctcgcaacccgccgaatccgttcacctactaagtgccgagaagcccatgttgggtgttaagtacgccgacgaagccttgccagctggacagctgggtgccgagagcaatcgcattaggcgcgaaacagaaacgcgacaggagaaaaaggacgagggacgcagctccaagtcgactgagggtccttacaactccttcaagtcagatagtagcaaccaggaatacattatcgagctgagcccaatggaaatcagaacattcattgtatacctaacaccagcgtaaaatacttttttttactctaaagcaacgaaagtatatgcttaataaaatttaatgagt

SEQ ID NO: 13284 - protein, 1072 aa, DROSOPHILA
MSAKTSVWLVFFCALGCLIHDADLRSIQPKASQCGYQMLNVHLVAHTHDDVGWLKTVDQYYYGSETKIQKAGVQYIIDSVVEALLRDPEKRFIYVESAFFFKWWKEQKPKVQEAVKMLVEQGRLEFIGGAWSMNDEATTHYQSVIDQFSWGLRLLNDTFGECGRPRVGWQIDPFGHSREMASMFAQMGFDGMFFGRLDYQDKDERLMTKNAEMIWHGSANLGEEADLFSGALYNNYQAPDGFCFDILCNDAPIIDGKHSPDNNVKERIDTFLDFAKTQSQYYRTNNIIVTMGGDFTYQAAQVYYKNLDKLIRYGNERQANGSNINLLYSTPSCYLKSLHDAGITWPTKSDDFFPYASDPHAYWTGYFTSRPTLKRFERDGNHFLQVCKQLSALAPKKPEEFDPHLTFMRETLGIMQHHDAITGTEKEKVALDYAKRMSVAFRACGATTRNALNQLTVQSKDNVKDTSAKYVFEFKTCALLNITSCPVSEANDRFALTLYNPLAHTVNEYVRIPVPYSNYRIIDNKGVTLESQAVPIPQVLIDIKHRNSTAKYEIVFLATNIPALGYRTYYVEKLDSTEGNTRSKALPKRTSSVTVIGNSHIQLGFDTNGFLSEVTADGLTRLVSQEFLFYEGAVGNNAEFLNRSSGAYIFRPNENKIHFATDQVEIEVYKGDLVHEVHQKFNDWISQVVRVYNKDSYAEFEWLVGPIPIDDGIGKEVITRFNSDIASDGIFRTDSNGREMIKRKINHRDTWSVKINEAVAGNYYPITTKIDVEDDTARMAILTDRAQGGSSLKDGSLELMVHRRLLKDDAFGVGEALNETEYGDGLIARGKHHLFFGKSTDREGVSLKGIERLTQLEKLLPTWKFFSNMEDYSADEWQTAFTNIFSGISLVLPKPVHLLTLEPWHENQLLVRFEHIMENGEDASYSQPVQFNVKNVLSAFDVEGIRETTLDGNAWLDESRRLQFAPDPEEAAFNTYATFSQPAESVHLLSAEKPMLGVKYADEALPAGQLGAESNRIRRETETRQEKKDEGRSSKSTEGPYNSFKSDSSNQEYIIELSPMEIRTFIVYLTPA
